(19) United States
(12) Patent Application Publication
(10) Pub. No.: US 2024/0271113 A1
(43) Pub. Date: Aug. 15, 2024

(54) EFFECTOR PROTEINS AND METHODS OF USE

(71) Applicant: Mammoth Biosciences, Inc., Brisbane, CA (US)

(72) Inventors: Lucas Benjamin HARRINGTON, San Francisco, CA (US); David PAEZ-ESPINO, Concord, CA (US); Benjamin Julius RAUCH, San Francisco, CA (US); Stepan TYMOSHENKO, Sacramento, CA (US)

(73) Assignee: Mammoth Biosciences, Inc., Brisbane, CA (US)

(21) Appl. No.: 18/585,306

(22) Filed: Feb. 23, 2024

Related U.S. Application Data
(63) Continuation of application No. PCT/US2022/075228, filed on Aug. 19, 2022.
(60) Provisional application No. 63/285,946, filed on Dec. 3, 2021.
(60) Provisional application No. 63/238,015, filed on Aug. 27, 2021.

(51) Int. Cl. C12N 9/22; A61K 38/00; C12N 15/11; C12N 15/86

(52) U.S. Cl. CPC C12N 9/22; A61K 38/00; C12N 15/111; C12N 15/86; C07K 2319/09; C12N 2750/14143

(57) ABSTRACT

Provided herein are compositions, systems, and methods comprising effector proteins and uses thereof. These effector proteins may be characterized as CRISPR-associated (Cas) proteins. Various compositions, systems, and methods of the present disclosure may leverage the activities of these effector proteins for the modification, detection, and engineering of nucleic acids.

### CROSS-REFERENCE TO RELATED APPLICATIONS

[0001] This application is a continuation of International Application No. PCT/US2022/075228, filed Aug. 18, 2022, which claims priority to U.S. Provisional Patent Application No. 63/238,015, filed Aug. 27, 2021, and U.S. Provisional Patent Application No. 63/285,946, filed Dec. 3, 2021, which are incorporated by reference herein in their entirety for all purposes.

### SEQUENCE LISTING

[0002] The contents of the electronic sequence listing (MABI_019_02US_SeqList_ST26.xml; Size: 5,853,407 bytes; and Date of Creation: Dec. 12, 2023) are herein incorporated by reference in its entirety.

### BACKGROUND

[0003] Programmable nucleases are proteins that bind and cleave nucleic acids in a sequence-specific manner. A programmable nuclease may bind a target sequence of a nucleic acid and cleave the nucleic acid within the target sequence or at a position adjacent to the target sequence. In some instances, a programmable nuclease is activated when it binds a target sequence of a nucleic acid to cleave regions of the nucleic acid that are near, but not adjacent to the target sequence. A programmable nuclease, such as a clustered regularly interspaced short palindromic repeats (CRISPR)-associated (Cas) protein, may be coupled to a guide nucleic acid that imparts activity or sequence selectivity to the programmable nuclease. In general, guide nucleic acids comprise a CRISPR RNA (crRNA) that is at least partially complementary to a target nucleic acid. In some cases, guide nucleic acids comprise a trans-activating crRNA (tracrRNA), at least a portion of which interacts with the programmable nuclease. A guide nucleic acid comprising a crRNA and a tracrRNA is often referred to as a single guide nucleic acid or single guide RNA (sgRNA). In some cases, a tracrRNA is provided separately from the guide nucleic acid. The tracrRNA may hybridize to a portion of the guide nucleic acid that does not hybridize to the target nucleic acid.

[0004] Programmable nucleases may cleave nucleic acids, including single stranded RNA (ssRNA), double stranded DNA (dsDNA), and single-stranded DNA (ssDNA). Programmable nucleases may provide cis cleavage activity, trans cleavage activity, nickase activity, or a combination thereof. Cis cleavage activity is cleavage of a target nucleic acid that is hybridized to a guide nucleic acid, wherein cleavage occurs within or directly adjacent to the region of the target nucleic acid that is hybridized to the guide nucleic acid. Trans cleavage activity (also referred to as transcollateral cleavage) is cleavage of ssDNA or ssRNA that is near, but not hybridized to the guide nucleic acid. Trans cleavage activity is triggered by the hybridization of a guide nucleic acid to the target nucleic acid. Nickase activity is the selective cleavage of one strand of a dsDNA molecule. While certain programmable nucleases may be used to edit and detect nucleic acid molecules in a sequence specific manner, challenging biological sample conditions (e.g., high viscosity, metal chelating) may limit their accuracy and effectiveness. There is thus a need for systems and methods that employ programmable nucleases having specificity and efficiency across a wide range of sample conditions.

### SUMMARY

[0005] The present disclosure provides polypeptides, such as effector proteins, compositions, and systems comprising the same and uses thereof. In some instances, compositions, systems, and methods comprise guide nucleic acids or uses thereof. Compositions, systems and methods disclosed herein may leverage the nucleic acid modifying activities. Nucleic acid modifying activities may include cis cleavage activity, trans cleavage activity, nicking activity, or nucleobase modifying activity. In some instances, compositions, systems and methods are useful for the detection of target nucleic acids. In some instances, compositions, systems and methods are useful for the treatment of a disease or disorder. The disease or disorder may be associated with one or more mutations in the target nucleic acid.

### I. Certain Embodiments

[0006] Disclosed herein, in some aspects, are compositions that comprise an effector protein and an engineered guide nucleic acid, wherein the effector protein comprises an amino acid sequence that is at least 75%, at least 80%, at least 85%, at least 90%, at least 95%, at least 98%, at least 99% or 100% identical to any one of SEQ ID NOs: 1-1614 and 3195-3302. Also, disclosed herein, in some aspects, are compositions that comprise an effector protein and an engineered guide nucleic acid, wherein the amino acid sequence of the effector protein is at least 75%, at least 80%, at least 85%, at least 90%, at least 95%, at least 98%, at least 99% or 100% identical to any one of SEQ ID NOs: 1-1614 and 3195-3302. Also, disclosed herein, in some aspects, are compositions that comprise an effector protein and an engineered guide nucleic acid, wherein the effector protein comprises about 100, about 120, about 140, about 160, about 180, about 200, about 220, about 240, about 260, about 280, about 300, about 320, about 340, about 360, about 380, about 400, about 420, about 440, about 460, about 480, about 500, about 520, about 540, about 560, about 580, about 600, about 620, about 640, about 660, about 680, about 700, about 720, about 740, about 760, about 780, about 800, about 820, about 840, about 860, about 880, about 900, about 920, about 940, about 960, about 980, about 1000, about 1020, about 1040, about 1060, about 1080, about 1100, about 1120, about 1140, about 1160, about 1180, about 1200, about 1220, about 1240, about 1260, about 1280, about 1300, about 1320, about 1340, about 1360, about 1380, or about 1400 contiguous amino acids of a sequence selected from any one of SEQ ID NOS: 1-1614 and 3195-3302. Also, disclosed herein, in some aspects, are compositions that comprise an effector protein and an engineered guide nucleic acid, wherein the effector protein comprises the amino acid sequence located at positions 1-100, 150-250, 101-200, 250-350, 201-300, 350-450, 301-400, 350-450, 401-500, 450-550, 501-600, 550-650, 601-700, 650-750, 701-800, 750-850, 801-900, 850-950, 901-1000, 950-1050, 1001-1100, 1050-1150, 1101-1200, 1150-1250, 1201-1300, 1250-1350, 1301-1400, 1350-1450, 1401-1500, 1450-1550, 1501-1600, 1550-1650, 1601-1700, 1650-1750, 1701-1800, 1850-1950, or 1801-1900 of a sequence selected from SEQ ID NOS: 1-1614 and 3195-3302. Also, disclosed herein, in some aspects, are compositions that comprise an effector protein and an engineered guide nucleic acid, wherein the effector protein comprises an amino acid sequence that is at least 90%, at least 95%, or 100% identical to a portion of a sequence selected from SEQ ID NOS: 1-1614 and 3195-3302, wherein the portion of the sequence is about 30%, about 40% about 50%, about 60%, about 70%, about 80%, or about 90% of the sequence. Also, disclosed herein, in some aspects, are compositions that comprise an effector protein, and an engineered guide nucleic acid, wherein the amino acid sequence of the effector protein is at least 50%, at least 55%, at least 60%, at least 65%, at least 70%, at least 75%, at least 80%, at least 85%, at least 90%, at least 95%, at least 97%, at least 98%, at least 99% or 100% identical to a sequence selected from Column A1 of TABLE 1; and at least a portion of the engineered guide nucleic acid comprises a nucleobase sequence that is: i) at least 50%, at least 55%, at least 60%, at least 65%, at least 70%, at least 75%, at least 80%, at least 85%, at least 90%, at least 95%, or 100% identical to a sequence selected from Column B1 of TABLE 1, wherein the sequence from Column A1 and the sequence from Column B1 are in the same row of TABLE 1, or ii) at least 50%, at least 55%, at least 60%, at least 65%, at least 70%, at least 75%, at least 80%, at least 85%, at least 90%, at least 95%, or 100% reverse complementary to a sequence selected from Column B1 of TABLE 1, wherein the sequence from Column A1 and the sequence from Column B1 are in the same row of TABLE 1. Also, disclosed herein, in some aspects, are compositions that comprise an effector protein, and an engineered guide nucleic acid, wherein the amino acid sequence of the effector protein is at least 50%, at least 55%, at least 60%, at least 65%, at least 70%, at least 75%, at least 80%, at least 85%, at least 90%, at least 95%, at least 97%, at least 98%, at least 99% or 100% identical to a sequence selected from Column A2 of TABLE 1; and at least a portion of the engineered guide nucleic acid comprises a nucleobase sequence that is: i) at least 50%, at least 55%, at least 60%, at least 65%, at least 70%, at least 75%, at least 80%, at least 85%, at least 90%, at least 95%, or 100% identical to a sequence selected from Column B2 of TABLE 1, wherein the sequence from Column A2 and the sequence from Column B2 are in the same row of TABLE 1, or ii) at least 50%, at least 55%, at least 60%, at least 65%, at least 70%, at least 75%, at least 80%, at least 85%, at least 90%, at least 95%, or 100% reverse complementary to a sequence selected from Column B2 of TABLE 1, wherein the sequence from Column A2 and the sequence from Column B2 are in the same row of TABLE 1. Also, disclosed herein, in some aspects, are compositions that comprise an effector protein, and an engineered guide nucleic acid, wherein the amino acid sequence of the effector protein is at least 50%, at least 55%, at least 60%, at least 65%, at least 70%, at least 75%, at least 80%, at least 85%, at least 90%, at least 95%, at least 97%, at least 98%, at least 99% or 100% identical to a sequence selected from Column A3 of TABLE 1; and at least a portion of the engineered guide nucleic acid comprises a nucleobase sequence that is: i) at least 50%, at least 55%, at least 60%, at least 65%, at least 70%, at least 75%, at least 80%, at least 85%, at least 90%, at least 95%, or 100% identical to a sequence selected from Column B3 of TABLE 1, wherein the sequence from Column A3 and the sequence from Column B3 are in the same row of TABLE 1, or ii) at least 50%, at least 55%, at least 60%, at least 65%, at least 70%, at least 75%, at least 80%, at least 85%, at least 90%, at least 95%, or 100% reverse complementary to a sequence selected from Column B3 of TABLE 1, wherein the sequence from Column A3 and the sequence from Column B3 are in the same row of TABLE 1.

[0007] Also, disclosed herein, in some aspects, are compositions that comprise an effector protein, and an engineered guide nucleic acid, wherein the amino acid sequence of the effector protein is at least 50%, at least 55%, at least 60%, at least 65%, at least 70%, at least 75%, at least 80%, at least 85%, at least 90%, at least 95%, at least 97%, at least 98%, at least 99% or 100% identical to a sequence selected from Column C1 of TABLE 2; and at least a portion of the engineered guide nucleic acid comprises a nucleobase sequence that is: i) at least 50%, at least 55%, at least 60%, at least 65%, at least 70%, at least 75%, at least 80%, at least 85%, at least 90%, at least 95%, or 100% identical to a sequence selected from Column D1 of TABLE 2, wherein the sequence from Column C1 and the sequence from Column D1 are in the same row of TABLE 2, or ii) at least 50%, at least 55%, at least 60%, at least 65%, at least 70%, at least 75%, at least 80%, at least 85%, at least 90%, at least 95%, or 100% reverse complementary to a sequence selected from Column D1 of TABLE 2, wherein the sequence from Column C1 and the sequence from Column D1 are in the same row of TABLE 2. Also, disclosed herein, in some aspects, are compositions that comprise an effector protein, and an engineered guide nucleic acid, wherein the amino acid sequence of the effector protein is at least 50%, at least 55%, at least 60%, at least 65%, at least 70%, at least 75%, at least 80%, at least 85%, at least 90%, at least 95%, at least 97%, at least 98%, at least 99% or 100% identical to a sequence selected from Column C2 of TABLE 2; and at least a portion of the engineered guide nucleic acid comprises a nucleobase sequence that is: i) at least 50%, at least 55%, at least 60%, at least 65%, at least 70%, at least 75%, at least 80%, at least 85%, at least 90%, at least 95%, or 100% identical to a sequence selected from Column D2 of TABLE 2, wherein the sequence from Column C2 and the sequence from Column D2 are in the same row of TABLE 2, or ii) at least 50%, at least 55%, at least 60%, at least 65%, at least 70%, at least 75%, at least 80%, at least 85%, at least 90%, at least 95%, or 100% reverse complementary to a sequence selected from Column D2 of TABLE 2, wherein the sequence from Column C2 and the sequence from Column D2 are in the same row of TABLE 2.

[0008] Also, disclosed herein, in some aspects, are compositions that comprise an effector protein, and an engineered guide nucleic acid, wherein the amino acid sequence of the effector protein is at least 50% identical to a sequence selected from Column A1 of TABLE 1, and wherein at least a portion of the engineered guide nucleic acid comprises a nucleobase sequence that is at least 50% identical or at least 50% reverse complementary to a sequence selected from Column B1 of TABLE 1, wherein the sequence from Column A1 and the sequence from Column B1 are in the same row of TABLE 1. Also, disclosed herein, in some aspects, are compositions that comprise an effector protein, and an engineered guide nucleic acid, wherein the amino acid sequence of the effector protein is at least 60% identical to a sequence selected from Column A1 of TABLE 1, and wherein at least a portion of the engineered guide nucleic acid comprises a nucleobase sequence that is at least 60% identical or at least 60% reverse complementary to a sequence selected from Column B1 of TABLE 1, wherein the sequence from Column A1 and the sequence from Column B1 are in the same row of TABLE 1. Also, disclosed herein, in some aspects, are compositions that comprise an effector protein, and an engineered guide nucleic acid, wherein the amino acid sequence of the effector protein is at least 70% identical to a sequence selected from Column A1 of TABLE 1, and wherein at least a portion of the engineered guide nucleic acid comprises a nucleobase sequence that is at least 70% identical or at least 70% reverse complementary to a sequence selected from Column B1 of TABLE 1, wherein the sequence from Column A1 and the sequence from Column B1 are in the same row of TABLE 1. Also, disclosed herein, in some aspects, are compositions that comprise an effector protein, and an engineered guide nucleic acid, wherein the amino acid sequence of the effector protein is at least 80% identical to a sequence selected from Column A1 of TABLE 1, and wherein at least a portion of the engineered guide nucleic acid comprises a nucleobase sequence that is at least 80% identical or at least 80% reverse complementary to a sequence selected from Column B1 of TABLE 1, wherein the sequence from Column A1 and the sequence from Column B1 are in the same row of TABLE 1. Also, disclosed herein, in some aspects, are compositions that comprise an effector protein, and an engineered guide nucleic acid, wherein the amino acid sequence of the effector protein is at least 90% identical to a sequence selected from Column A1 of TABLE 1, and wherein at least a portion of the engineered guide nucleic acid comprises a nucleobase sequence that is at least 90% identical or at least 90% reverse complementary to a sequence selected from Column B1 of TABLE 1, wherein the sequence from Column A1 and the sequence from Column B1 are in the same row of TABLE 1. Also, disclosed herein, in some aspects, are compositions that comprise an effector protein, and an engineered guide nucleic acid, wherein the amino acid sequence of the effector protein is at least 95% identical to a sequence selected from Column A1 of TABLE 1, and wherein at least a portion of the engineered guide nucleic acid comprises a nucleobase sequence that is at least 95% identical or at least 95% reverse complementary to a sequence selected from Column B1 of TABLE 1, wherein the sequence from Column A1 and the sequence from Column B1 are in the same row of TABLE 1. Also, disclosed herein, in some aspects, are compositions that comprise an effector protein, and an engineered guide nucleic acid, wherein the amino acid sequence of the effector protein is 100% identical to a sequence selected from Column A1 of TABLE 1, and wherein at least a portion of the engineered guide nucleic acid comprises a nucleobase sequence that is 100% identical or 100% reverse complementary to a sequence selected from Column B1 of TABLE 1, wherein the sequence from Column A1 and the sequence from Column B1 are in the same row of TABLE 1. Also, disclosed herein, in some aspects, are compositions that comprise an effector protein, and an engineered guide nucleic acid, wherein the amino acid sequence of the effector protein is at least 50% identical to a sequence selected from Column A2 of TABLE 1, and wherein at least a portion of the engineered guide nucleic acid comprises a nucleobase sequence that is at least 50% identical or at least 50% reverse complementary to a sequence selected from Column B2 of TABLE 1, wherein the sequence from Column A2 and the sequence from Column B2 are in the same row of TABLE 1. Also, disclosed herein, in some aspects, are compositions that comprise an effector protein, and an engineered guide nucleic acid, wherein the amino acid sequence of the effector protein is at least 60% identical to a sequence selected from Column A2 of TABLE 1, and wherein at least a portion of the engineered guide nucleic acid comprises a nucleobase sequence that is at least 60% identical or at least 60% reverse complementary to a sequence selected from Column B2 of TABLE 1, wherein the sequence from Column A2 and the sequence from Column B2 are in the same row of TABLE 1. Also, disclosed herein, in some aspects, are compositions that comprise an effector protein, and an engineered guide nucleic acid, wherein the amino acid sequence of the effector protein is at least 70% identical to a sequence selected from Column A2 of TABLE 1, and wherein at least a portion of the engineered guide nucleic acid comprises a nucleobase sequence that is at least 70% identical or at least 70% reverse complementary to a sequence selected from Column B2 of TABLE 1, wherein the sequence from Column A2 and the sequence from Column B2 are in the same row of TABLE 1. Also, disclosed herein, in some aspects, are compositions that comprise an effector protein, and an engineered guide nucleic acid, wherein the amino acid sequence of the effector protein is at least 80% identical to a sequence selected from Column A2 of TABLE 1, and wherein at least a portion of the engineered guide nucleic acid comprises a nucleobase sequence that is at least 80% identical or at least 80% reverse complementary to a sequence selected from Column B2 of TABLE 1, wherein the sequence from Column A2 and the sequence from Column B2 are in the same row of TABLE 1. Also, disclosed herein, in some aspects, are compositions that comprise an effector protein, and an engineered guide nucleic acid, wherein the amino acid sequence of the effector protein is at least 90% identical to a sequence selected from Column A2 of TABLE 1, and wherein at least a portion of the engineered guide nucleic acid comprises a nucleobase sequence that is at least 90% identical or at least 90% reverse complementary to a sequence selected from Column B2 of TABLE 1, wherein the sequence from Column A2 and the sequence from Column B2 are in the same row of TABLE 1. Also, disclosed herein, in some aspects, are compositions that comprise an effector protein, and an engineered guide nucleic acid, wherein the amino acid sequence of the effector protein is at least 95% identical to a sequence selected from Column A2 of TABLE 1, and wherein at least a portion of the engineered guide nucleic acid comprises a nucleobase sequence that is at least 95% identical or at least 95% reverse complementary to a sequence selected from Column B2 of TABLE 1, wherein the sequence from Column A2 and the sequence from Column B2 are in the same row of TABLE 1. Also, disclosed herein, in some aspects, are compositions that comprise an effector protein, and an engineered guide nucleic acid, wherein the amino acid sequence of the effector protein is 100% identical to a sequence selected from Column A2 of TABLE 1, and wherein at least a portion of the engineered guide nucleic acid comprises a nucleobase sequence that is 100% identical or 100% reverse complementary to a sequence selected from Column B2 of TABLE 1, wherein the sequence from Column A2 and the sequence from Column B2 are in the same row of TABLE 1. Also, disclosed herein, in some aspects, are compositions that comprise an effector protein, and an engineered guide nucleic acid, wherein the amino acid sequence of the effector protein is at least 50% identical to a sequence selected from Column A3 of TABLE 1, and wherein at least a portion of the engineered guide nucleic acid comprises a nucleobase sequence that is at least 50% identical or at least 50% reverse complementary to a sequence selected from Column B3 of TABLE 1, wherein the sequence from Column A3 and the sequence from Column B3 are in the same row of TABLE 1. Also, disclosed herein, in some aspects, are compositions that comprise an effector protein, and an engineered guide nucleic acid, wherein the amino acid sequence of the effector protein is at least 60% identical to a sequence selected from Column A3 of TABLE 1, and wherein at least a portion of the engineered guide nucleic acid comprises a nucleobase sequence that is at least 60% identical or at least 60% reverse complementary to a sequence selected from Column B3 of TABLE 1, wherein the sequence from Column A3 and the sequence from Column B3 are in the same row of TABLE 1. Also, disclosed herein, in some aspects, are compositions that comprise an effector protein, and an engineered guide nucleic acid, wherein the amino acid sequence of the effector protein is at least 70% identical to a sequence selected from Column A3 of TABLE 1, and wherein at least a portion of the engineered guide nucleic acid comprises a nucleobase sequence that is at least 70% identical or at least 70% reverse complementary to a sequence selected from Column B3 of TABLE 1, wherein the sequence from Column A3 and the sequence from Column B3 are in the same row of TABLE 1. Also, disclosed herein, in some aspects, are compositions that comprise an effector protein, and an engineered guide nucleic acid, wherein the amino acid sequence of the effector protein is at least 80% identical to a sequence selected from Column A3 of TABLE 1, and wherein at least a portion of the engineered guide nucleic acid comprises a nucleobase sequence that is at least 80% identical or at least 80% reverse complementary to a sequence selected from Column B3 of TABLE 1, wherein the sequence from Column A3 and the sequence from Column B3 are in the same row of TABLE 1. Also, disclosed herein, in some aspects, are compositions that comprise an effector protein, and an engineered guide nucleic acid, wherein the amino acid sequence of the effector protein is at least 90% identical to a sequence selected from Column A3 of TABLE 1, and wherein at least a portion of the engineered guide nucleic acid comprises a nucleobase sequence that is at least 90% identical or at least 90% reverse complementary to a sequence selected from Column B3 of TABLE 1, wherein the sequence from Column A3 and the sequence from Column B3 are in the same row of TABLE 1. Also, disclosed herein, in some aspects, are compositions that comprise an effector protein, and an engineered guide nucleic acid, wherein the amino acid sequence of the effector protein is at least 95% identical to a sequence selected from Column A3 of TABLE 1, and wherein at least a portion of the engineered guide nucleic acid comprises a nucleobase sequence that is at least 95% identical or at least 95% reverse complementary to a sequence selected from Column B3 of TABLE 1, wherein the sequence from Column A3 and the sequence from Column B3 are in the same row of TABLE 1. Also, disclosed herein, in some aspects, are compositions that comprise an effector protein, and an engineered guide nucleic acid, wherein the amino acid sequence of the effector protein is 100% identical to a sequence selected from Column A3 of TABLE 1, and wherein at least a portion of the engineered guide nucleic acid comprises a nucleobase sequence that is 100% identical or 100% reverse complementary to a sequence selected from Column B3 of TABLE 1, wherein the sequence from Column A3 and the sequence from Column B3 are in the same row of TABLE 1.

[0009] Also, disclosed herein, in some aspects, are compositions that comprise an effector protein, and an engineered guide nucleic acid, wherein the amino acid sequence of the effector protein is at least 50% identical to a sequence selected from Column C1 of TABLE 2, and wherein at least a portion of the engineered guide nucleic acid comprises a nucleobase sequence that is at least 50% identical or at least 50% reverse complementary to a sequence selected from Column D1 of TABLE 2, wherein the sequence from Column C1 and the sequence from Column D1 are in the same row of TABLE 2. Also, disclosed herein, in some aspects, are compositions that comprise an effector protein, and an engineered guide nucleic acid, wherein the amino acid sequence of the effector protein is at least 60% identical to a sequence selected from Column C1 of TABLE 2, and wherein at least a portion of the engineered guide nucleic acid comprises a nucleobase sequence that is at least 60% identical or at least 60% reverse complementary to a sequence selected from Column D1 of TABLE 2, wherein the sequence from Column C1 and the sequence from Column D1 are in the same row of TABLE 2. Also, disclosed herein, in some aspects, are compositions that comprise an effector protein, and an engineered guide nucleic acid, wherein the amino acid sequence of the effector protein is at least 70% identical to a sequence selected from Column C1 of TABLE 2, and wherein at least a portion of the engineered guide nucleic acid comprises a nucleobase sequence that is at least 70% identical or at least 70% reverse complementary to a sequence selected from Column D1 of TABLE 2, wherein the sequence from Column C1 and the sequence from Column D1 are in the same row of TABLE 2. Also, disclosed herein, in some aspects, are compositions that comprise an effector protein, and an engineered guide nucleic acid, wherein the amino acid sequence of the effector protein is at least 80% identical to a sequence selected from Column C1 of TABLE 2, and wherein at least a portion of the engineered guide nucleic acid comprises a nucleobase sequence that is at least 80% identical or at least 80% reverse complementary to a sequence selected from Column D1 of TABLE 2, wherein the sequence from Column C1 and the sequence from Column D1 are in the same row of TABLE 2. Also, disclosed herein, in some aspects, are compositions that comprise an effector protein, and an engineered guide nucleic acid, wherein the amino acid sequence of the effector protein is at least 90% identical to a sequence selected from Column C1 of TABLE 2, and wherein at least a portion of the engineered guide nucleic acid comprises a nucleobase sequence that is at least 90% identical or at least 90% reverse complementary to a sequence selected from Column D1 of TABLE 2, wherein the sequence from Column C1 and the sequence from Column D1 are in the same row of TABLE 2. Also, disclosed herein, in some aspects, are compositions that comprise an effector protein, and an engineered guide nucleic acid, wherein the amino acid sequence of the effector protein is at least 95% identical to a sequence selected from Column C1 of TABLE 2, and wherein at least a portion of the engineered guide nucleic acid comprises a nucleobase sequence that is at least 95% identical or at least 95% reverse complementary to a sequence selected from Column D1 of TABLE 2, wherein the sequence from Column C1 and the sequence from Column D1 are in the same row of TABLE 2. Also, disclosed herein, in some aspects, are compositions that comprise an effector protein, and an engineered guide nucleic acid, wherein the amino acid sequence of the effector protein is 100% identical to a sequence selected from Column C1 of TABLE 2, and wherein at least a portion of the engineered guide nucleic acid comprises a nucleobase sequence that is 100% identical or 100% reverse complementary to a sequence selected from Column D1 of TABLE 2, wherein the sequence from Column C1 and the sequence from Column D1 are in the same row of TABLE 2.

[0010] Also, disclosed herein, in some aspects, are compositions that comprise an effector protein, and an engineered guide nucleic acid, wherein the amino acid sequence of the effector protein is at least 50% identical to a sequence selected from Column C2 of TABLE 2, and wherein at least a portion of the engineered guide nucleic acid comprises a nucleobase sequence that is at least 50% identical or at least 50% reverse complementary to a sequence selected from Column D2 of TABLE 2, wherein the sequence from Column C2 and the sequence from Column D2 are in the same row of TABLE 2. Also, disclosed herein, in some aspects, are compositions that comprise an effector protein, and an engineered guide nucleic acid, wherein the amino acid sequence of the effector protein is at least 60% identical to a sequence selected from Column C2 of TABLE 2, and wherein at least a portion of the engineered guide nucleic acid comprises a nucleobase sequence that is at least 60% identical or at least 60% reverse complementary to a sequence selected from Column D2 of TABLE 2, wherein the sequence from Column C2 and the sequence from Column D2 are in the same row of TABLE 2. Also, disclosed herein, in some aspects, are compositions that comprise an effector protein, and an engineered guide nucleic acid, wherein the amino acid sequence of the effector protein is at least 70% identical to a sequence selected from Column C2 of TABLE 2, and wherein at least a portion of the engineered guide nucleic acid comprises a nucleobase sequence that is at least 70% identical or at least 70% reverse complementary to a sequence selected from Column D2 of TABLE 2, wherein the sequence from Column C2 and the sequence from Column D2 are in the same row of TABLE 2. Also, disclosed herein, in some aspects, are compositions that comprise an effector protein, and an engineered guide nucleic acid, wherein the amino acid sequence of the effector protein is at least 80% identical to a sequence selected from Column C2 of TABLE 2, and wherein at least a portion of the engineered guide nucleic acid comprises a nucleobase sequence that is at least 80% identical or at least 80% reverse complementary to a sequence selected from Column D2 of TABLE 2, wherein the sequence from Column C2 and the sequence from Column D2 are in the same row of TABLE 2. Also, disclosed herein, in some aspects, are compositions that comprise an effector protein, and an engineered guide nucleic acid, wherein the amino acid sequence of the effector protein is at least 90% identical to a sequence selected from Column C2 of TABLE 2, and wherein at least a portion of the engineered guide nucleic acid comprises a nucleobase sequence that is at least 90% identical or at least 90% reverse complementary to a sequence selected from Column D2 of TABLE 2, wherein the sequence from Column C2 and the sequence from Column D2 are in the same row of TABLE 2. Also, disclosed herein, in some aspects, are compositions that comprise an effector protein, and an engineered guide nucleic acid, wherein the amino acid sequence of the effector protein is at least 95% identical to a sequence selected from Column C2 of TABLE 2, and wherein at least a portion of the engineered guide nucleic acid comprises a nucleobase sequence that is at least 95% identical or at least 95% reverse complementary to a sequence selected from Column D2 of TABLE 2, wherein the sequence from Column C2 and the sequence from Column D2 are in the same row of TABLE 2. Also, disclosed herein, in some aspects, are compositions that comprise an effector protein, and an engineered guide nucleic acid, wherein the amino acid sequence of the effector protein is 100% identical to a sequence selected from Column C2 of TABLE 2, and wherein at least a portion of the engineered guide nucleic acid comprises a nucleobase sequence that is 100% identical or 100% reverse complementary to a sequence selected from Column D2 of TABLE 2, wherein the sequence from Column C2 and the sequence from Column D2 are in the same row of TABLE 2.

[0011] In some embodiments, the portion of the engineered guide nucleic acid binds the effector protein. In some embodiments, the engineered guide nucleic acid comprises a crRNA. In some embodiments, the engineered guide nucleic acid comprises a tracrRNA. In some embodiments, the effector protein comprises a nuclear localization signal. In some embodiments, the length of the effector protein is at least 700, at least 750, at least 800, at least 850, at least 900, at least 950, at least 1000, at least 1050, at least 1100, at least 1150, or at least 1200 linked amino acid residues. In some embodiments, the length of the effector protein is less than about 1900 linked amino acids. In some embodiments, the length of the effector protein is about 700 linked amino acids to about 1900 linked amino acids. In some embodiments, the length of the effector protein is about 700 to about 800, about 800 to about 900, about 900 to about 1000, about 1000 to about 1100, about 1100 to about 1200, about 1200 to about 1300, about 1300 to about 1400, about 1400 to about 1500, about 1500 to about 1600, about 1600 to about 1700, about 1700 to about 1800, or about 1800 to about 1900 linked amino acids. In some embodiments, compositions comprise a donor nucleic acid. In some embodiments, compositions comprise a fusion partner protein. In some embodiments, the fusion partner protein is directly fused to the N terminus or C terminus of the effector protein via an amide bond. In some embodiments, the fusion partner protein is directly fused to the N terminus or C terminus of the effector protein via a linker peptide. In some embodiments, the fusion partner protein comprises a polypeptide selected from a deaminase, a transcriptional activator, a transcriptional repressor, or a functional domain thereof. In some embodiments, the effector protein comprises at least one mutation that reduces its nuclease activity as measured in a standard cleavage assay. In some embodiments, the effector protein is a catalytically inactive nuclease. In some embodiments, the composition is a pharmaceutical composition comprising a pharmaceutically acceptable excipient.

[0012] Disclosed herein, in some aspects, are compositions that comprise a nucleic acid expression vector encoding an effector protein, wherein the effector protein comprises an amino acid sequence that is at least 75%, at least 80%, at least 85%, at least 90%, at least 95%, at least 98%, at least 99% or 100% identical to any one of SEQ ID NOs: 1-1614 and 3195-3302. In some embodiments, the nucleic acid expression vector encodes an engineered guide nucleic acid. In some embodiments, compositions comprise an additional nucleic acid expression vector encoding an engineered guide nucleic acid. In some embodiments, the effector protein comprises an amino acid sequence that is at least 50%, at least 55%, at least 60%, at least 65%, at least 70%, at least 75%, at least 80%, at least 85%, at least 90%, at least 95%, at least 97%, at least 98%, at least 99% or 100% identical to a sequence selected from Column A1, Column A2, and Column A3 of TABLE 1 and Column C1 and C2 of TABLE 2, and wherein at least a portion of the engineered guide nucleic acid comprises a nucleobase sequence that is at least 50%, at least 55%, at least 60%, at least 65%, at least 70%, at least 75%, at least 80%, at least 85%, at least 90%, at least 95%, or 100% identical or at least 50%, at least 55%, at least 60%, at least 65%, at least 70%, at least 75%, at least 80%, at least 85%, at least 90%, at least 95%, or 100% reverse complementary to a sequence selected from Column B1, Column B2, and Column B3 of TABLE 1 and Column D1 and D2 of TABLE 2, respectively, wherein the sequence from Column A1, A2, or A3 and the sequence from Column B1, B2, or B3 are in the same row of TABLE 1 and the sequence from Column C1 or C2 and the sequence from Column D1 or D2 are in the same row of TABLE 2, respectively. In some embodiments, compositions comprise a donor nucleic acid. In some embodiments, the donor nucleic acid is encoded by the nucleic acid expression vector or additional nucleic acid expression vector.

[0013] Disclosed herein are viruses comprising a nucleic acid expression vector encoding an effector protein, wherein the effector protein comprises an amino acid sequence that is at least 75%, at least 80%, at least 85%, at least 90%, at least 95%, at least 98%, at least 99% or 100% identical to any one of SEQ ID NOs: 1-1614 and 3195-3302. In some embodiments, the nucleic acid expression vector encodes an engineered guide nucleic acid. In some embodiments, compositions comprise an additional nucleic acid expression vector encoding an engineered guide nucleic acid. In some embodiments, the effector protein comprises an amino acid sequence that is at least 50%, at least 55%, at least 60%, at least 65%, at least 70%, at least 75%, at least 80%, at least 85%, at least 90%, at least 95%, at least 97%, at least 98%, at least 99% or 100% identical to a sequence selected from Column A1, Column A2, and Column A3 of TABLE 1 and Column C1 and C2 of TABLE 2, and wherein at least a portion of the engineered guide nucleic acid comprises a nucleobase sequence that is at least 50%, at least 55%, at least 60%, at least 65%, at least 70%, at least 75%, at least 80%, at least 85%, at least 90%, at least 95%, or 100% identical or at least 50%, at least 55%, at least 60%, at least 65%, at least 70%, at least 75%, at least 80%, at least 85%, at least 90%, at least 95%, or 100% reverse complementary to a sequence selected from Column B1, Column B2, and Column B3 of TABLE 1 and Column D1 and D2 of TABLE 2, respectively, wherein the sequence from Column A1, A2, or A3 and the sequence from Column B1, B2, or B3 are in the same row of TABLE 1 and the sequence from Column C1 or C2 and the sequence from Column D1 or D2 are in the same row of TABLE 2, respectively. In some embodiments, compositions comprise a donor nucleic acid. In some embodiments, the donor nucleic acid is encoded by the nucleic acid expression vector or additional nucleic acid expression vector.

[0014] Disclosed herein, in some aspects, are systems that comprise a composition described herein and at least one detection reagent for detecting a target nucleic acid. In some embodiments, the at least one detection reagent is selected from a reporter nucleic acid, a detection moiety, an additional effector protein, or a combination thereof, optionally wherein the reporter nucleic acid comprises a fluorophore, a quencher, or a combination thereof. In some embodiments, systems comprise at least one amplification reagent for amplifying a target nucleic acid. In some embodiments, the at least one amplification reagent is selected from the group consisting of a primer, an activator, a dNTP, an rNTP, and combinations thereof.

[0015] Disclosed herein, in some aspects, are methods of modifying a target nucleic acid in a sample, comprising contacting the sample with a composition described herein, a virus described herein, a pharmaceutical composition described herein, or a system described herein, thereby generating a modification of the target nucleic acid; and optionally detecting the modification.

[0016] Disclosed herein, in some aspects, are methods of detecting a target nucleic acid in a sample, comprising the steps of: contacting the sample with a composition or system described herein, a reporter nucleic acid comprising a detectable moiety that produces a detectable signal in the presence of the target nucleic acid and the composition or system, and detecting the detectable signal. In some embodiments, the reporter nucleic acid comprises a fluorophore, a quencher, or a combination thereof, and wherein the detecting comprises detecting a fluorescent signal. In some embodiments, methods comprise reverse transcribing the target nucleic acid, amplifying the target nucleic acid, in vitro transcribing the target nucleic acid, or any combination thereof. In some embodiments, methods comprise reverse transcribing the target nucleic acid and/or amplifying the target nucleic acid before contacting the sample with the composition. In some embodiments, methods comprise reverse transcribing the target nucleic acid and/or amplifying the target nucleic acid after contacting the sample with the composition. In some embodiments, amplifying comprises isothermal amplification. In some embodiments, the target nucleic acid is from a pathogen. In some embodiments, the pathogen is a virus. In some embodiments, the target nucleic acid comprises RNA. In some embodiments, the target nucleic acid comprises DNA.

[0017] Disclosed herein, in some aspects, are methods of modifying a target nucleic acid, the method comprising contacting the target nucleic acid with a composition described herein, a virus described herein, or a pharmaceutical composition described herein, thereby modifying the target nucleic acid. In some embodiments, modifying the target nucleic acid comprises cleaving the target nucleic acid, deleting a nucleotide of the target nucleic acid, inserting a nucleotide into the target nucleic acid, substituting a nucleotide of the target nucleic acid with a donor nucleotide or an additional nucleotide, or any combination thereof. In some embodiments, methods comprise contacting the target nucleic acid with a donor nucleic acid. In some embodiments, the target nucleic acid comprises a mutation associated with a disease. In some embodiments, the disease is suspected to cause, at least in part, a cancer, an inherited disorder, an ophthalmological disorder, or a combination thereof. In some embodiments, the disease is cancer, an ophthalmological disease, a neurological disorder, a blood disorder, or a metabolic disorder. In some embodiments, the neurological disorder is Duchenne muscular dystrophy, myotonic dystrophy Type 1, or cystic fibrosis. In some embodiments, the neurological disorder is a neurodegenerative disease. In some embodiments, contacting the target nucleic acid comprises contacting a cell, wherein the target nucleic acid is located in the cell. In some embodiments, contacting occurs in vitro. In some embodiments, the contacting occurs in vivo. In some embodiments, contacting occurs ex vivo.

[0018] Disclosed herein, in some aspects, are cells that comprise a composition described herein. In some embodiments, cells are infected by a virus described herein. Also, disclosed herein, in some aspects, are cells that comprise a modified target nucleic acid, wherein the modified target nucleic acid is a target nucleic acid modified according to any one of the methods described herein. In some embodiments, the cell is a eukaryotic cell. In some embodiments, the cell is a mammalian cell. In some embodiments, the cell is a T cell. In some embodiments, the T cell is a natural killer T cell (NKT). In some embodiments, the cell is an induced pluripotent stem cell (iPSC).

[0019] Disclosed herein, in some aspects, are methods of producing a protein, the method comprising, contacting a cell comprising a target nucleic acid to a compositions described herein, thereby editing the target nucleic acid to produce a modified cell comprising a modified target nucleic acid; and producing a protein from the cell that is encoded, transcriptionally affected, or translationally affected by the modified nucleic acid.

[0020] Disclosed herein, in some aspects, are methods of treating a disease comprising administering to a subject in need thereof a composition described herein, a virus described herein, a pharmaceutical composition described herein, or a cell described herein.

### INCORPORATION BY REFERENCE

[0021] All publications, patents, and patent applications mentioned in this specification are herein incorporated by reference to the same extent as if each individual publication, patent, or patent application was specifically and individually indicated to be incorporated by reference.

### DETAILED DESCRIPTION OF THE INVENTION

[0022] It is to be understood that both the foregoing general description and the following detailed description are exemplary and explanatory only and are not restrictive of the disclosure.

[0023] The section headings used herein are for organizational purposes only and are not to be construed as limiting the subject matter described.

[0024] All documents, or portions of documents, cited in this application, including, but not limited to, patents, patent applications, articles, books, and treatises, are hereby expressly incorporated by reference in their entirety for any purpose.

### II. Definitions

[0025] Unless otherwise indicated, all technical terms used herein have the same meaning as commonly understood by one of ordinary skill in the art to which this invention belongs. Unless otherwise indicated or obvious from context, the following terms have the following meanings:

[0026] Herein, the use of the singular includes the plural unless specifically stated otherwise. As used herein, the use of “or” means “and/or” unless stated otherwise. Furthermore, the use of the term “including” as well as other forms, such as “includes” and “included”, is not limiting.

[0027] The term “effector protein” refers to a protein that is capable of modifying a nucleic acid molecule (e.g., by cleavage, deamination, recombination). Modifying the nucleic acid may modulate the expression of the nucleic acid molecule (e.g., increasing or decreasing the expression of a nucleic acid molecule). The effector protein may be a Cas protein (i.e., an effector protein of a CRISPR-Cas system). In some instances, an effector protein is a polypeptide that non-covalently binds to a guide nucleic acid to form a complex that contacts a target nucleic acid, wherein at least a portion of the guide nucleic acid hybridizes to a target sequence of the target nucleic acid. A complex between an effector protein and a guide nucleic acid can include multiple effector proteins or a single effector protein. In some instances, the effector protein modifies the target nucleic acid when the complex contacts the target nucleic acid. In some instances, the effector protein does not modify the target nucleic acid, but it is fused to a fusion partner protein that modifies the target nucleic acid when the complex contacts the target nucleic acid. A non-limiting example of an effector protein modifying a target nucleic acid is cleaving of a phosphodiester bond of the target nucleic acid. Additional examples of modifications an effector protein can make to target nucleic acids are described herein and throughout.

[0028] “Percent identity,” “% identity,” and % “identical” refers to the extent to which two sequences (nucleotide or amino acid) have the same residue at the same positions in an alignment. For example, “an amino acid sequence is X % identical to SEQ ID NO: Y” can refer to % identity of the amino acid sequence to SEQ ID NO: Y and is elaborated as X % of residues in the amino acid sequence are identical to the residues of sequence disclosed in SEQ ID NO: Y. Generally, computer programs can be employed for such calculations. Illustrative programs that compare and align pairs of sequences, include ALIGN (Myers and Miller, Comput Appl Biosci. 1988 March; 4(1):11-7), FASTA (Pearson and Lipman, Proc Natl Acad Sci USA. 1988 April; 85(8):2444-8; Pearson, Methods Enzymol. 1990; 183:63-98) and gapped BLAST (Altschul et al., Nucleic Acids Res. 1997 Sep. 1; 25(17):3389-40), BLASTP, BLASTN, or GCG (Devereux et al., Nucleic Acids Res. 1984 Jan. 11; 12(1 Pt 1):387-95).

[0029] As used in the specification and claims, the singular forms “a”, “an” and “the” include plural references unless the context clearly dictates otherwise. For example, the term “a sample” includes a plurality of samples, including mixtures thereof.

[0030] Unless specifically stated or obvious from context, as used herein, the term “about” in reference to a number or range of numbers is understood to mean the stated number and numbers +/−10% thereof, or 10% below the lower listed limit and 10% above the higher listed limit for the values listed for a range.

[0031] As used herein, the term “comprising” and its grammatical equivalents specifies the presence of stated features, integers, steps, operations, elements, and/or components, but do not preclude the presence or addition of one or more other features, integers, steps, operations, elements, components, and/or groups thereof. As used herein, the term “and/or” includes any and all combinations of one or more of the associated listed items.

[0032] The terms “determining,” “measuring,” “evaluating,” “assessing,” “assaying,” and “analyzing” are often used interchangeably herein to refer to forms of measurement. The terms include determining if an element is present or not (for example, detection). These terms can include quantitative, qualitative or quantitative and qualitative determinations. Assessing can be relative or absolute. “Detecting the presence of” can include determining the amount of something present in addition to determining whether it is present or absent depending on the context.

[0033] The terms “subject,” “individual,” or “patient” are often used interchangeably herein. A “subject” refers to an animal. The subject may be a mammal. The subject may be a human. The subject may be diagnosed or at high risk for a disease.

[0034] The term “in vivo” is used to describe an event that takes place in a subject's body.

[0035] The term “ex vivo” is used to describe an event that takes place outside of a subject's body. An ex vivo assay is not performed on a subject. Rather, it is performed upon a sample separate from a subject. An example of an ex vivo assay performed on a sample is an “in vitro” assay.

[0036] The term “in vitro” is used to describe an event that takes places contained in a container for holding laboratory reagent such that it is separated from the biological source from which the material is obtained. In vitro assays can encompass cell-based assays in which living or dead cells are employed. In vitro assays can also encompass a cell-free assay in which no intact cells are employed.

[0037] As used herein, the terms “treatment” or “treating” are used in reference to a pharmaceutical or other intervention regimen for obtaining beneficial or desired results in the recipient. Beneficial or desired results include but are not limited to a therapeutic benefit and/or a prophylactic benefit. A therapeutic benefit may refer to eradication or amelioration of symptoms or of an underlying disorder being treated. Also, a therapeutic benefit can be achieved with the eradication or amelioration of one or more of the physiological symptoms associated with the underlying disorder such that an improvement is observed in the subject, notwithstanding that the subject may still be afflicted with the underlying disorder. A prophylactic effect includes delaying, preventing, or eliminating the appearance of a disease or condition, delaying or eliminating the onset of symptoms of a disease or condition, slowing, halting, or reversing the progression of a disease or condition, or any combination thereof. For prophylactic benefit, a subject at risk of developing a particular disease, or to a subject reporting one or more of the physiological symptoms of a disease may undergo treatment, even though a diagnosis of this disease may not have been made.

### III. Introduction

[0038] Disclosed herein are compositions, systems and methods comprising:
[0039] a) at least one of a polypeptide and a nucleic acid encoding the polypeptide; and
[0040] b) at least one of a guide nucleic acid and a DNA molecule encoding the guide nucleic acid.

[0041] Polypeptides described herein may bind and, optionally, cleave nucleic acids in a sequence-specific manner. Effector proteins described herein may bind a target sequence of a target nucleic acid and cleave the target nucleic acid within the target sequence or at a position adjacent to the target sequence. In some embodiments, a polypeptide is activated when it binds a target sequence of a target nucleic acid to cleave a region of the target nucleic acid that is near, but not adjacent to the target sequence. A polypeptide may be an effector protein, such as a CRISPR-associated (Cas) protein, which may be coupled to a guide nucleic acid that imparts activity or sequence selectivity to the polypeptide. In general, guide nucleic acids comprise a first nucleotide sequence for interaction with an effector protein; and a second nucleotide sequence that hybridizes to a target nucleic acid. In some instances, the first sequence may be non-covalently bound by an effector protein or hybridize to an additional nucleic acid, wherein the additional nucleic acid is non-covalently bound by the effector protein. The first sequence may be referred to herein as a repeat sequence or handle sequence. The second sequence may be referred to herein as a spacer sequence. A guide nucleic acid may be referred to interchangeable as a guide RNA, however it is understood that guide nucleic acids may comprise DNA, RNA, or a combination thereof (e.g., RNA with a thymine base). In some instances, guide nucleic acids may include a chemically modified nucleobase or phosphate backbone. The handle sequence, as used herein, refers to a sequence that binds non-covalently with an effector protein. In some instances, the handle sequence comprises all or a portion of a repeat sequence. In general, a single guide nucleic acid, also referred to as a single guide RNA (sgRNA), comprises a handle sequence. In some aspects, a handle sequence includes a portion of a tracrRNA sequence that is capable of being non-covalently bound by an effector protein, but does not include all or a part of the portion of a tracrRNA that hybridizes to a portion of a crRNA as found in a dual nucleic acid system. In some aspects, a handle sequence can include a portion of a tracrRNA sequence as well as a portion of a repeat sequence, which can optionally be connected by a linker. In some aspects, a handle sequence in the context of a sgRNA can also be described as the portion of the sgRNA that does not hybridize to a target sequence in a target nucleic acid (e.g., a spacer sequence).

[0042] Effector proteins disclosed herein may cleave nucleic acids, including single stranded RNA (ssRNA), double stranded DNA (dsDNA), and single-stranded DNA (ssDNA). Effector proteins disclosed herein may provide cis cleavage activity, trans cleavage activity, nickase activity, or a combination thereof.

[0043] The compositions, systems and methods described herein are non-naturally occurring. In some instances, compositions, systems and methods comprise an engineered guide nucleic acid or a use thereof. In some instances, compositions, systems and methods comprise an engineered polypeptide or a use thereof. In general, compositions and systems described herein are not found in nature. In some embodiments, compositions, methods and systems described herein comprise at least one non-naturally occurring component. For example, disclosed compositions, methods and systems may comprise a guide nucleic acid, wherein the sequence of the guide nucleic acid is different or modified from that of a naturally-occurring guide nucleic acid. In some embodiments, compositions, systems and methods comprise at least two components that do not naturally occur together. For example, disclosed compositions, methods and systems may comprise a guide nucleic acid comprising a repeat region and a spacer region which do not naturally occur together. Also, by way of non-limiting example, disclosed compositions, methods and systems may comprise a guide nucleic acid and an effector protein that do not naturally occur together. Conversely, and for clarity, an effector protein or guide nucleic acid that is “natural,” “naturally-occurring,” or “found in nature” includes effector proteins and guide nucleic acids from cells or organisms that have not been genetically modified by a human or machine.

[0044] In some instances, the effector proteins are not found in nature. In some instances, the guide nucleic acids are not found in nature. In some instances, systems and compositions comprise at least one non-naturally occurring component. For example, compositions and systems may comprise a guide nucleic acid, wherein the sequence of the guide nucleic acid is different or modified from that of a naturally-occurring guide nucleic acid. In some instances, compositions and systems comprise at least two components that do not naturally occur together. For example, compositions and systems may comprise a guide nucleic acid comprising a repeat region and a spacer region which do not naturally occur together. Also, by way of example, composition and systems may comprise a guide nucleic acid and an effector protein that do not naturally occur together. Conversely, and for clarity, an effector protein or guide nucleic acid that is “natural,” “naturally-occurring,” or “found in nature” includes effector proteins and guide nucleic acids from cells or organisms that have not been genetically modified by a human or machine.

[0045] In some instances, the guide nucleic acid comprises a non-natural nucleobase sequence. In some instances, the non-natural sequence is a nucleobase sequence that is not found in nature. The non-natural sequence may comprise a portion of a naturally-occurring sequence, wherein the portion of the naturally-occurring sequence is not present in nature, absent the remainder of the naturally-occurring sequence. In some instances, the guide nucleic acid comprises two naturally-occurring sequences arranged in an order or proximity that is not observed in nature. In some instances, compositions and systems comprise a ribonucleotide complex comprising an effector protein and a guide nucleic acid that do not occur together in nature. Engineered guide nucleic acids may comprise a first sequence and a second sequence that do not occur naturally together. For example, an engineered guide nucleic acid may comprise a sequence of a naturally-occurring repeat region and a spacer region that is complementary to a naturally-occurring eukaryotic sequence. The engineered guide nucleic acid may comprise a sequence of a repeat region that occurs naturally in an organism and a spacer region that does not occur naturally in that organism. An engineered guide nucleic acid may comprise a first sequence that occurs in a first organism and a second sequence that occurs in a second organism, wherein the first organism and the second organism are different. The guide nucleic acid may comprise a third sequence located at a 3′ or 5′ end of the guide nucleic acid, or between the first and second sequences of the guide nucleic acid. For example, an engineered guide nucleic acid may comprise a naturally occurring CRISPR RNA (crRNA) and trans-activating crRNA (tracrRNA) coupled by a linker sequence.

[0046] In some instances, compositions and systems described herein comprise an effector protein that is similar to a naturally occurring effector protein. The effector protein may lack a portion of the naturally occurring effector protein. The effector protein may comprise at least one amino acid substitution, deletion, or insertion relative to a naturally-occurring effector protein. In some instances, effector proteins comprise at least one additional amino acid relative to a naturally-occurring effector protein. For example, the effector protein may comprise a nuclear localization signal relative to the natural occurring effector protein. In certain embodiments, the nucleobase sequence encoding the effector protein is codon optimized (e.g., for expression in a eukaryotic cell) relative to a naturally occurring nucleobase sequence.

### IV. Effector Proteins

[0047] Provided herein, are compositions, systems, and methods comprising an effector protein or a use thereof.

[0048] An effector protein may be brought into proximity of a target nucleic acid in the presence of a guide nucleic acid when the guide nucleic acid includes a nucleotide sequence that is complementary with a target sequence in the target nucleic acid. The ability of an effector protein to modify a target nucleic acid may be dependent upon the effector protein being bound to a guide nucleic acid and the guide nucleic acid being hybridized to a target nucleic acid. An effector protein may also recognize a protospacer adjacent motif (PAM) sequence present in the target nucleic acid, which may direct the modification activity of the effector protein. In general, effector proteins described herein modify a target nucleic acid via cis cleavage activity on the target nucleic acid. The modification of the target nucleic acid generated by an effector protein may, as a non-limiting example, result in modulation of the expression of the target nucleic acid (e.g., increasing or decreasing expression of the nucleic acid) or modulation of the activity of a translation product of the target nucleic acid (e.g., inactivation of a protein binding to an RNA molecule or hybridization).

[0049] An effector protein may be a CRISPR-associated (Cas) protein. An effector protein may function as a single protein, including a single protein that is capable of binding to a guide nucleic acid and modifying a target nucleic acid. Alternatively, an effector protein may function as part of a multiprotein complex, including, for example, a complex having two or more effector proteins, including two or more of the same effector proteins (e.g., dimer or multimer). An effector protein, when functioning in a multiprotein complex, may have only one functional activity (e.g., binding to a guide nucleic acid), while other effector proteins present in the multiprotein complex are capable of the other functional activity (e.g., modifying a target nucleic acid). An effector protein may be a modified effector protein having increased modification activity and/or increased substrate binding activity (e.g., substrate selectivity, specificity, and/or affinity). Alternatively, or in addition, an effector protein may be a catalytically inactive effector protein having reduced modification activity or no modification activity. Accordingly, an effector protein as used herein encompasses a modified polypeptide that does not have nuclease activity.

[0050] In certain embodiments, effector proteins described herein comprise one or more functional domains. Effector protein functional domains can include a protospacer adjacent motif (PAM)-interacting domain, an oligonucleotide-interacting domain, one or more recognition domains, a non-target strand interacting domain, and a RuvC domain. A PAM interacting domain can be a target strand PAM interacting domain (TPID) or a non-target strand PAM interacting domain (NTPID). In some embodiments, a PAM interacting domain, such as a TPID or a NTPID, on an effector protein describes a region of an effector protein that interacts with target nucleic acid. In some embodiments, the effector proteins comprise a RuvC domain. In some embodiments, a RuvC domain comprises with substrate binding activity, catalytic activity, or both. In some embodiments, the RuvC domain may be defined by a single, contiguous sequence, or a set of RuvC subdomains that are not contiguous with respect to the primary amino acid sequence of the protein. An effector protein of the present disclosure may include multiple RuvC subdomains, which may combine to generate a RuvC domain with substrate binding or catalytic activity. For example, an effector protein may include three RuvC subdomains (RuvC-I, RuvC-II, and RuvC-III) that are not contiguous with respect to the primary amino acid sequence of the effector protein, but form a RuvC domain once the protein is produced and folds. In some embodiments, effector proteins comprise one or more recognition domain (REC domain) with a binding affinity for a guide nucleic acid or for a guide nucleic acid-target nucleic acid heteroduplex. An effector protein may comprise a zinc finger domain. In some embodiments, the effector protein does not comprise an HNH domain.

[0051] An effector protein may be small, which may be beneficial for nucleic acid detection or editing (for example, the effector protein may be less likely to adsorb to a surface or another biological species due to its small size). The smaller nature of these effector proteins may allow for them to be more easily packaged and delivered with higher efficiency in the context of genome editing and more readily incorporated as a reagent in an assay.

[0052] Provided herein are compositions that comprise one or more effector proteins, as well as uses thereof. In some instances, the compositions are not naturally occurring. In some instances, the compositions comprises an engineered guide nucleic acid. In some instances, the nucleobase sequence of the engineered guide nucleic acid is not identical to the nucleobase sequence of a naturally occurring nucleic acid. In some instances, the nucleobase sequence of the engineered guide nucleic acid is less than 100%, less than 99%, less than 98%, less than 97%, less than 95%, less than 90%, less than 85%, less than 80%, or less than 75% identical to the nucleobase sequence of a naturally occurring nucleic acid

[0053] In some instances, effector proteins comprise an amino acid sequence selected from any one of SEQ ID NOS: 1-1614 and 3195-3302. In some instances, effector proteins consist essentially of an amino acid sequence selected from any one of SEQ ID NOS: 1-1614 and 3195-3302. In some instances, effector proteins consist of an amino acid sequence selected from any one of SEQ ID NOS: 1-1614 and 3195-3302. In some instances, effector proteins comprise an amino acid sequence that is at least 65%, identical to a sequence selected from any one of SEQ ID NOS: 1-1614 and 3195-3302. In some instances, effector proteins consist of an amino acid sequence that is at least 65% identical to a sequence selected from any one of SEQ ID NOS: 1-1614 and 3195-3302. In some instances, effector proteins comprise an amino acid sequence that is at least 70%, identical to a sequence selected from any one of SEQ ID NOS: 1-1614 and 3195-3302. In some instances, effector proteins consist of an amino acid sequence that is at least 70% identical to a sequence selected from any one of SEQ ID NOS: 1-1614 and 3195-3302. In some instances, effector proteins comprise an amino acid sequence that is at least 75%, identical to a sequence selected from any one of SEQ ID NOS: 1-1614 and 3195-3302. In some instances, effector proteins consist of an amino acid sequence that is at least 75% identical to a sequence selected from any one of SEQ ID NOS: 1-1614 and 3195-3302. In some instances, effector proteins comprise an amino acid sequence that is at least 80%, identical to a sequence selected from any one of SEQ ID NOS: 1-1614 and 3195-3302. In some instances, effector proteins consist of an amino acid sequence that is at least 80% identical to a sequence selected from any one of SEQ ID NOS: 1-1614 and 3195-3302. In some instances, effector proteins comprise an amino acid sequence that is at least 85%, identical to a sequence selected from any one of SEQ ID NOS: 1-1614 and 3195-3302. In some instances, effector proteins consist of an amino acid sequence that is at least 85% identical to a sequence selected from any one of SEQ ID NOS: 1-1614 and 3195-3302. In some instances, effector proteins comprise an amino acid sequence that is at least 90%, identical to a sequence selected from any one of SEQ ID NOS: 1-1614 and 3195-3302. In some instances, effector proteins consist of an amino acid sequence that is at least 90% identical to a sequence selected from any one of SEQ ID NOS: 1-1614 and 3195-3302. In some instances, effector proteins comprise an amino acid sequence that is at least 95%, identical to a sequence selected from any one of SEQ ID NOS: 1-1614 and 3195-3302. In some instances, effector proteins consist of an amino acid sequence that is at least 95% identical to a sequence selected from any one of SEQ ID NOS: 1-1614 and 3195-3302. In some instances, effector proteins comprise an amino acid sequence that is at least 97%, identical to a sequence selected from any one of SEQ ID NOS: 1-1614 and 3195-3302. In some instances, effector proteins consist of an amino acid sequence that is at least 97% identical to a sequence selected from any one of SEQ ID NOS: 1-1614 and 3195-3302. In some instances, effector proteins comprise an amino acid sequence that is at least 98%, identical to a sequence selected from any one of SEQ ID NOS: 1-1614 and 3195-3302. In some instances, effector proteins consist of an amino acid sequence that is at least 98% identical to a sequence selected from any one of SEQ ID NOS: 1-1614 and 3195-3302. In some instances, effector proteins comprise an amino acid sequence that is at least 99%, identical to a sequence selected from any one of SEQ ID NOS: 1-1614 and 3195-3302. In some instances, effector proteins consist of an amino acid sequence that is at least 99% identical to a sequence selected from any one of SEQ ID NOS: 1-1614 and 3195-3302. In some instances, effector proteins comprise an amino acid sequence that is 100%, identical to a sequence selected from any one of SEQ ID NOS: 1-1614 and 3195-3302. In some instances, effector proteins consist of an amino acid sequence that is 100% identical to a sequence selected from any one of SEQ ID NOS: 1-1614 and 3195-3302.

[0054] In some instances, effector proteins comprise at least about 100, at least about 120, at least about 140, at least about 160, at least about 180, at least about 200, at least about 220, at least about 240, at least about 260, at least about 280, at least about 300, at least about 320, at least about 340, at least about 360, at least about 380, at least about 400, at least about 420, at least about 440, at least about 460, at least about 480, at least about 500, at least about 520, at least about 540, at least about 560, at least about 580, at least about 600, at least about 620, at least about 640, at least about 660, at least about 680, at least about 700, at least about 720, at least about 740, at least about 760, at least about 780, at least about 800, at least about 820, at least about 840, at least about 860, at least about 880, at least about 900, at least about 920, at least about 940, at least about 960, at least about 980, at least about 1000, at least about 1020, at least about 1040, at least about 1060, at least about 1080, at least about 1100, at least about 1120, at least about 1140, at least about 1160, at least about 1180, or at least about 1200 contiguous amino acids of a sequence selected from any one of SEQ ID NOS: 1-1614 and 3195-3302. In some instances, effector proteins comprise less than about 1900, less than about 1850, less than about 1800, less than about 1750, less than about 1700, or less than about 1650 contiguous amino acids of a sequence selected from any one of SEQ ID NOS: 1-1614 and 3195-3302.

[0055] In some instances, effector proteins comprise about 100, about 120, about 140, about 160, about 180, about 200, about 220, about 240, about 260, about 280, about 300, about 320, about 340, about 360, about 380, about 400, about 420, about 440, about 460, about 480, about 500, about 520, about 540, about 560, about 580, about 600, about 620, about 640, about 660, about 680, about 700, about 720, about 740, about 760, about 780, about 800, about 820, about 840, about 860, about 880, about 900, about 920, about 940, about 960, about 980, about 1000, about 1020, about 1040, about 1060, about 1080, about 1100, about 1120, about 1140, about 1160, about 1180, about 1200, about 1220, about 1240, about 1260, about 1280, about 1300, about 1320, about 1340, about 1360, about 1380, or about 1400 contiguous amino acids of a sequence selected from any one of SEQ ID NOS: 1-1614 and 3195-3302.

[0056] In some instances, compositions comprise an engineered guide nucleic acid (also referred to simply as a guide nucleic acid), wherein the guide nucleic acid comprises a nucleobase sequence selected from any one of SEQ ID NOS: 1615-3194 and 3303-3406. In some instances, guide nucleic acids comprise a sequence that is complementary to a nucleobase sequence selected from any one of SEQ ID NOS: 1615-3194 and 3303-3406. In some instances, guide nucleic acids comprise a sequence that is reverse complementary to a nucleobase sequence selected from any one of SEQ ID NOS: 1615-3194 and 3303-3406. In some instances, guide nucleic acids comprise a sequence that is at least 65% identical to a nucleobase sequence selected from any one of SEQ ID NOS: 1615-3194 and 3303-3406, the complement thereof, or the reverse complement thereof. In some instances, guide nucleic acids comprise a sequence that is at least 70% identical to a nucleobase sequence selected from any one of SEQ ID NOS: 1615-3194 and 3303-3406, the complement thereof, or the reverse complement thereof. In some instances, guide nucleic acids comprise a sequence that is at least 75% identical to a nucleobase sequence selected from any one of SEQ ID NOS: 1615-3194 and 3303-3406, the complement thereof, or the reverse complement thereof. In some instances, guide nucleic acids comprise a sequence that is at least 80% identical to a nucleobase sequence selected from any one of SEQ ID NOS: 1615-3194 and 3303-3406, the complement thereof, or the reverse complement thereof. In some instances, guide nucleic acids comprise a sequence that is at least 85% identical to a nucleobase sequence selected from any one of SEQ ID NOS: 1615-3194 and 3303-3406, the complement thereof, or the reverse complement thereof. In some instances, guide nucleic acids comprise a sequence that is at least 90% identical to a nucleobase sequence selected from any one of SEQ ID NOS: 1615-3194 and 3303-3406, the complement thereof, or the reverse complement thereof. In some instances, guide nucleic acids comprise a sequence that is 100% identical to a nucleobase sequence selected from any one of SEQ ID NOS: 1615-3194 and 3303-3406, the complement thereof, or the reverse complement thereof.

[0057] In some instances, guide nucleic acids comprise at least 10, at least 11, at least 12, at least 13, at least 14, at least 15, at least 16, at least 17, at least 18, at least 19, at least 20, at least 21, at least 22, at least 23, at least 24, at least 25, at least 26, at least 27, at least 28, at least 29, at least 30, at least 31, at least 32, at least 33, at least 34, at least 35, at least 36, at least 37, at least 38, at least 39 or at least 40 contiguous nucleotides of a nucleobase sequence selected from any one of SEQ ID NOS: 1615-3194 and 3303-3406, the complement thereof, or the reverse complement thereof. In some instances, guide nucleic acids contain less than 32, less than 34, less than 36, less than 37, less than 38, less than 39, less than 40, less than 41, less than 42, less than 43, less than 44, or less than 45 contiguous nucleotides of any one of the nucleobase sequences selected from any one of SEQ ID NOS: 1615-3194 and 3303-3406, the complement thereof, or the reverse complement thereof. In some instances, guide nucleic acids comprise 10, 11, 12, 13, 14, 15, 16, 17, 18, 19, 20, 21, 22, 23, 24, 25, 26, 27, 28, 29, 30, 31, 32, 33, 34, 35, 36, 37, 38, 39 or 40 contiguous nucleotides of any one of the nucleobase sequences selected from any one of SEQ ID NOS: 1615-3194 and 3303-3406, the complement thereof, or the reverse complement thereof.

[0058] In some instances, compositions comprise an effector protein or a fusion protein thereof, and a guide nucleic acid, wherein the amino acid sequence of the effector protein is at least 50%, at least 55%, at least 60%, at least 65%, at least 70%, at least 75%, at least 80%, at least 85%, at least 90%, at least 95%, at least 97%, at least 98%, at least 99% or 100% identical to a sequence selected from Column A1 of TABLE 1, and wherein at least a portion of the guide nucleic acid comprises a nucleobase sequence that is at least 50%, at least 55%, at least 60%, at least 65%, at least 70%, at least 75%, at least 80%, at least 85%, at least 90%, at least 95%, or 100% identical or at least 50%, at least 55%, at least 60%, at least 65%, at least 70%, at least 75%, at least 80%, at least 85%, at least 90%, at least 95%, or 100% reverse complementary to a sequence selected from Column B1 of TABLE 1, wherein the sequence from Column A1 and the sequence from Column B1 are in the same row of TABLE 1.

[0059] In some instances, compositions comprise an effector protein or a fusion protein thereof, and a guide nucleic acid, wherein the amino acid sequence of the effector protein is at least 50%, at least 55%, at least 60%, at least 65%, at least 70%, at least 75%, at least 80%, at least 85%, at least 90%, at least 95%, at least 97%, at least 98%, at least 99% or 100% identical to a sequence selected from Column A2 of TABLE 1, and wherein at least a portion of the guide nucleic acid comprises a nucleobase sequence that is at least 50%, at least 55%, at least 60%, at least 65%, at least 70%, at least 75%, at least 80%, at least 85%, at least 90%, at least 95%, or 100% identical or at least 50%, at least 55%, at least 60%, at least 65%, at least 70%, at least 75%, at least 80%, at least 85%, at least 90%, at least 95%, or 100% reverse complementary to a sequence selected from Column B2 of TABLE 1, wherein the sequence from Column A2 and the sequence from Column B2 are in the same row of TABLE 1.

[0060] In some instances, compositions comprise an effector protein or a fusion protein thereof, and a guide nucleic acid, wherein the amino acid sequence of the effector protein is at least 50%, at least 55%, at least 60%, at least 65%, at least 70%, at least 75%, at least 80%, at least 85%, at least 90%, at least 95%, at least 97%, at least 98%, at least 99% or 100% identical to a sequence selected from Column A3 of TABLE 1, and wherein at least a portion of the guide nucleic acid comprises a nucleobase sequence that is at least 50%, at least 55%, at least 60%, at least 65%, at least 70%, at least 75%, at least 80%, at least 85%, at least 90%, at least 95%, or 100% identical or at least 50%, at least 55%, at least 60%, at least 65%, at least 70%, at least 75%, at least 80%, at least 85%, at least 90%, at least 95%, or 100% reverse complementary to a sequence selected from Column B3 of TABLE 1, wherein the sequence from Column A3 and the sequence from Column B3 are in the same row of TABLE 1.

[0061] In some instances, compositions comprise an effector protein or a fusion protein thereof, and a guide nucleic acid, wherein the amino acid sequence of the effector protein is at least 50%, at least 55%, at least 60%, at least 65%, at least 70%, at least 75%, at least 80%, at least 85%, at least 90%, at least 95%, at least 97%, at least 98%, at least 99% or 100% identical to a sequence selected from Column C1 of TABLE 2, and wherein at least a portion of the guide nucleic acid comprises a nucleobase sequence that is at least 50%, at least 55%, at least 60%, at least 65%, at least 70%, at least 75%, at least 80%, at least 85%, at least 90%, at least 95%, or 100% identical or at least 50%, at least 55%, at least 60%, at least 65%, at least 70%, at least 75%, at least 80%, at least 85%, at least 90%, at least 95%, or 100% reverse complementary to a sequence selected from Column D1 of TABLE 2, wherein the sequence from Column C1 and the sequence from Column D1 are in the same row of TABLE 2.

[0062] In some instances, compositions comprise an effector protein or a fusion protein thereof, and a guide nucleic acid, wherein the amino acid sequence of the effector protein is at least 50%, at least 55%, at least 60%, at least 65%, at least 70%, at least 75%, at least 80%, at least 85%, at least 90%, at least 95%, at least 97%, at least 98%, at least 99% or 100% identical to a sequence selected from Column C2 of TABLE 2, and wherein at least a portion of the guide nucleic acid comprises a nucleobase sequence that is at least 50%, at least 55%, at least 60%, at least 65%, at least 70%, at least 75%, at least 80%, at least 85%, at least 90%, at least 95%, or 100% identical or at least 50%, at least 55%, at least 60%, at least 65%, at least 70%, at least 75%, at least 80%, at least 85%, at least 90%, at least 95%, or 100% reverse complementary to a sequence selected from Column D2 of TABLE 2, wherein the sequence from Column C2 and the sequence from Column D2 are in the same row of TABLE 2.

[0063] In some instances, compositions comprise an effector protein or a fusion protein thereof, and a guide nucleic acid, wherein the amino acid sequence of the effector protein is at least about 50% identical to a sequence selected from Column A1 of TABLE 1, and wherein at least a portion of the guide nucleic acid comprises a nucleobase sequence that is at least about 50% identical or at least about 50% reverse complementary to a sequence selected from Column B1 of TABLE 1, wherein the sequence from Column A1 and the sequence from Column B1 are in the same row of TABLE 1.

[0064] In some instances, compositions comprise an effector protein or a fusion protein thereof, and a guide nucleic acid, wherein the amino acid sequence of the effector protein is at least about 60% identical to a sequence selected from Column A1 of TABLE 1, and wherein at least a portion of the guide nucleic acid comprises a nucleobase sequence that is at least about 60% identical or at least about 60% reverse complementary to a sequence selected from Column B1 of TABLE 1, wherein the sequence from Column A1 and the sequence from Column B1 are in the same row of TABLE 1.

[0065] In some instances, compositions comprise an effector protein or a fusion protein thereof, and a guide nucleic acid, wherein the amino acid sequence of the effector protein is at least about 70% identical to a sequence selected from Column A1 of TABLE 1, and wherein at least a portion of the guide nucleic acid comprises a nucleobase sequence that is at least about 70% identical or at least about 70% reverse complementary to a sequence selected from Column B1 of TABLE 1, wherein the sequence from Column A1 and the sequence from Column B1 are in the same row of TABLE 1.

[0066] In some instances, compositions comprise an effector protein or a fusion protein thereof, and a guide nucleic acid, wherein the amino acid sequence of the effector protein is at least about 80% identical to a sequence selected from Column A1 of TABLE 1, and wherein at least a portion of the guide nucleic acid comprises a nucleobase sequence that is at least about or 80% identical or at least about 80% reverse complementary to a sequence selected from Column B1 of TABLE 1, wherein the sequence from Column A2 and the sequence from Column B2 are in the same row of TABLE 1.

[0067] In some instances, compositions comprise an effector protein or a fusion protein thereof, and a guide nucleic acid, wherein the amino acid sequence of the effector protein is at least about 90% identical to a sequence selected from Column A1 of TABLE 1, and wherein at least a portion of the guide nucleic acid comprises a nucleobase sequence that is at least about 90% identical or at least about 90% reverse complementary to a sequence selected from Column B1 of TABLE 1, wherein the sequence from Column A1 and the sequence from Column B1 are in the same row of TABLE 1.

[0068] In some instances, compositions comprise an effector protein or a fusion protein thereof, and a guide nucleic acid, wherein the amino acid sequence of the effector protein is at least about 95% identical to a sequence selected from Column A1 of TABLE 1, and wherein at least a portion of the guide nucleic acid comprises a nucleobase sequence that is at least about 95% identical or at least 95% reverse complementary to a sequence selected from Column B1 of TABLE 1, wherein the sequence from Column A1 and the sequence from Column B1 are in the same row of TABLE 1.

[0069] In some instances, compositions comprise an effector protein or a fusion protein thereof, and a guide nucleic acid, wherein the amino acid sequence of the effector protein is 100% identical to a sequence selected from Column A1 of TABLE 1, and wherein at least a portion of the guide nucleic acid comprises a nucleobase sequence that is 100% identical or 100% reverse complementary to a sequence selected from Column B1 of TABLE 1, wherein the sequence from Column A1 and the sequence from Column B1 are in the same row of TABLE 1.

[0070] In some instances, compositions comprise an effector protein or a fusion protein thereof, and a guide nucleic acid, wherein the amino acid sequence of the effector protein is at least about 50% identical to a sequence selected from Column A2 of TABLE 1, and wherein at least a portion of the guide nucleic acid comprises a nucleobase sequence that is at least about 50% identical or at least about 50% reverse complementary to a sequence selected from Column B2 of TABLE 1, wherein the sequence from Column A2 and the sequence from Column B2 are in the same row of TABLE 1.

[0071] In some instances, compositions comprise an effector protein or a fusion protein thereof, and a guide nucleic acid, wherein the amino acid sequence of the effector protein is at least about 60% identical to a sequence selected from Column A2 of TABLE 1, and wherein at least a portion of the guide nucleic acid comprises a nucleobase sequence that is at least about 60% identical or at least about 60% reverse complementary to a sequence selected from Column B2 of TABLE 1, wherein the sequence from Column A2 and the sequence from Column B2 are in the same row of TABLE 1.

[0072] In some instances, compositions comprise an effector protein or a fusion protein thereof, and a guide nucleic acid, wherein the amino acid sequence of the effector protein is at least about 70% identical to a sequence selected from Column A2 of TABLE 1, and wherein at least a portion of the guide nucleic acid comprises a nucleobase sequence that is at least about 70% identical or at least about 70% reverse complementary to a sequence selected from Column B2 of TABLE 1, wherein the sequence from Column A2 and the sequence from Column B2 are in the same row of TABLE 1.

[0073] In some instances, compositions comprise an effector protein or a fusion protein thereof, and a guide nucleic acid, wherein the amino acid sequence of the effector protein is at least about 80% identical to a sequence selected from Column A2 of TABLE 1, and wherein at least a portion of the guide nucleic acid comprises a nucleobase sequence that is at least about 80% identical or at least about 80% reverse complementary to a sequence selected from Column B2 of TABLE 1, wherein the sequence from Column A2 and the sequence from Column B2 are in the same row of TABLE 1.

[0074] In some instances, compositions comprise an effector protein or a fusion protein thereof, and a guide nucleic acid, wherein the amino acid sequence of the effector protein is at least about 90% identical to a sequence selected from Column A2 of TABLE 1, and wherein at least a portion of the guide nucleic acid comprises a nucleobase sequence that is at least about 90% identical or at least about 90% reverse complementary to a sequence selected from Column B2 of TABLE 1, wherein the sequence from Column A2 and the sequence from Column B2 are in the same row of TABLE 1.

[0075] In some instances, compositions comprise an effector protein or a fusion protein thereof, and a guide nucleic acid, wherein the amino acid sequence of the effector protein is at least about 95% identical to a sequence selected from Column A2 of TABLE 1, and wherein at least a portion of the guide nucleic acid comprises a nucleobase sequence that is at least about 95% identical or at least about 95% reverse complementary to a sequence selected from Column B2 of TABLE 1, wherein the sequence from Column A2 and the sequence from Column B2 are in the same row of TABLE 1.

[0076] In some instances, compositions comprise an effector protein or a fusion protein thereof, and a guide nucleic acid, wherein the amino acid sequence of the effector protein is 100% identical to a sequence selected from Column A2 of TABLE 1, and wherein at least a portion of the guide nucleic acid comprises a nucleobase sequence that is 100% identical or 100% reverse complementary to a sequence selected from Column B2 of TABLE 1, wherein the sequence from Column A2 and the sequence from Column B2 are in the same row of TABLE 1.

[0077] In some instances, compositions comprise an effector protein or a fusion protein thereof, and a guide nucleic acid, wherein the amino acid sequence of the effector protein is at least about 50% identical to a sequence selected from Column A3 of TABLE 1, and wherein at least a portion of the guide nucleic acid comprises a nucleobase sequence that is at least about 50% identical or at least about 50% reverse complementary to a sequence selected from Column B3 of TABLE 1, wherein the sequence from Column A3 and the sequence from Column B3 are in the same row of TABLE 1.

[0078] In some instances, compositions comprise an effector protein or a fusion protein thereof, and a guide nucleic acid, wherein the amino acid sequence of the effector protein is at least about 60% identical to a sequence selected from Column A3 of TABLE 1, and wherein at least a portion of the guide nucleic acid comprises a nucleobase sequence that is at least about 60% identical or at least about 60% reverse complementary to a sequence selected from Column B3 of TABLE 1, wherein the sequence from Column A3 and the sequence from Column B3 are in the same row of TABLE 1.

[0079] In some instances, compositions comprise an effector protein or a fusion protein thereof, and a guide nucleic acid, wherein the amino acid sequence of the effector protein is at least about 70% identical to a sequence selected from Column A3 of TABLE 1, and wherein at least a portion of the guide nucleic acid comprises a nucleobase sequence that is at least about 70% identical or at least about 70% reverse complementary to a sequence selected from Column B3 of TABLE 1, wherein the sequence from Column A3 and the sequence from Column B3 are in the same row of TABLE 1.

[0080] In some instances, compositions comprise an effector protein or a fusion protein thereof, and a guide nucleic acid, wherein the amino acid sequence of the effector protein is at least about 80% identical to a sequence selected from Column A3 of TABLE 1, and wherein at least a portion of the guide nucleic acid comprises a nucleobase sequence that is at least about 80% identical or at least about 80% reverse complementary to a sequence selected from Column B3 of TABLE 1, wherein the sequence from Column A3 and the sequence from Column B3 are in the same row of TABLE 1.

[0081] In some instances, compositions comprise an effector protein or a fusion protein thereof, and a guide nucleic acid, wherein the amino acid sequence of the effector protein is at least about 90% identical to a sequence selected from Column A3 of TABLE 1, and wherein at least a portion of the guide nucleic acid comprises a nucleobase sequence that is at least about 90% identical or at least about 90% reverse complementary to a sequence selected from Column B3 of TABLE 1, wherein the sequence from Column A3 and the sequence from Column B3 are in the same row of TABLE 1.

[0082] In some instances, compositions comprise an effector protein or a fusion protein thereof, and a guide nucleic acid, wherein the amino acid sequence of the effector protein is at least about 95% identical to a sequence selected from Column A3 of TABLE 1, and wherein at least a portion of the guide nucleic acid comprises a nucleobase sequence that is at least about 95% identical or at least about 95% reverse complementary to a sequence selected from Column B3 of TABLE 1, wherein the sequence from Column A3 and the sequence from Column B3 are in the same row of TABLE 1.

[0083] In some instances, compositions comprise an effector protein or a fusion protein thereof, and a guide nucleic acid, wherein the amino acid sequence of the effector protein is 100% identical to a sequence selected from Column A3 of TABLE 1, and wherein at least a portion of the guide nucleic acid comprises a nucleobase sequence that is 100% identical or 100% reverse complementary to a sequence selected from Column B3 of TABLE 1, wherein the sequence from Column A3 and the sequence from Column B3 are in the same row of TABLE 1.

[0084] In some instances, compositions comprise an effector protein or a fusion protein thereof, and a guide nucleic acid, wherein the amino acid sequence of the effector protein is at least about 50% identical to a sequence selected from Column C1 of TABLE 2, and wherein at least a portion of the guide nucleic acid comprises a nucleobase sequence that is at least about 50% identical or at least about 50% reverse complementary to a sequence selected from Column D1 of TABLE 2, wherein the sequence from Column C1 and the sequence from Column D1 are in the same row of TABLE 2.

[0085] In some instances, compositions comprise an effector protein or a fusion protein thereof, and a guide nucleic acid, wherein the amino acid sequence of the effector protein is at least about 60% identical to a sequence selected from Column C1 of TABLE 2, and wherein at least a portion of the guide nucleic acid comprises a nucleobase sequence that is at least about 60% identical or at least about 60% reverse complementary to a sequence selected from Column D1 of TABLE 2, wherein the sequence from Column C1 and the sequence from Column D1 are in the same row of TABLE 2.

[0086] In some instances, compositions comprise an effector protein or a fusion protein thereof, and a guide nucleic acid, wherein the amino acid sequence of the effector protein is at least about 70% identical to a sequence selected from Column C1 of TABLE 2, and wherein at least a portion of the guide nucleic acid comprises a nucleobase sequence that is at least about 70% identical or at least about 70% reverse complementary to a sequence selected from Column D1 of TABLE 2, wherein the sequence from Column C1 and the sequence from Column D1 are in the same row of TABLE 2.

[0087] In some instances, compositions comprise an effector protein or a fusion protein thereof, and a guide nucleic acid, wherein the amino acid sequence of the effector protein is at least about 80% identical to a sequence selected from Column C1 of TABLE 2, and wherein at least a portion of the guide nucleic acid comprises a nucleobase sequence that is at least about 80% identical or at least about 80% reverse complementary to a sequence selected from Column D1 of TABLE 2, wherein the sequence from Column C1 and the sequence from Column D1 are in the same row of TABLE 2.

[0088] In some instances, compositions comprise an effector protein or a fusion protein thereof, and a guide nucleic acid, wherein the amino acid sequence of the effector protein is at least about 90% identical to a sequence selected from Column C1 of TABLE 2, and wherein at least a portion of the guide nucleic acid comprises a nucleobase sequence that is at least about 90% identical or at least about 90% reverse complementary to a sequence selected from Column D1 of TABLE 2, wherein the sequence from Column C1 and the sequence from Column D1 are in the same row of TABLE 2.

[0089] In some instances, compositions comprise an effector protein or a fusion protein thereof, and a guide nucleic acid, wherein the amino acid sequence of the effector protein is at least about 95% identical to a sequence selected from Column C1 of TABLE 2, and wherein at least a portion of the guide nucleic acid comprises a nucleobase sequence that is at least about 95% identical or at least about 95% reverse complementary to a sequence selected from Column D1 of TABLE 2, wherein the sequence from Column C1 and the sequence from Column D1 are in the same row of TABLE 2.

[0090] In some instances, compositions comprise an effector protein or a fusion protein thereof, and a guide nucleic acid, wherein the amino acid sequence of the effector protein is 100% identical to a sequence selected from Column C1 of TABLE 2, and wherein at least a portion of the guide nucleic acid comprises a nucleobase sequence that is 100% identical or 100% reverse complementary to a sequence selected from Column D1 of TABLE 2, wherein the sequence from Column C1 and the sequence from Column D1 are in the same row of TABLE 2.

[0091] In some instances, compositions comprise an effector protein or a fusion protein thereof, and a guide nucleic acid, wherein the amino acid sequence of the effector protein is at least about 50% identical to a sequence selected from Column C2 of TABLE 2, and wherein at least a portion of the guide nucleic acid comprises a nucleobase sequence that is at least about 50% identical or at least about 50% reverse complementary to a sequence selected from Column D2 of TABLE 2, wherein the sequence from Column C2 and the sequence from Column D2 are in the same row of TABLE 2.

[0092] In some instances, compositions comprise an effector protein or a fusion protein thereof, and a guide nucleic acid, wherein the amino acid sequence of the effector protein is at least about 60% identical to a sequence selected from Column C2 of TABLE 2, and wherein at least a portion of the guide nucleic acid comprises a nucleobase sequence that is at least about 60% identical or at least about 60% reverse complementary to a sequence selected from Column D2 of TABLE 2, wherein the sequence from Column C2 and the sequence from Column D2 are in the same row of TABLE 2.

[0093] In some instances, compositions comprise an effector protein or a fusion protein thereof, and a guide nucleic acid, wherein the amino acid sequence of the effector protein is at least about 70% identical to a sequence selected from Column C2 of TABLE 2, and wherein at least a portion of the guide nucleic acid comprises a nucleobase sequence that is at least about 70% identical or at least about 70% reverse complementary to a sequence selected from Column D2 of TABLE 2, wherein the sequence from Column C2 and the sequence from Column D2 are in the same row of TABLE 2.

[0094] In some instances, compositions comprise an effector protein or a fusion protein thereof, and a guide nucleic acid, wherein the amino acid sequence of the effector protein is at least about 80% identical to a sequence selected from Column C2 of TABLE 2, and wherein at least a portion of the guide nucleic acid comprises a nucleobase sequence that is at least about 80% identical or at least about 80% reverse complementary to a sequence selected from Column D2 of TABLE 2, wherein the sequence from Column C2 and the sequence from Column D2 are in the same row of TABLE 2.

[0095] In some instances, compositions comprise an effector protein or a fusion protein thereof, and a guide nucleic acid, wherein the amino acid sequence of the effector protein is at least about 90% identical to a sequence selected from Column C2 of TABLE 2, and wherein at least a portion of the guide nucleic acid comprises a nucleobase sequence that is at least about 90% identical or at least about 90% reverse complementary to a sequence selected from Column D2 of TABLE 2, wherein the sequence from Column C2 and the sequence from Column D2 are in the same row of TABLE 2.

[0096] In some instances, compositions comprise an effector protein or a fusion protein thereof, and a guide nucleic acid, wherein the amino acid sequence of the effector protein is at least about 95% identical to a sequence selected from Column C2 of TABLE 2, and wherein at least a portion of the guide nucleic acid comprises a nucleobase sequence that is at least about 95% identical or at least about 95% reverse complementary to a sequence selected from Column D2 of TABLE 2, wherein the sequence from Column C2 and the sequence from Column D2 are in the same row of TABLE 2.

[0097] In some instances, compositions comprise an effector protein or a fusion protein thereof, and a guide nucleic acid, wherein the amino acid sequence of the effector protein is 100% identical to a sequence selected from Column C2 of TABLE 2, and wherein at least a portion of the guide nucleic acid comprises a nucleobase sequence that is 100% identical or 100% reverse complementary to a sequence selected from Column D2 of TABLE 2, wherein the sequence from Column C2 and the sequence from Column D2 are in the same row of TABLE 2.

[0098] In some embodiments, the effector protein comprises between 1-50 conservative substitutions relative to effector protein SEQ ID NOS: 1-1614 and 3195-3302. In some embodiments the effector protein comprises between 5-40 conservative substitutions relative to effector protein SEQ ID NOS: 1-1614 and 3195-3302. In some embodiments the effector protein comprises between 10-30 conservative substitutions relative to effector protein SEQ ID NOS: 1-1614 and 3195-3302. In some embodiments the effector protein comprises between 20-35 conservative substitutions relative to effector protein SEQ ID NOS: 1-1614 and 3195-3302. In general, conservative substitution refers to the replacement of one amino acid for another such that the replacement takes place within a family of amino acids that are related in their side chains. Genetically encoded amino acids can be divided into four families having related side chains: (1) acidic (negatively charged): Asp (D), Glu (G); (2) basic (positively charged): Lys (K), Arg (R), His (H); (3) non-polar (hydrophobic): Cys (C), Ala (A), Val (V), Leu (L), Ile (I), Pro (P), Phe (F), Met (M), Trp (W), Gly (G), Tyr (Y), with non-polar also being subdivided into: (i) strongly hydrophobic: Ala (A), Val (V), Leu (L), Ile (I), Met (M), Phe (F); and (ii) moderately hydrophobic: Gly (G), Pro (P), Cys (C), Tyr (Y), Trp (W); and (4) uncharged polar: Asn (N), Gln (Q), Ser (S), Thr (T). Amino acids may be related by aliphatic side chains: Gly (G), Ala (A), Val (V), Leu (L), Ile (I), Ser (S), Thr (T), with Ser (S) and Thr (T) optionally being grouped separately as aliphatic-hydroxyl; Amino acids may be related by aromatic side chains: Phe (F), Tyr (Y), Trp (W). Amino acids may be related by amide side chains: Asn (N), Glu (Q). Amino acids may be related by sulfur-containing side chains: Cys (C) and Met (M).

[0099] In some embodiments the effector protein comprises one conservative substitution relative to effector protein SEQ ID NOS: 1-1614 and 3195-3302. In some embodiments the effector protein comprises two conservative substitutions relative to effector protein SEQ ID NOS: 1-1614 and 3195-3302. In some embodiments the effector protein comprises three conservative substitutions relative to effector protein SEQ ID NOS: 1-1614 and 3195-3302. In some embodiments the effector protein comprises four conservative substitutions relative to effector protein SEQ ID NOS: 1-1614 and 3195-3302. In some embodiments the effector protein comprises five conservative substitutions relative to effector protein SEQ ID NOS: 1-1614 and 3195-3302. In some embodiments the effector protein comprises six conservative substitutions relative to effector protein SEQ ID NOS: 1-1614 and 3195-3302. In some embodiments the effector protein comprises seven conservative substitutions relative to effector protein SEQ ID NOS: 1-1614 and 3195-3302. In some embodiments the effector protein comprises eight conservative substitutions relative to effector protein SEQ ID NOS: 1-1614 and 3195-3302. In some embodiments the effector protein comprises nine conservative substitutions relative to effector protein SEQ ID NOS: 1-1614 and 3195-3302. In some embodiments the effector protein comprises ten conservative substitutions relative to effector protein SEQ ID NOS: 1-1614 and 3195-3302.

[0100] In some instances, the portion of the guide nucleic acid is the repeat region of the guide nucleic acid. In some instances, the portion of the guide nucleic acid binds the effector protein.

TABLE 1
Exemplary Effector Proteins and Guide Sequences

| A1 | B1 | A2 | B2 | A3 | B3 |
|---|---|---|---|---|---|
| SEQ | SEQ | SEQ | SEQ | SEQ | SEQ |
| ID NO: | ID NO: | ID NO: | ID NO: | ID NO: | ID NO: |
| 1 | 1615 | 539 | 2135 | 1077 | 2665 |
| 2 | 1616 | 540 | 2136 | 1078 | 2666 |
| 3 | 1617 | 541 | 2137 | 1079 | 2667 |
| 4 | 1618 | 542 | 2138 | 1080 | 2668 |
| 5 | 1619 | 543 | 2139 | 1081 | 2669 |
| 6 | 1620 | 544 | 2140 | 1082 | 2670 |
| 7 | 1621 | 545 | 2141 | 1083 | 2671 |
| 8 | 1622 | 546 | 2142 | 1084 | 2672 |
| 9 | 1623 | 547 | N/A | 1085 | 2673 |
| 10 | 1624 | 548 | 2143 | 1086 | 2674 |
| 11 | 1625 | 549 | 2144 | 1087 | 2675 |
| 12 | 1626 | 550 | 2145 | 1088 | 2676 |
| 13 | 1627 | 551 | 2146 | 1089 | 2677 |
| 14 | 1628 | 552 | 2147 | 1090 | 2678 |
| 15 | 1629 | 553 | 2148 | 1091 | 2679 |
| 16 | 1630 | 554 | 2149 | 1092 | 2680 |
| 17 | 1631 | 555 | 2150 | 1093 | 2681 |
| 18 | 1632 | 556 | 2151 | 1094 | 2682 |
| 19 | 1633 | 557 | 2152 | 1095 | 2683 |
| 20 | 1634 | 558 | 2153 | 1096 | 2684 |
| 21 | 1635 | 559 | 2154 | 1097 | 2685 |
| 22 | 1636 | 560 | 2155 | 1098 | 2686 |
| 23 | 1637 | 561 | 2156 | 1099 | 2687 |
| 24 | 1638 | 562 | 2157 | 1100 | 2688 |
| 25 | 1639 | 563 | 2158 | 1101 | 2689 |
| 26 | 1640 | 564 | 2159 | 1102 | 2690 |
| 27 | 1641 | 565 | 2160 | 1103 | 2691 |
| 28 | 1642 | 566 | 2161 | 1104 | 2692 |
| 29 | 1643 | 567 | 2162 | 1105 | 2693 |
| 30 | 1644 | 568 | 2163 | 1106 | 2694 |
| 31 | 1645 | 569 | 2164 | 1107 | 2695 |
| 32 | 1646 | 570 | 2165 | 1108 | 2696 |
| 33 | 1647 | 571 | 2166 | 1109 | 2697 |
| 34 | 1648 | 572 | 2167 | 1110 | 2698 |
| 35 | 1649 | 573 | 2168 | 1111 | 2699 |
| 36 | 1650 | 574 | 2169 | 1112 | 2700 |
| 37 | 1651 | 575 | 2170 | 1113 | 2701 |
| 38 | 1652 | 576 | 2171 | 1114 | 2702 |
| 39 | 1653 | 577 | 2172 | 1115 | 2703 |
| 40 | 1654 | 578 | 2173 | 1116 | 2704 |
| 41 | 1655 | 579 | 2174 | 1117 | 2705 |
| 42 | 1656 | 580 | 2175 | 1118 | 2706 |
| 43 | N/A | 581 | 2176 | 1119 | N/A |
| 44 | 1657 | 582 | 2177 | 1120 | 2707 |
| 45 | 1658 | 583 | 2178 | 1121 | 2708 |
| 46 | N/A | 584 | 2179 | 1122 | 2709 |
| 47 | 1659 | 585 | 2180 | 1123 | 2710 |
| 48 | 1660 | 586 | 2181 | 1124 | 2711 |
| 49 | 1661 | 587 | 2182 | 1125 | 2712 |
| 50 | 1662 | 588 | 2183 | 1126 | 2713 |
| 51 | 1663 | 589 | 2184 | 1127 | 2714 |
| 52 | 1664 | 590 | 2185 | 1128 | 2715 |
| 53 | 1665 | 591 | 2186 | 1129 | 2716 |
| 54 | 1666 | 592 | 2187 | 1130 | 2717 |
| 55 | 1667 | 593 | 2188 | 1131 | 2718 |
| 56 | 1668 | 594 | 2189 | 1132 | 2719 |
| 57 | 1669 | 595 | 2190 | 1133 | 2720 |
| 58 | 1670 | 596 | 2191 | 1134 | 2721 |
| 59 | 1671 | 597 | 2192 | 1135 | 2722 |
| 60 | 1672 | 598 | 2193 | 1136 | 2723 |
| 61 | 1673 | 599 | 2194 | 1137 | 2724 |
| 62 | 1674 | 600 | 2195 | 1138 | 2725 |
| 63 | 1675 | 601 | 2196 | 1139 | 2726 |
| 64 | 1676 | 602 | 2197 | 1140 | 2727 |
| 65 | 1677 | 603 | 2198 | 1141 | 2728 |
| 66 | 1678 | 604 | 2199 | 1142 | 2729 |
| 67 | 1679 | 605 | 2200 | 1143 | 2730 |
| 68 | 1680 | 606 | 2201 | 1144 | 2731 |
| 69 | 1681 | 607 | 2202 | 1145 | 2732 |
| 70 | 1682 | 608 | 2203 | 1146 | 2733 |
| 71 | 1683 | 609 | 2204 | 1147 | 2734 |
| 72 | 1684 | 610 | 2205 | 1148 | 2735 |
| 73 | 1685 | 611 | 2206 | 1149 | 2736 |
| 74 | 1686 | 612 | 2207 | 1150 | 2737 |
| 75 | 1687 | 613 | 2208 | 1151 | 2738 |
| 76 | 1688 | 614 | 2209 | 1152 | 2739 |
| 77 | 1689 | 615 | 2210 | 1153 | 2740 |
| 78 | 1690 | 616 | 2211 | 1154 | 2741 |
| 79 | 1691 | 617 | 2212 | 1155 | 2742 |
| 80 | 1692 | 618 | 2213 | 1156 | 2743 |
| 81 | 1693 | 619 | 2214 | 1157 | 2744 |
| 82 | 1694 | 620 | 2215 | 1158 | 2745 |
| 83 | 1695 | 621 | 2216 | 1159 | 2746 |
| 84 | 1696 | 622 | 2217 | 1160 | 2747 |
| 85 | 1697 | 623 | 2218 | 1161 | 2748 |
| 86 | 1698 | 624 | 2219 | 1162 | 2749 |
| 87 | 1699 | 625 | 2220 | 1163 | 2750 |
| 88 | 1700 | 626 | 2221 | 1164 | 2751 |
| 89 | 1701 | 627 | 2222 | 1165 | 2752 |
| 90 | 1702 | 628 | 2223 | 1166 | 2753 |
| 91 | 1703 | 629 | 2224 | 1167 | 2754 |
| 92 | 1704 | 630 | 2225 | 1168 | N/A |
| 93 | 1705 | 631 | 2226 | 1169 | 2755 |
| 94 | 1706 | 632 | 2227 | 1170 | 2756 |
| 95 | 1707 | 633 | 2228 | 1171 | 2757 |
| 96 | 1708 | 634 | 2229 | 1172 | 2758 |
| 97 | 1709 | 635 | 2230 | 1173 | 2759 |
| 98 | 1710 | 636 | 2231 | 1174 | 2760 |
| 99 | 1711 | 637 | N/A | 1175 | 2761 |
| 100 | 1712 | 638 | 2232 | 1176 | 2762 |
| 101 | 1713 | 639 | 2233 | 1177 | 2763 |
| 102 | 1714 | 640 | 2234 | 1178 | 2764 |
| 103 | 1715 | 641 | 2235 | 1179 | 2765 |
| 104 | 1716 | 642 | N/A | 1180 | 2766 |
| 105 | 1717 | 643 | 2236 | 1181 | 2767 |
| 106 | 1718 | 644 | 2237 | 1182 | 2768 |
| 107 | 1719 | 645 | 2238 | 1183 | 2769 |
| 108 | N/A | 646 | 2239 | 1184 | 2770 |
| 109 | 1720 | 647 | 2240 | 1185 | 2771 |
| 110 | 1721 | 648 | 2241 | 1186 | 2772 |
| 111 | 1722 | 649 | 2242 | 1187 | 2773 |
| 112 | 1723 | 650 | 2243 | 1188 | 2774 |
| 113 | 1724 | 651 | 2244 | 1189 | 2775 |
| 114 | 1725 | 652 | 2245 | 1190 | 2776 |
| 115 | 1726 | 653 | 2246 | 1191 | 2777 |
| 116 | 1727 | 654 | 2247 | 1192 | 2778 |
| 117 | 1728 | 655 | 2248 | 1193 | 2779 |
| 118 | 1729 | 656 | 2249 | 1194 | 2780 |
| 119 | 1730 | 657 | 2250 | 1195 | 2781 |
| 120 | 1731 | 658 | 2251 | 1196 | 2782 |
| 121 | 1732 | 659 | 2252 | 1197 | 2783 |
| 122 | 1733 | 660 | 2253 | 1198 | 2784 |
| 123 | 1734 | 661 | 2254 | 1199 | 2785 |
| 124 | 1735 | 662 | 2255 | 1200 | 2786 |
| 125 | 1736 | 663 | 2256 | 1201 | 2787 |
| 126 | 1737 | 664 | 2257 | 1202 | 2788 |
| 127 | 1738 | 665 | 2258 | 1203 | 2789 |
| 128 | 1739 | 666 | 2259 | 1204 | 2790 |
| 129 | 1740 | 667 | 2260 | 1205 | 2791 |
| 130 | 1741 | 668 | 2261 | 1206 | 2792 |
| 131 | 1742 | 669 | 2262 | 1207 | 2793 |
| 132 | 1743 | 670 | 2263 | 1208 | 2794 |
| 133 | 1744 | 671 | 2264 | 1209 | 2795 |
| 134 | 1745 | 672 | 2265 | 1210 | 2796 |
| 135 | 1746 | 673 | 2266 | 1211 | 2797 |
| 136 | 1747 | 674 | 2267 | 1212 | 2798 |
| 137 | 1748 | 675 | 2268 | 1213 | 2799 |
| 138 | 1749 | 676 | 2269 | 1214 | 2800 |
| 139 | 1750 | 677 | 2270 | 1215 | 2801 |
| 140 | 1751 | 678 | 2271 | 1216 | 2802 |
| 141 | 1752 | 679 | 2272 | 1217 | 2803 |
| 142 | 1753 | 680 | 2273 | 1218 | 2804 |
| 143 | 1754 | 681 | 2274 | 1219 | 2805 |
| 144 | 1755 | 682 | 2275 | 1220 | 2806 |
| 145 | 1756 | 683 | 2276 | 1221 | 2807 |
| 146 | 1757 | 684 | 2277 | 1222 | 2808 |
| 147 | N/A | 685 | 2278 | 1223 | 2809 |
| 148 | 1758 | 686 | 2279 | 1224 | 2810 |
| 149 | 1759 | 687 | 2280 | 1225 | 2811 |
| 150 | 1760 | 688 | 2281 | 1226 | 2812 |
| 151 | 1761 | 689 | 2282 | 1227 | 2813 |
| 152 | 1762 | 690 | 2283 | 1228 | 2814 |
| 153 | 1763 | 691 | 2284 | 1229 | 2815 |
| 154 | 1764 | 692 | 2285 | 1230 | 2816 |
| 155 | 1765 | 693 | 2286 | 1231 | 2817 |
| 156 | 1766 | 694 | 2287 | 1232 | 2818 |
| 157 | 1767 | 695 | 2288 | 1233 | 2819 |
| 158 | 1768 | 696 | 2289 | 1234 | 2820 |
| 159 | 1769 | 697 | N/A | 1235 | 2821 |
| 160 | 1770 | 698 | 2290 | 1236 | 2822 |
| 161 | 1771 | 699 | 2291 | 1237 | 2823 |
| 162 | 1772 | 700 | 2292 | 1238 | 2824 |
| 163 | N/A | 701 | 2293 | 1239 | 2825 |
| 164 | 1773 | 702 | N/A | 1240 | 2826 |
| 165 | 1774 | 703 | 2294 | 1241 | 2827 |
| 166 | 1775 | 704 | 2295 | 1242 | 2828 |
| 167 | 1776 | 705 | 2296 | 1243 | 2829 |
| 168 | 1777 | 706 | 2297 | 1244 | 2830 |
| 169 | 1778 | 707 | 2298 | 1245 | 2831 |
| 170 | 1779 | 708 | 2299 | 1246 | 2832 |
| 171 | 1780 | 709 | 2300 | 1247 | 2833 |
| 172 | 1781 | 710 | 2301 | 1248 | 2834 |
| 173 | 1782 | 711 | 2302 | 1249 | 2835 |
| 174 | 1783 | 712 | 2303 | 1250 | 2836 |
| 175 | 1784 | 713 | 2304 | 1251 | 2837 |
| 176 | 1785 | 714 | 2305 | 1252 | 2838 |
| 177 | 1786 | 715 | 2306 | 1253 | 2839 |
| 178 | 1787 | 716 | 2307 | 1254 | 2840 |
| 179 | 1788 | 717 | 2308 | 1255 | 2841 |
| 180 | N/A | 718 | 2309 | 1256 | 2842 |
| 181 | 1789 | 719 | 2310 | 1257 | 2843 |
| 182 | 1790 | 720 | 2311 | 1258 | 2844 |
| 183 | 1791 | 72 | 2312 | 1259 | 2845 |
| 184 | 1792 | 722 | 2313 | 1260 | 2846 |
| 185 | 1793 | 723 | 2314 | 1261 | 2847 |
| 186 | 1794 | 724 | 2315 | 1262 | 2848 |
| 187 | 1795 | 725 | 2316 | 1263 | 2849 |
| 188 | 1796 | 726 | 2317 | 1264 | 2850 |
| 189 | 1797 | 727 | 2318 | 1265 | 2851 |
| 190 | 1798 | 728 | 2319 | 1266 | 2852 |
| 191 | 1799 | 729 | 2320 | 1267 | 2853 |
| 192 | 1800 | 730 | 2321 | 1268 | 2854 |
| 193 | 1801 | 731 | 2322 | 1269 | 2855 |
| 194 | 1802 | 732 | 2323 | 1270 | 2856 |
| 195 | 1803 | 733 | 2324 | 1271 | 2857 |
| 196 | 1804 | 734 | 2325 | 1272 | 2858 |
| 197 | 1805 | 735 | 2326 | 1273 | 2859 |
| 198 | 1806 | 736 | 2327 | 1274 | N/A |
| 199 | 1807 | 737 | 2328 | 1275 | 2860 |
| 200 | 1808 | 738 | 2329 | 1276 | 2861 |
| 201 | 1809 | 739 | 2330 | 1277 | 2862 |
| 202 | 1810 | 740 | 2331 | 1278 | 2863 |
| 203 | 1811 | 741 | 2332 | 1279 | 2864 |
| 204 | 1812 | 742 | 2333 | 1280 | 2865 |
| 205 | N/A | 743 | 2334 | 1281 | 2866 |
| 206 | 1813 | 744 | 2335 | 1282 | 2867 |
| 207 | 1814 | 745 | 2336 | 1283 | 2868 |
| 208 | 1815 | 746 | 2337 | 1284 | 2869 |
| 209 | 1816 | 747 | 2338 | 1285 | 2870 |
| 210 | 1817 | 748 | 2339 | 1286 | 2871 |
| 211 | 1818 | 749 | 2340 | 1287 | 2872 |
| 212 | 1819 | 750 | 2341 | 1288 | 2873 |
| 213 | 1820 | 751 | 2342 | 1289 | 2874 |
| 214 | 1821 | 752 | N/A | 1290 | 2875 |
| 215 | 1822 | 753 | 2343 | 1291 | 2876 |
| 216 | 1823 | 754 | 2344 | 1292 | 2877 |
| 217 | 1824 | 755 | 2345 | 1293 | 2878 |
| 218 | 1825 | 756 | 2346 | 1294 | 2879 |
| 219 | 1826 | 757 | 2347 | 1295 | 2880 |
| 220 | 1827 | 758 | 2348 | 1296 | 2881 |
| 221 | 1828 | 759 | 2349 | 1297 | 2882 |
| 222 | 1829 | 760 | 2350 | 1298 | 2883 |
| 223 | 1830 | 761 | 2351 | 1299 | 2884 |
| 224 | 1831 | 762 | 2352 | 1300 | 2885 |
| 225 | 1832 | 763 | 2353 | 1301 | 2886 |
| 226 | 1833 | 764 | 2354 | 1302 | 2887 |
| 227 | 1834 | 765 | 2355 | 1303 | 2888 |
| 228 | 1835 | 766 | 2356 | 1304 | 2889 |
| 229 | 1836 | 767 | 2357 | 1305 | 2890 |
| 230 | 1837 | 768 | 2358 | 1306 | 2891 |
| 231 | 1838 | 769 | 2359 | 1307 | 2892 |
| 232 | 1839 | 770 | 2360 | 1308 | 2893 |
| 233 | 1840 | 771 | 2361 | 1309 | 2894 |
| 234 | 1841 | 772 | 2362 | 1310 | 2895 |
| 235 | 1842 | 773 | 2363 | 1311 | 2896 |
| 236 | 1843 | 774 | 2364 | 1312 | 2897 |
| 237 | 1844 | 775 | 2365 | 1313 | 2898 |
| 238 | 1845 | 776 | 2366 | 1314 | 2899 |
| 239 | 1846 | 777 | 2367 | 1315 | N/A |
| 240 | 1847 | 778 | 2368 | 1316 | N/A |
| 241 | 1848 | 779 | 2369 | 1317 | 2900 |
| 242 | 1849 | 780 | 2370 | 1318 | 2901 |
| 243 | 1850 | 781 | 2371 | 1319 | 2902 |
| 244 | 1851 | 782 | 2372 | 1320 | 2903 |
| 245 | 1852 | 783 | 2373 | 1321 | 2904 |
| 246 | 1853 | 784 | 2374 | 1322 | 2905 |
| 247 | 1854 | 785 | 2375 | 1323 | 2906 |
| 248 | 1855 | 786 | 2376 | 1324 | 2907 |
| 249 | 1856 | 787 | 2377 | 1325 | 2908 |
| 250 | 1857 | 788 | 2378 | 1326 | 2909 |
| 251 | 1858 | 789 | 2379 | 1327 | 2910 |
| 252 | 1859 | 790 | 2380 | 1328 | 2911 |
| 253 | 1860 | 791 | 2381 | 1329 | 2912 |
| 254 | 1861 | 792 | 2382 | 1330 | 2913 |
| 255 | 1862 | 793 | 2383 | 1331 | 2914 |
| 256 | 1863 | 794 | 2384 | 1332 | 2915 |
| 257 | 1864 | 795 | 2385 | 1333 | 2916 |
| 258 | 1865 | 796 | 2386 | 1334 | 2917 |
| 259 | 1866 | 797 | 2387 | 1335 | 2918 |
| 260 | 1867 | 798 | 2388 | 1336 | 2919 |
| 261 | 1868 | 799 | 2389 | 1337 | 2920 |
| 262 | 1869 | 800 | 2390 | 1338 | 2921 |
| 263 | 1870 | 801 | 2391 | 1339 | 2922 |
| 264 | 1871 | 802 | 2392 | 1340 | 2923 |
| 265 | 1872 | 803 | 2393 | 1341 | 2924 |
| 266 | 1873 | 804 | 2394 | 1342 | 2925 |
| 267 | 1874 | 805 | 2395 | 1343 | 2926 |
| 268 | 1875 | 806 | 2396 | 1344 | 2927 |
| 269 | 1876 | 807 | 2397 | 1345 | 2928 |
| 270 | 1877 | 808 | 2398 | 1346 | 2929 |
| 271 | 1878 | 809 | 2399 | 1347 | N/A |
| 272 | 1879 | 810 | 2400 | 1348 | 2930 |
| 273 | 1880 | 811 | 2401 | 1349 | 2931 |
| 274 | 1881 | 812 | 2402 | 1350 | 2932 |
| 275 | 1882 | 813 | 2403 | 1351 | 2933 |
| 276 | 1883 | 814 | 2404 | 1352 | 2934 |
| 277 | 1884 | 815 | 2405 | 1353 | 2935 |
| 278 | 1885 | 816 | 2406 | 1354 | 2936 |
| 279 | 1886 | 817 | 2407 | 1355 | 2937 |
| 280 | 1887 | 818 | 2408 | 1356 | 2938 |
| 281 | 1888 | 819 | 2409 | 1357 | 2939 |
| 282 | 1889 | 820 | 2410 | 1358 | 2940 |
| 283 | 1890 | 821 | 2411 | 1359 | 2941 |
| 284 | 1891 | 822 | 2412 | 1360 | 2942 |
| 285 | 1892 | 823 | 2413 | 1361 | 2943 |
| 286 | 1893 | 824 | 2414 | 1362 | 2944 |
| 287 | 1894 | 825 | 2415 | 1363 | 2945 |
| 288 | 1895 | 826 | 2416 | 1364 | 2946 |
| 289 | 1896 | 827 | 2417 | 1365 | 2947 |
| 290 | 1897 | 828 | 2418 | 1366 | 2948 |
| 291 | N/A | 829 | 2419 | 1367 | 2949 |
| 292 | 1898 | 830 | 2420 | 1368 | 2950 |
| 293 | 1899 | 831 | 2421 | 1369 | 2951 |
| 294 | 1900 | 832 | 2422 | 1370 | 2952 |
| 295 | 1901 | 833 | 2423 | 1371 | 2953 |
| 296 | 1902 | 834 | 2424 | 1372 | 2954 |
| 297 | 1903 | 835 | 2425 | 1373 | N/A |
| 298 | 1904 | 836 | 2426 | 1374 | 2955 |
| 299 | 1905 | 837 | 2427 | 1375 | 2956 |
| 300 | 1906 | 838 | 2428 | 1376 | 2957 |
| 301 | 1907 | 839 | 2429 | 1377 | 2958 |
| 302 | 1908 | 840 | 2430 | 1378 | 2959 |
| 303 | 1909 | 84 | 2431 | 1379 | 2960 |
| 304 | 1910 | 842 | 2432 | 1380 | 2961 |
| 305 | 1911 | 843 | 2433 | 1381 | 2962 |
| 306 | 1912 | 844 | 2434 | 1382 | 2963 |
| 307 | 1913 | 845 | 2435 | 1383 | 2964 |
| 308 | 1914 | 846 | 2436 | 1384 | 2965 |
| 309 | 1915 | 847 | 2437 | 1385 | 2966 |
| 310 | 1916 | 848 | 2438 | 1386 | 2967 |
| 311 | 1917 | 849 | 2439 | 1387 | 2968 |
| 312 | 1918 | 850 | 2440 | 1388 | 2969 |
| 313 | 1919 | 851 | 2441 | 1389 | 2970 |
| 314 | 1920 | 852 | N/A | 1390 | 2971 |
| 315 | 1921 | 853 | 2442 | 1391 | 2972 |
| 316 | 1922 | 854 | 2443 | 1392 | 2973 |
| 317 | 1923 | 855 | 2444 | 1393 | 2974 |
| 318 | 1924 | 856 | 2445 | 1394 | 2975 |
| 319 | 1925 | 857 | 2446 | 1395 | 2976 |
| 320 | 1926 | 858 | 2447 | 1396 | 2977 |
| 32 | 1927 | 859 | 2448 | 1397 | 2978 |
| 322 | 1928 | 860 | 2449 | 1398 | 2979 |
| 323 | 1929 | 861 | 2450 | 1399 | 2980 |
| 324 | 1930 | 862 | 2451 | 1400 | 2981 |
| 325 | 1931 | 863 | 2452 | 1401 | 2982 |
| 326 | 1932 | 864 | 2453 | 1402 | 2983 |
| 327 | 1933 | 865 | 2454 | 1403 | 2984 |
| 328 | 1934 | 866 | 2455 | 1404 | 2985 |
| 329 | 1935 | 867 | 2456 | 1405 | 2986 |
| 330 | 1936 | 868 | 2457 | 1406 | 2987 |
| 331 | 1937 | 869 | 2458 | 1407 | 2988 |
| 332 | 1938 | 870 | 2459 | 1408 | 2989 |
| 333 | N/A | 871 | 2460 | 1409 | 2990 |
| 334 | 1939 | 872 | 2461 | 1410 | 2991 |
| 335 | 1940 | 873 | 2462 | 1411 | 2992 |
| 336 | 1941 | 874 | 2463 | 1412 | 2993 |
| 337 | N/A | 875 | 2464 | 1413 | 2994 |
| 338 | 1942 | 876 | 2465 | 1414 | 2995 |
| 339 | N/A | 877 | 2466 | 1415 | 2996 |
| 340 | 1943 | 878 | 2467 | 1416 | 2997 |
| 341 | 1944 | 879 | 2468 | 1417 | 2998 |
| 342 | 1945 | 880 | 2469 | 1418 | 2999 |
| 343 | 1946 | 881 | 2470 | 1419 | 3000 |
| 344 | 1947 | 882 | 2471 | 1420 | 3001 |
| 345 | 1948 | 883 | 2472 | 1421 | 3002 |
| 346 | 1949 | 884 | 2473 | 1422 | 3003 |
| 347 | 1950 | 885 | 2474 | 1423 | 3004 |
| 348 | 1951 | 886 | 2475 | 1424 | 3005 |
| 349 | 1952 | 887 | 2476 | 1425 | 3006 |
| 350 | 1953 | 888 | 2477 | 1426 | 3007 |
| 351 | 1954 | 889 | 2478 | 1427 | 3008 |
| 352 | 1955 | 890 | 2479 | 1428 | 3009 |
| 353 | 1956 | 891 | 2480 | 1429 | 3010 |
| 354 | 1957 | 892 | 2481 | 1430 | 3011 |
| 355 | N/A | 893 | 2482 | 1431 | 3012 |
| 356 | 1958 | 894 | 2483 | 1432 | 3013 |
| 357 | 1959 | 895 | 2484 | 1433 | 3014 |
| 358 | 1960 | 896 | 2485 | 1434 | 3015 |
| 359 | 1961 | 897 | 2486 | 1435 | 3016 |
| 360 | 1962 | 898 | 2487 | 1436 | 3017 |
| 361 | 1963 | 899 | 2488 | 1437 | 3018 |
| 362 | 1964 | 900 | 2489 | 1438 | 3019 |
| 363 | 1965 | 901 | 2490 | 1439 | 3020 |
| 364 | 1966 | 902 | 2491 | 1440 | 3021 |
| 365 | 1967 | 903 | 2492 | 1441 | 3022 |
| 366 | 1968 | 904 | 2493 | 1442 | 3023 |
| 367 | 1969 | 905 | 2494 | 1443 | 3024 |
| 368 | 1970 | 906 | 2495 | 1444 | 3025 |
| 369 | 1971 | 907 | 2496 | 1445 | 3026 |
| 370 | 1972 | 908 | 2497 | 1446 | 3027 |
| 371 | 1973 | 909 | 2498 | 1447 | 3028 |
| 372 | 1974 | 910 | 2499 | 1448 | 3029 |
| 373 | 1975 | 911 | 2500 | 1449 | 3030 |
| 374 | 1976 | 912 | 2501 | 1450 | 3031 |
| 375 | 1977 | 913 | 2502 | 1451 | 3032 |
| 376 | N/A | 914 | 2503 | 1452 | 3033 |
| 377 | 1978 | 915 | 2504 | 1453 | 3034 |
| 378 | 1979 | 916 | 2505 | 1454 | 3035 |
| 379 | 1980 | 917 | 2506 | 1455 | 3036 |
| 380 | N/A | 918 | 2507 | 1456 | 3037 |
| 381 | 1981 | 919 | 2508 | 1457 | 3038 |
| 382 | 1982 | 920 | 2509 | 1458 | 3039 |
| 383 | 1983 | 921 | 2510 | 1459 | 3040 |
| 384 | 1984 | 922 | 2511 | 1460 | 3041 |
| 385 | 1985 | 923 | 2512 | 1461 | 3042 |
| 386 | 1986 | 924 | 2513 | 1462 | 3043 |
| 387 | 1987 | 925 | 2514 | 1463 | 3044 |
| 388 | 1988 | 926 | 2515 | 1464 | 3045 |
| 389 | 1989 | 927 | 2516 | 1465 | 3046 |
| 390 | 1990 | 928 | N/A | 1466 | 3047 |
| 391 | 1991 | 929 | 2517 | 1467 | 3048 |
| 392 | 1992 | 930 | 2518 | 1468 | 3049 |
| 393 | 1993 | 931 | 2519 | 1469 | 3050 |
| 394 | 1994 | 932 | 2520 | 1470 | 3051 |
| 395 | N/A | 933 | 2521 | 1471 | 3052 |
| 396 | 1995 | 934 | 2522 | 1472 | 3053 |
| 397 | 1996 | 935 | 2523 | 1473 | 3054 |
| 398 | 1997 | 936 | 2524 | 1474 | 3055 |
| 399 | 1998 | 937 | 2525 | 1475 | 3056 |
| 400 | 1999 | 938 | 2526 | 1476 | 3057 |
| 401 | 2000 | 939 | 2527 | 1477 | 3058 |
| 402 | 2001 | 940 | 2528 | 1478 | 3059 |
| 403 | 2002 | 941 | 2529 | 1479 | 3060 |
| 404 | 2003 | 942 | 2530 | 1480 | 3061 |
| 405 | 2004 | 943 | 2531 | 1481 | 3062 |
| 406 | 2005 | 944 | 2532 | 1482 | 3063 |
| 407 | 2006 | 945 | 2533 | 1483 | 3064 |
| 408 | 2007 | 946 | 2534 | 1484 | 3065 |
| 409 | 2008 | 947 | 2535 | 1485 | 3066 |
| 410 | 2009 | 948 | 2536 | 1486 | 3067 |
| 411 | 2010 | 949 | 2537 | 1487 | 3068 |
| 412 | 2011 | 950 | 2538 | 1488 | 3069 |
| 413 | 2012 | 951 | 2539 | 1489 | 3070 |
| 414 | 2013 | 952 | 2540 | 1490 | 3071 |
| 415 | 2014 | 953 | 2541 | 1491 | 3072 |
| 416 | 2015 | 954 | 2542 | 1492 | 3073 |
| 417 | 2016 | 955 | 2543 | 1493 | 3074 |
| 418 | 2017 | 956 | 2544 | 1494 | 3075 |
| 419 | 2018 | 957 | 2545 | 1495 | 3076 |
| 420 | 2019 | 958 | 2546 | 1496 | 3077 |
| 421 | 2020 | 959 | 2547 | 1497 | 3078 |
| 422 | 2021 | 960 | 2548 | 1498 | 3079 |
| 423 | 2022 | 961 | 2549 | 1499 | 3080 |
| 424 | 2023 | 962 | 2550 | 1500 | 3081 |
| 425 | 2024 | 963 | 2551 | 1501 | 3082 |
| 426 | 2025 | 964 | 2552 | 1502 | 3083 |
| 427 | 2026 | 965 | 2553 | 1503 | N/A |
| 428 | 2027 | 966 | 2554 | 1504 | 3084 |
| 429 | 2028 | 967 | 2555 | 1505 | 3085 |
| 430 | 2029 | 968 | 2556 | 1506 | 3086 |
| 431 | 2030 | 969 | 2557 | 1507 | 3087 |
| 432 | 2031 | 970 | 2558 | 1508 | 3088 |
| 433 | 2032 | 971 | 2559 | 1509 | 3089 |
| 434 | 2033 | 972 | 2560 | 1510 | 3090 |
| 435 | 2034 | 973 | 2561 | 1511 | 3091 |
| 436 | 2035 | 974 | 2562 | 1512 | 3092 |
| 437 | 2036 | 975 | 2563 | 1513 | 3093 |
| 438 | 2037 | 976 | 2564 | 1514 | 3094 |
| 439 | 2038 | 977 | 2565 | 1515 | 3095 |
| 440 | 2039 | 978 | 2566 | 1516 | 3096 |
| 441 | 2040 | 979 | 2567 | 1517 | 3097 |
| 442 | 2041 | 980 | 2568 | 1518 | 3098 |
| 443 | 2042 | 981 | 2569 | 1519 | 3099 |
| 444 | 2043 | 982 | 2570 | 1520 | 3100 |
| 445 | N/A | 983 | 2571 | 1521 | 3101 |
| 446 | 2044 | 984 | 2572 | 1522 | 3102 |
| 447 | 2045 | 985 | 2573 | 1523 | 3103 |
| 448 | 2046 | 986 | 2574 | 1524 | 3104 |
| 449 | 2047 | 987 | 2575 | 1525 | 3105 |
| 450 | 2048 | 988 | 2576 | 1526 | 3106 |
| 451 | 2049 | 989 | 2577 | 1527 | 3107 |
| 452 | 2050 | 990 | 2578 | 1528 | 3108 |
| 453 | 2051 | 991 | 2579 | 1529 | 3109 |
| 454 | 2052 | 992 | 2580 | 1530 | 3110 |
| 455 | 2053 | 993 | 2581 | 1531 | 3111 |
| 456 | 2054 | 994 | 2582 | 1532 | 3112 |
| 457 | 2055 | 995 | 2583 | 1533 | 3113 |
| 458 | 2056 | 996 | 2584 | 1534 | 3114 |
| 459 | 2057 | 997 | 2585 | 1535 | 3115 |
| 460 | 2058 | 998 | 2586 | 1536 | 3116 |
| 461 | 2059 | 999 | 2587 | 1537 | 3117 |
| 462 | 2060 | 1000 | 2588 | 1538 | 3118 |
| 463 | 2061 | 1001 | 2589 | 1539 | 3119 |
| 464 | 2062 | 1002 | 2590 | 1540 | 3120 |
| 465 | 2063 | 1003 | 2591 | 1541 | 3121 |
| 466 | 2064 | 1004 | 2592 | 1542 | 3122 |
| 467 | 2065 | 1005 | 2593 | 1543 | 3123 |
| 468 | 2066 | 1006 | 2594 | 1544 | 3124 |
| 469 | 2067 | 1007 | 2595 | 1545 | 3125 |
| 470 | 2068 | 1008 | 2596 | 1546 | 3126 |
| 471 | 2069 | 1009 | 2597 | 1547 | 3127 |
| 472 | 2070 | 1010 | 2598 | 1548 | 3128 |
| 473 | 2071 | 1011 | 2599 | 1549 | 3129 |
| 474 | 2072 | 1012 | 2600 | 1550 | 3130 |
| 475 | 2073 | 1013 | 2601 | 1551 | 3131 |
| 476 | 2074 | 1014 | 2602 | 1552 | 3132 |
| 477 | 2075 | 1015 | 2603 | 1553 | 3133 |
| 478 | 2076 | 1016 | 2604 | 1554 | 3134 |
| 479 | 2077 | 1017 | 2605 | 1555 | 3135 |
| 480 | 2078 | 1018 | 2606 | 1556 | 3136 |
| 481 | 2079 | 1019 | 2607 | 1557 | 3137 |
| 482 | 2080 | 1020 | 2608 | 1558 | 3138 |
| 483 | 2081 | 1021 | 2609 | 1559 | 3139 |
| 484 | 2082 | 1022 | 2610 | 1560 | 3140 |
| 485 | 2083 | 1023 | 2611 | 1561 | 3141 |
| 486 | 2084 | 1024 | 2612 | 1562 | 3142 |
| 487 | 2085 | 1025 | 2613 | 1563 | 3143 |
| 488 | 2086 | 1026 | 2614 | 1564 | 3144 |
| 489 | 2087 | 1027 | 2615 | 1565 | 3145 |
| 490 | 2088 | 1028 | 2616 | 1566 | 3146 |
| 491 | 2089 | 1029 | 2617 | 1567 | 3147 |
| 492 | 2090 | 1030 | 2618 | 1568 | 3148 |
| 493 | 2091 | 1031 | 2619 | 1569 | 3149 |
| 494 | 2092 | 1032 | 2620 | 1570 | 3150 |
| 495 | N/A | 1033 | 2621 | 1571 | 3151 |
| 496 | 2093 | 1034 | 2622 | 1572 | 3152 |
| 497 | 2094 | 1035 | 2623 | 1573 | 3153 |
| 498 | 2095 | 1036 | 2624 | 1574 | 3154 |
| 499 | 2096 | 1037 | 2625 | 1575 | 3155 |
| 500 | 2097 | 1038 | 2626 | 1576 | 3156 |
| 501 | 2098 | 1039 | 2627 | 1577 | 3157 |
| 502 | 2099 | 1040 | 2628 | 1578 | 3158 |
| 503 | 2100 | 1041 | 2629 | 1579 | 3159 |
| 504 | 2101 | 1042 | 2630 | 1580 | 3160 |
| 505 | 2102 | 1043 | 2631 | 1581 | 3161 |
| 506 | 2103 | 1044 | 2632 | 1582 | 3162 |
| 507 | 2104 | 1045 | 2633 | 1583 | 3163 |
| 508 | 2105 | 1046 | 2634 | 1584 | 3164 |
| 509 | 2106 | 1047 | 2635 | 1585 | 3165 |
| 510 | 2107 | 1048 | 2636 | 1586 | 3166 |
| 511 | 2108 | 1049 | 2637 | 1587 | 3167 |
| 512 | N/A | 1050 | 2638 | 1588 | 3168 |
| 513 | 2109 | 1051 | 2639 | 1589 | 3169 |
| 514 | 2110 | 1052 | 2640 | 1590 | 3170 |
| 515 | 2111 | 1053 | 2641 | 1591 | 3171 |
| 516 | 2112 | 1054 | 2642 | 1592 | 3172 |
| 517 | 2113 | 1055 | 2643 | 1593 | 3173 |
| 518 | 2114 | 1056 | 2644 | 1594 | 3174 |
| 519 | 2115 | 1057 | 2645 | 1595 | 3175 |
| 520 | 2116 | 1058 | 2646 | 1596 | 3176 |
| 521 | 2117 | 1059 | 2647 | 1597 | 3177 |
| 522 | 2118 | 1060 | 2648 | 1598 | 3178 |
| 523 | 2119 | 1061 | 2649 | 1599 | 3179 |
| 524 | 2120 | 1062 | 2650 | 1600 | 3180 |
| 525 | 2121 | 1063 | 2651 | 1601 | 3181 |
| 526 | 2122 | 1064 | 2652 | 1602 | 3182 |
| 527 | 2123 | 1065 | 2653 | 1603 | 3183 |
| 528 | 2124 | 1066 | 2654 | 1604 | 3184 |
| 529 | 2125 | 1067 | 2655 | 1605 | 3185 |
| 530 | 2126 | 1068 | 2656 | 1606 | 3186 |
| 531 | 2127 | 1069 | 2657 | 1607 | 3187 |
| 532 | 2128 | 1070 | 2658 | 1608 | 3188 |
| 533 | 2129 | 1071 | 2659 | 1609 | 3189 |
| 534 | 2130 | 1072 | 2660 | 1610 | 3190 |
| 535 | 2131 | 1073 | 2661 | 1611 | 3191 |
| 536 | 2132 | 1074 | 2662 | 1612 | 3192 |
| 537 | 2133 | 1075 | 2663 | 1613 | 3193 |
| 538 | 2134 | 1076 | 2664 | 1614 | 3194 |

TABLE 2
Exemplary Effector Proteins and Guide Sequences

| C1 | D1 | C2 | D2 |
|---|---|---|---|
| SEQ ID NO: | SEQ ID NO: | SEQ ID NO: | SEQ ID NO: |
| 3195 | N/A | 3249 | 3353 |
| 3196 | N/A | 3250 | 3354 |
| 3197 | N/A | 3251 | 3355 |
| 3198 | N/A | 3252 | 3356 |
| 3199 | 3303 | 3253 | 3357 |
| 3200 | 3304 | 3254 | 3358 |
| 3201 | 3305 | 3255 | 3359 |
| 3202 | 3306 | 3256 | 3360 |
| 3203 | 3307 | 3257 | 3361 |
| 3204 | 3308 | 3258 | 3362 |
| 3205 | 3309 | 3259 | 3363 |
| 3206 | 3310 | 3260 | 3364 |
| 3207 | 3311 | 3261 | 3365 |
| 3208 | 3312 | 3262 | 3366 |
| 3209 | 3313 | 3263 | 3367 |
| 3210 | 3314 | 3264 | 3368 |
| 3211 | 3315 | 3265 | 3369 |
| 3212 | 3316 | 3266 | 3370 |
| 3213 | 3317 | 3267 | 3371 |
| 3214 | 3318 | 3268 | 3372 |
| 3215 | 3319 | 3269 | 3373 |
| 3216 | 3320 | 3270 | 3374 |
| 3217 | 3321 | 3271 | 3375 |
| 3218 | 3322 | 3272 | 3376 |
| 3219 | 3323 | 3273 | 3377 |
| 3220 | 3324 | 3274 | 3378 |
| 3221 | 3325 | 3275 | 3379 |
| 3222 | 3326 | 3276 | 3380 |
| 3223 | 3327 | 3277 | 3381 |
| 3224 | 3328 | 3278 | 3382 |
| 3225 | 3329 | 3279 | 3383 |
| 3226 | 3330 | 3280 | 3384 |
| 3227 | 3331 | 3281 | 3385 |
| 3228 | 3332 | 3282 | 3386 |
| 3229 | 3333 | 3283 | 3387 |
| 3230 | 3334 | 3284 | 3388 |
| 3231 | 3335 | 3285 | 3389 |
| 3232 | 3336 | 3286 | 3390 |
| 3233 | 3337 | 3287 | 3391 |
| 3234 | 3338 | 3288 | 3392 |
| 3235 | 3339 | 3289 | 3393 |
| 3236 | 3340 | 3290 | 3394 |
| 3237 | 3341 | 3291 | 3395 |
| 3238 | 3342 | 3292 | 3396 |
| 3239 | 3343 | 3293 | 3397 |
| 3240 | 3344 | 3294 | 3398 |
| 3241 | 3345 | 3295 | 3399 |
| 3242 | 3346 | 3296 | 3400 |
| 3243 | 3347 | 3297 | 3401 |
| 3244 | 3348 | 3298 | 3402 |
| 3245 | 3349 | 3299 | 3403 |
| 3246 | 3350 | 3300 | 3404 |
| 3247 | 3351 | 3301 | 3405 |
| 3248 | 3352 | 3302 | 3406 |

[0101] In some cases, effector proteins comprise a RuvC domain. In some instances, a RuvC domain is a region of an effector protein that is capable of cleaving a target nucleic acid. In some instances, a RuvC domain is capable of processing a pre-crRNA. In some instances, the RuvC domain is located near the C-terminus of the effector protein. A single RuvC domain may comprise RuvC subdomains, for example, a RuvCI subdomain, a RuvCII subdomain, and a RuvCIII subdomain. The term “RuvC” domain may also be referred to as a “RuvC-like” domain. Various RuvC-like domains are known in the art and may be identified using online tools such as InterPro (https://www.ebi.ac.uk/interpro/). For example, a RuvC-like domain may be a domain which shares homology with a region of TnpB proteins of the IS605 and other related families of transposons.

[0102] In some instances, the length of the effector protein is at least 700 linked amino acid residues. In some instances, the length of the effector protein is less than 2000 linked amino acid residues. In some instances, the length of the effector protein is about 700 to about 800 linked amino acid residues. In some instances, the length of the effector protein is about 800 to about 900 linked amino acid residues. In some instances, the length of the effector protein is about 900 to about 1000 linked amino acid residues. In some instances, the length of the effector protein is about 1000 to about 1100 linked amino acid residues. In some instances, the length of the effector protein is about 1100 to about 1200 linked amino acid residues. In some instances, the length of the effector protein is about 1200 to about 1300 linked amino acid residues. In some instances, the length of the effector protein is about 1300 to about 1400 linked amino acid residues. In some instances, the length of the effector protein is about 1400 to about 1500 linked amino acid residues. In some instances, the length of the effector protein is about 1500 to about 1600 linked amino acid residues. In some instances, the length of the effector protein is about 1600 to about 1700 linked amino acid residues. In some instances, the length of the effector protein is about 1700 to about 1800 linked amino acid residues. In some instances, the length of the effector protein is about 1900 to about 2000 linked amino acid residues.

[0103] In some instances, the effector proteins function as an endonuclease that catalyzes cleavage within a target nucleic acid. In some instances, the effector proteins catalyze non-sequence-specific cleavage of a single stranded nucleic acid. In some instances, the effector proteins are activated to perform trans cleavage activity after binding of a guide nucleic acid with a target nucleic acid. This trans cleavage activity may also be referred to as “collateral” or “transcollateral” cleavage. Trans cleavage activity may be non-specific cleavage of nearby single-stranded nucleic acid by the activated effector protein, such as trans cleavage of detector nucleic acids with a detection moiety.

[0104] Effector proteins disclosed herein may catalyze cleavage at a specific position (e.g., at a specific nucleotide within a nucleic acid sequence) in a target nucleic acid. The target nucleic acid may be single stranded RNA (ssRNA), double stranded DNA (dsDNA) or single-stranded DNA (ssDNA). In some instances, the target nucleic acid is single-stranded DNA. In some instances, the target nucleic acid is single-stranded RNA. The effector proteins may provide cis cleavage activity, trans cleavage activity, nickase activity, or a combination thereof. Cis cleavage activity may comprise cleavage of a target nucleic acid that is hybridized to a guide nucleic acid, wherein cleavage occurs within or directly adjacent to the region of the target nucleic acid that is hybridized to the guide nucleic acid. Trans cleavage activity (also referred to as transcollateral cleavage) may comprise cleavage of ssDNA or ssRNA that is near, but not hybridized to the guide nucleic acid. Trans cleavage activity may be triggered by the hybridization of a guide nucleic acid to the target nucleic acid. Nickase activity may comprise a selective cleavage of one strand of a dsDNA.

[0105] Effector proteins of the present disclosure, dimers thereof, and multimeric complexes thereof may cleave or nick a target nucleic acid within or near a protospacer adjacent motif (PAM) sequence of the target nucleic acid. In general, the PAM is a nucleotide sequence found in a target nucleic acid that directs an effector protein to modify the target nucleic acid at a specific location. In some instances, cleavage occurs within 1, 2, 3, 4, 5, 6, 7, 8, 9 or 10 nucleosides of a 5′ or 3′ terminus of a PAM sequence. A target nucleic acid may comprise a PAM sequence adjacent to a sequence that is complementary to a guide nucleic acid spacer region.

### Engineered Proteins

[0106] In some embodiments, effector proteins described herein have been modified (also referred to as an engineered protein). In some instances, effector proteins disclosed herein are engineered proteins. Engineered proteins are not identical to a naturally-occurring protein.

[0107] For example, effector proteins described herein can be modified with the addition of one or more heterologous peptides or heterologous polypeptides. In some embodiments, heterologous peptide or heterologous polypeptide comprises a subcellular localization signal. In some embodiments, a subcellular localization signal can be a nuclear localization signal (NLS) for targeting the effector protein to the nucleus. In some embodiments, the subcellular localization signal is a nuclear export signal (NES), a sequence to keep a fusion protein retained in the cytoplasm, a mitochondrial localization signal for targeting to the mitochondria, a chloroplast localization signal for targeting to a chloroplast, an ER retention signal, and the like.

[0108] A subcellular localization signal may be located at or near the amino terminus (N-terminus) of the effector protein disclosed herein. Subcellular localization signal may be located at or near the carboxy terminus (C-terminus) of the effector protein is disclosed herein. In some embodiments, a vector encodes the effector proteins described herein, wherein the vector or vector systems disclosed herein comprises one or more subcellular localization signals, such as about or more than about 1, 2, 3, 4, 5, 6, 7, 8, 9, 10, or more subcellular localization signals. In some embodiments, an effector protein described herein comprises 1, 2, 3, 4, 5, 6, 7, 8, 9, 10, or more subcellular localization signals at or near the N-terminus, 1, 2, 3, 4, 5, 6, 7, 8, 9, 10, or more subcellular localization signals at or near the C-terminus, or a combination of these (e.g. one or more subcellular localization signals at the amino-terminus and one or more subcellular localization signals at the carboxy terminus). When more than one subcellular localization signal is present, each may be selected independently of the others, such that a single subcellular localization signal may be present in more than one copy and/or in combination with one or more other subcellular localization signals present in one or more copies. In some embodiments, a subcellular localization signal is considered near the N- or C-terminus when the nearest amino acid of the subcellular localization signal is within about 1, 2, 3, 4, 5, 10, 15, 20, 25, 30, 40, 50, or more amino acids along the polypeptide chain from the N- or C-terminus. In certain embodiments, a subcellular localization signal described herein comprises a subcellular localization signals sequence recited in Table. Accordingly, in some embodiments, effector proteins described herein comprise an amino acid sequence that at least about 65%, at least about 70%, at least about 75%, at least about 80%, at least about 85%, at least about 90%, at least about 95%, at least about 97%, or at least 98%, at least about 99%, or about 100% identical to any one of the sequences as selected from SEQ ID NOS: 1-1614 and 3195-3302 and further comprises one or more sequence set forth in Table. In some embodiments, an effector protein described herein is not modified with a subcellular localization signals so that the polypeptide is not targeted to the nucleus, which can be advantageous depending on the circumstance (e.g., when the target nucleic acid is an RNA that is present in the cytosol).

TABLE 3
SEQUENCES OF EFFECTOR PROTEIN MODIFICATIONS

| SEQ | | |
|---|---|---|
| ID | | |
| NO: | Description | Sequence* |
| 3407 | NLS | KR(K/R)R |
| 3408 | NLS | K(K/R)RK |
| 3409 | NLS | (P/R)XXKR(^DE)(K/R) |
| 3410 | NLS | KRX(W/F/Y)XXAF |
| 3411 | NLS | (R/P)XXKR(K/R)(^DE) |
| 3412 | NLS | LGKR(K/R)(W/F/Y) |
| 3413 | NLS | KRX₁₀₋₁₂K(K/R)(K/R) |
| 3414 | NLS | KRX₁₀₋₁₂K(K/R)X(K/R) |

*wherein X is any amino-acid; and ^D/E is any amino-acid except Asp or Glu

[0109] In some embodiments, effector proteins described herein can be modified with a protein tag. In some instances, the tag is referred to as purification tag or a fluorescent protein. A protein tag may comprise a peptide that is heterologous to the effector protein. The protein tag may be detectable for use in detection of the effector protein and/or purification of the effector protein. Accordingly, in some embodiments, compositions, systems and methods comprise a protein tag or use thereof. Non-limiting examples of protein tags include a fluorescent protein, a histidine tag, e.g., a 6×His tag; a hemagglutinin (HA) tag; a FLAG tag; a Myc tag; and maltose binding protein (MBP). In some instances, the protein tag is a portion of MBP that can be detected and/or purified. Non-limiting examples of fluorescent proteins include green fluorescent protein (GFP), yellow fluorescent protein (YFP), red fluorescent protein (RFP), cyan fluorescent protein (CFP), mCherry, and tdTomato.

[0110] In another example, effector proteins may be codon optimized. In some embodiments, effector proteins described herein are encoded by a codon optimized nucleic acid. In some embodiments, a nucleic acid sequence encoding an effector protein described herein, is codon optimized. This type of optimization can entail a mutation of an effector protein encoding nucleotide sequence to mimic the codon preferences of the intended host organism or cell while encoding the same polypeptide. Thus, the codons can be changed, but the encoded protein remains unchanged. For example, if the intended target cell was a human cell, a human codon-optimized effector protein-encoding nucleotide sequence could be used. As another non-limiting example, if the intended host cell were a mouse cell, then a mouse codon-optimized effector protein-encoding nucleotide sequence could be generated. As another non-limiting example, if the intended host cell were a eukaryotic cell, then a eukaryote codon-optimized effector protein nucleotide sequence could be generated. As another non-limiting example, if the intended host cell were a prokaryotic cell, then a prokaryote codon-optimized effector protein-encoding nucleotide sequence could be generated. Codon usage tables are readily available, for example, at the “Codon Usage Database” available at www.kazusa.or.jp/codon. Accordingly, in some embodiments, effector proteins described herein may be codon optimized for expression in a specific cell, for example, a bacterial cell, a plant cell, a eukaryotic cell, an animal cell, a mammalian cell, or a human cell. In some embodiments, the effector protein is codon optimized for a human cell.

[0111] It is understood that when describing coding sequences of polypeptides described herein, said coding sequences do not necessarily require a codon encoding a N-terminal Methionine (M) or a Valine (V) as described for the effector proteins described herein. One skilled in the art would understand that a start codon could be replaced or substituted with a start codon that encodes for an amino acid residue sufficient for initiating translation in a host cell. In some embodiments, when a modifying heterologous peptide, such as a fusion partner protein, protein tag or NLS, is located at the N terminus of the effector protein, a start codon for the heterologous peptide serves as a start codon for the effector protein as well. Thus, the natural start codon encoding an amino acid residue sufficient for initiating translation (e.g., Methionine (M) or a Valine (V)) of the effector protein may be removed or absent.

[0112] Engineered proteins may provide enhanced nuclease or nickase activity as compared to a naturally occurring nuclease or nickase. Engineered proteins may provide enhance nucleic acid binding activity, e.g., enhanced binding of a guide nucleic acid and/or target nucleic acid. By way of non-limiting example, some engineered proteins exhibit optimal activity at lower salinity and viscosity than the protoplasm of their bacterial cell of origin. Also, by way of non-limiting example, bacteria often comprise protoplasmic salt concentrations greater than 250 mM and room temperature intracellular viscosities above 2 centipoise, whereas engineered proteins exhibit optimal activity (e.g., cis-cleavage activity) at salt concentrations below 150 mM and viscosities below 1.5 centipoise. The present disclosure leverages these dependencies by providing engineered proteins in solutions optimized for their activity and stability.

[0113] Compositions and systems described herein may comprise an engineered effector protein in a solution comprising a room temperature viscosity of less than about 15 centipoise, less than about 12 centipoise, less than about 10 centipoise, less than about 8 centipoise, less than about 6 centipoise, less than about 5 centipoise, less than about 4 centipoise, less than about 3 centipoise, less than about 2 centipoise, or less than about 1.5 centipoise.

[0114] Compositions and systems may comprise an engineered effector protein in a solution comprising an ionic strength of less than about 500 mM, less than about 400 mM, less than about 300 mM, less than about 250 mM, less than about 200 mM, less than about 150 mM, less than about 100 mM, less than about 80 mM, less than about 60 mM, or less than about 50 mM. Compositions and systems may comprise an engineered effector protein and an assay excipient, which may stabilize a reagent or product, prevent aggregation or precipitation, or enhance or stabilize a detectable signal (e.g., a fluorescent signal). Examples of assay excipients include, but are not limited to, saccharides and saccharide derivatives (e.g., sodium carboxymethyl cellulose and cellulose acetate), detergents, glycols, polyols, esters, buffering agents, alginic acid, and organic solvents (e.g., DMSO).

[0115] In some instances, the naturally-occurring protein is a wildtype protein. An engineered protein may comprise a modified form of a naturally-occurring protein. The engineered protein may comprise one or more amino acid alterations (e.g., deletion, insertion, or substitution) relative to a naturally-occurring protein. In some instances, the engineered protein comprises or consists of an amino acid sequence that is at least 65%, at least 70%, at least 75%, at least 80%, at least 85%, at least 90%, at least 95%, at least 97%, at least 98%, or at least 99% identical to the amino acid sequence of a naturally-occurring protein. In some instances, the engineered protein comprises or consists of an amino acid sequence that is not greater than 90%, 91%, 92%, 93%, 94%, 95%, 96%, 97%, 98%, 99%, 99.5%, 99.9%, 99.95% or 99.99% identical to the amino acid sequence of a naturally-occurring protein.

[0116] In some instances, one or more amino acid alterations of the engineered protein relative to a naturally-occurring effector protein increase the nucleic acid-cleaving activity of the engineered protein relative to the naturally-occurring protein. The engineered protein may have at least about 10%, at least about 20%, at least about 30%, at least about 40%, at least about 50%, at least about 60%, at least about 70%, at least about 80%, at least about 90%, or at least about 100% greater nucleic acid-cleaving activity than the naturally-occurring protein. The engineered protein may have at least about 2 fold, at least about 3 fold, at least about 4 fold, at least about 5 fold, at least about 6 fold, at least about 7 fold, at least about 8 fold, at least about 9 fold, or at least about 10 fold of the nucleic acid-cleaving activity as compared to the naturally-occurring protein. The engineered protein may not have more than about 100-fold nucleic acid-cleaving activity as compared to the naturally-occurring protein.

[0117] In some instances, one or more amino acid alterations of the engineered protein relative to a naturally-occurring effector protein reduce the nucleic acid-cleaving activity of the engineered protein relative to the naturally-occurring protein. The engineered protein may have less than 90%, less than 80%, less than 70%, less than 60%, less than 50%, less than 40%, less than 30%, less than 20%, less than 10%, less than 5%, or less than 1% of the nucleic acid-cleaving activity as compared to the naturally-occurring protein. In some instances, engineered proteins have no substantial nucleic acid-cleaving activity. Engineered proteins may be enzymatically inactive or “dead,” that is it may bind to a nucleic acid but not cleave it. An enzymatically inactive protein may comprise an enzymatically inactive domain (e.g. inactive nuclease domain). An enzymatically inactive protein may associate with a guide nucleic acid to activate or repress transcription of a target nucleic acid sequence. In some instances, the enzymatically inactive protein is fused to a second protein.

### Fusion Proteins

[0118] In some instances, compositions of the instant disclosure comprise a fusion protein or uses thereof. In general, a fusion protein comprises an effector protein and a fusion partner protein that is heterologous to the effector protein. A fusion protein may also be referred to as a fusion effector protein or a fusion polypeptide. In general, the fusion partner protein is not an effector protein. In some embodiments, a fusion partner protein, also referred to simply as a fusion partner, comprises a polypeptide or peptide that is fused or linked to an effector protein. The fusion partner generally imparts some function to the fusion protein that is not provided by the effector protein. The fusion partner may provide a detectable signal. The fusion partner may modify a target nucleic acid. In some embodiments, the fusion partner makes a chemical modification to one or more nucleotides of a target nucleic acid. By way of non-limiting example, a fusion partner may modify a nucleobase of the target nucleic acid to an alternative nucleobase. The fusion partner may be capable of modulating expression of a target nucleic acid. The fusion partner may inhibit, reduce, activate or increase expression of a target nucleic acid. The fusion partner may interact with additional proteins to make modifications to a target nucleic acid.

[0119] In some instances, the fusion partner protein may be heterologous to the effector protein, and thus, referred to herein as a “heterologous protein.” A protein that is heterologous to the effector protein is a protein that is not covalently linked via an amide bond to the effector protein in nature. A heterologous protein may not be encoded by a species that encodes the effector protein. In some instances, the heterologous protein exhibits an activity (e.g., enzymatic activity) that it exhibits when it is fused to the effector protein. In some instances, the heterologous protein exhibits increased or reduced activity (e.g., enzymatic activity) when it is fused to the effector protein, relative to when it is not fused to the effector protein. In some instances, the heterologous protein exhibits an activity (e.g., enzymatic activity) that it does not exhibit when it is fused to the effector protein. In some instances, the effector protein and the fusion partner protein are linked through an amide bond. In some instances, the C-terminus of the effector protein is linked to the N terminus of the fusion partner protein. In some instances, the N-terminus of the effector protein is linked to the C-terminus of the fusion partner protein. A fusion partner protein is also simply referred to herein as a fusion partner. In some instances, the effector protein comprises an amino acid sequence selected from SEQ ID NOS: 1-1614 and 3195-3302. In some instances, the effector protein comprises an amino acid sequence that is at least 50%, at least 55%, at least 60%, at least 65%, at least 70%, at least 75%, at least 80%, at least 85%, at least 90%, at least 95%, at least 97%, at least 98%, at least 99%, or 100% identical to a sequence selected from SEQ ID NOS: 1-1614 and 3195-3302. In some instances, the amino acid sequence of the effector protein is at least 50%, at least 55%, at least 60%, at least 65%, at least 70%, at least 75%, at least 80%, at least 85%, at least 90%, at least 95%, at least 97%, at least 98%, at least 99%, or 100% identical to a sequence selected from SEQ ID NOS: 1-1614 and 3195-3302.

[0120] In some instances, a fusion partner provides enzymatic activity that modifies a protein (e.g., a histone) associated with a target nucleic acid. Such enzymatic activities include, but are not limited to, methyltransferase activity, demethylase activity, acetyltransferase activity, deacetylase activity, kinase activity, phosphatase activity, ubiquitin ligase activity, deubiquitinating activity, adenylation activity, deadenylation activity, SUMOylating activity, deSUMOylating activity, ribosylation activity, de-ribosylation activity, myristoylation activity, and demyristoylation activity.

[0121] In some instances, fusion partners provide enzymatic activity that modifies a target nucleic acid. Such enzymatic activities include, but are not limited to, nuclease activity, methyltransferase activity, demethylase activity, DNA repair activity, DNA damage activity, deamination activity, dismutase activity, alkylation activity, depurination activity, oxidation activity, pyrimidine dimer forming activity, integrase activity, transposase activity, recombinase activity, polymerase activity, ligase activity, helicase activity, photolyase activity, and glycosylase activity. The target nucleic acid may comprise or consist of a ssRNA, dsRNA, ssDNA, or a dsDNA. In some instances, the fusion partner is a reverse transcriptase. In some instances, the fusion partner is a base editor. In general, a base editor comprises a deaminase that when fused with an effector protein changes a nucleobase to a different nucleobase, e.g., cytosine to thymine or guanine to adenine. In some instances, the base editor comprises a deaminase.

[0122] In some instances, the fusion partner modulates transcription (e.g., inhibits transcription, increases transcription) of a target nucleic acid. In some instances, the fusion partner is a protein (or a domain from a protein) that increases transcription, also referred to as a transcription activator. Transcriptional activators may promote transcription via recruitment of transcription activator proteins, modification of target DNA such as demethylation, recruitment of a DNA modifier, modulation of histones associated with target DNA, recruitment of a histone modifier such as those that modify acetylation and/or methylation of histones, or a combination thereof. Non-limiting examples of fusion partners that promote or increase transcription include, but are not limited to: transcriptional activators such as VP16, VP64, VP48, VP160, p65 subdomain (e.g., from NFkB), and activation domain of EDLL and/or TAL activation domain (e.g., for activity in plants); histone lysine methyltransferases such as SET1A, SET1B, MLL1 to 5, ASH1, SYMD2, NSD1; histone lysine demethylases such as JHDM2a/b, UTX, JMJD3; histone acetyltransferases such as GCN5, PCAF, CBP, p300, TAF1, TIP60/PLIP, MOZ/MYST3, MORF/MYST4, SRC1, ACTR, P160, CLOCK; and DNA demethylases such as Ten-Eleven Translocation (TET) dioxygenase 1 (TET1CD), TET1, DME, DML1, DML2, and ROS1; and functional domains thereof.

[0123] In some instances, the fusion partner is a protein (or a domain from a protein) that inhibits transcription, also referred to as a transcriptional repressor. Transcriptional repressors may inhibit transcription via recruitment of transcription inhibitor proteins, modification of target DNA such as methylation, recruitment of a DNA modifier, modulation of histones associated with target DNA, recruitment of a histone modifier such as those that modify acetylation and/or methylation of histones, or a combination thereof. Non-limiting examples of fusion partners that decrease or inhibit transcription include, but are not limited to: transcriptional repressors such as the Krüppel associated box (KRAB or SKD); KOX1 repression domain; the Mad mSIN3 interaction domain (SID); the ERF repressor domain (ERD), the SRDX repression domain (e.g., for repression in plants); histone lysine methyltransferases such as Pr-SET7/8, SUV4-20H1, RIZ1, and the like; histone lysine demethylases such as JMJD2A/JHDM3A, JMJD2B, JMJD2C/GASC1, JMJD2D, JARID1A/RBP2, JARID1B/PLU-1, JARID1C/SMCX, JARID1D/SMCY; histone lysine deacetylases such as HDAC1, HDAC2, HDAC3, HDAC8, HDAC4, HDAC5, HDAC7, HDAC9, SIRT1, SIRT2, HDAC11; DNA methylases such as HhaI DNA m5c-methyltransferase (M.HhaI), DNA methyltransferase 1 (DNMT1), DNA methyltransferase 3a (DNMT3a), DNA methyltransferase 3b (DNMT3b), METI, DRM3 (plants), ZMET2, CMT1, CMT2 (plants); and periphery recruitment elements such as Lamin A, and Lamin B; and functional domains thereof.

[0124] In some instances, fusion proteins are targeted by a guide nucleic acid to a specific location in the target nucleic acid and exert locus-specific regulation such as blocking RNA polymerase binding to a promoter (which selectively inhibits transcription activator function), and/or modifying the local chromatin status (e.g., when a fusion sequence is used that modifies the target nucleic acid or modifies a protein associated with the target nucleic acid). In some instances, the modifications are transient (e.g., transcription repression or activation). In some instances, the modifications are inheritable. For instance, epigenetic modifications made to a target nucleic acid, or to proteins associated with the target nucleic acid, e.g., nucleosomal histones, in a cell, are observed in cells produced by proliferation of the cell.

[0125] In some instances, fusion proteins bind and/or cleave ssRNA. Non-limiting examples of fusion partners for targeting ssRNA include, but are not limited to, splicing factors (e.g., RS domains); protein translation components (e.g., translation initiation, elongation, and/or release factors; e.g., eIF4G); RNA methylases; RNA editing enzymes (e.g., RNA deaminases, e.g., adenosine deaminase acting on RNA (ADAR), including A to I and/or C to U editing enzymes); helicases; and RNA-binding proteins. It is understood that a fusion protein may include the entire protein or in some instances may include a fragment of the protein (e.g., a functional domain). In some instances, the functional domain interacts with or binds ssRNA, including intramolecular and/or intermolecular secondary structures thereof, e.g., hairpins, stem-loops, etc.). The functional domain may interact transiently or irreversibly, directly or indirectly. Fusion proteins may comprise a protein or domain thereof selected from: endonucleases (e.g., RNase III, the CRR22 DYW domain, Dicer, and PIN (PilT N-terminus); SMG5 and SMG6; domains responsible for stimulating RNA cleavage (e.g., CPSF, CstF, CFIm and CFIIm); exonucleases such as XRN-1 or Exonuclease T; deadenylases such as HNT3; protein domains responsible for nonsense mediated RNA decay (e.g., UPF1, UPF2, UPF3, UPF3b, RNP S1, Y14, DEK, REF2, and SRm160); protein domains responsible for stabilizing RNA (e.g., PABP); proteins and protein domains responsible for repressing translation (e.g., Ago2 and Ago4); proteins and protein domains responsible for stimulating translation (e.g., Staufen); proteins and protein domains responsible for (e.g., capable of) modulating translation (e.g., translation factors such as initiation factors, elongation factors, release factors, etc., e.g., eIF4G); proteins and protein domains responsible for polyadenylation of RNA (e.g., PAP1, GLD-2, and Star-PAP); proteins and protein domains responsible for polyuridinylation of RNA (e.g., CI D1 and terminal uridylate transferase); proteins and protein domains responsible for RNA localization (e.g., from IMP1, ZBP1, She2p, She3p, and Bicaudal-D); proteins and protein domains responsible for nuclear retention of RNA (e.g., Rrp6); proteins and protein domains responsible for nuclear export of RNA (e.g., TAP, NXF1, THO, TREX, REF, and Aly); proteins and protein domains responsible for repression of RNA splicing (e.g., PTB, Sam68, and hnRNP A1); proteins and protein domains responsible for stimulation of RNA splicing (e.g., Serine/Arginine-rich (SR) domains); proteins and protein domains responsible for reducing the efficiency of transcription (e.g., FUS (TLS)); and proteins and protein domains responsible for stimulating transcription (e.g., CDK7 and HIV Tat). Alternatively, the effector domain may be a domain of a protein selected from the group comprising endonucleases; proteins and protein domains capable of stimulating RNA cleavage; exonucleases; deadenylases; proteins and protein domains having nonsense mediated RNA decay activity; proteins and protein domains capable of stabilizing RNA; proteins and protein domains capable of repressing translation; proteins and protein domains capable of stimulating translation; proteins and protein domains capable of modulating translation (e.g., translation factors such as initiation factors, elongation factors, release factors, etc., e.g., eIF4G); proteins and protein domains capable of polyadenylation of RNA; proteins and protein domains capable of polyuridinylation of RNA; proteins and protein domains having RNA localization activity; proteins and protein domains capable of nuclear retention of RNA; proteins and protein domains having RNA nuclear export activity; proteins and protein domains capable of repression of RNA splicing; proteins and protein domains capable of stimulation of RNA splicing; proteins and protein domains capable of reducing the efficiency of transcription; and proteins and protein domains capable of stimulating transcription. Another suitable fusion partner is a PUF RNA-binding domain, which is described in more detail in WO2012068627, which is hereby incorporated by reference in its entirety.

[0126] In some instances, the fusion partner comprises an RNA splicing factor. The RNA splicing factor may be used (in whole or as fragments thereof) for modular organization, with separate sequence-specific RNA binding modules and splicing effector domains. Non-limiting examples of RNA splicing factors include members of the Serine/Arginine-rich (SR) protein family contain N-terminal RNA recognition motifs (RRMs) that bind to exonic splicing enhancers (ESEs) in pre-mRNAs and C-terminal RS domains that promote exon inclusion. As another example, the hnRNP protein hnRNP A1 binds to exonic splicing silencers (ESSs) through its RRM domains and inhibits exon inclusion through a C-terminal Glycine-rich domain. Some splicing factors may regulate alternative use of splice site (ss) by binding to regulatory sequences between the two alternative sites. For example, ASF/SF2 may recognize ESEs and promote the use of intron proximal sites, whereas hnRNP A1 may bind to ESSs and shift splicing towards the use of intron distal sites. One application for such factors is to generate ESFs that modulate alternative splicing of endogenous genes, particularly disease associated genes. For example, Bcl-x pre-mRNA produces two splicing isoforms with two alternative 5′ splice sites to encode proteins of opposite functions. The long splicing isoform Bcl-xL is a potent apoptosis inhibitor expressed in long-lived postmitotic cells and is up-regulated in many cancer cells, protecting cells against apoptotic signals. The short isoform Bcl-xS is a pro-apoptotic isoform and expressed at high levels in cells with a high turnover rate (e.g., developing lymphocytes). The ratio of the two Bcl-x splicing isoforms is regulated by multiple c\acute{ω}-elements that are located in either the core exon region or the exon extension region (i.e., between the two alternative 5′ splice sites). For more examples, see WO2010075303, which is hereby incorporated by reference in its entirety.

[0127] In some embodiments, an effector protein is a fusion protein, wherein the fusion protein comprises an effector protein (e.g., a Cas) and a fusion partner protein. In some embodiments, the effector protein comprises an amino acid sequence that is at least 70%, at least 75%, at least 80%, at least 85%, at least 90%, at least 95%, or 100% identical to any one of the sequences selected from SEQ ID NOS: 1-1614 and 3195-3302. In some embodiments, the amino acid of the effector protein is at least 70%, at least 75%, at least 80%, at least 85%, at least 90%, at least 95%, or 100% identical to any one of the sequences selected from SEQ ID NOS: 1-1614 and 3195-3302. Unless otherwise indicated, reference to effector proteins throughout the present disclosure include fusion proteins thereof.

[0128] In some embodiments, the fusion partner inhibits the formation of a multimeric complex of the effector protein. In some embodiments, the fusion partner promotes the formation of a multimeric complex of the effector protein. By way of non-limiting example, the fusion protein may comprise a Cas, and a fusion partner comprising a Calcineurin A tag, wherein the fusion protein dimerizes in the presence of Tacrolimus (FK506). Also by way of non-limiting example, the fusion protein may comprise a Cas and a SpyTag configured to dimerize or associate with another effector protein in a multimeric complex.

[0129] In some embodiments, fusion proteins and/or fusion partners comprise a prime editing enzyme. Such a fusion may be referred to as a prime editor. In some embodiments, a prime editor is capable of catalyzing the modification (insertion, deletion, or base-to-base conversion) of a target nucleic acid. A prime editing enzyme capable of catalyzing such a reaction is a reverse transcriptase. A non-limiting example of a reverse transcriptase is an M-MLV RT enzyme and variants thereof having polymerase activity. In some embodiments, the M-MLV RT enzyme comprises at least one mutation selected from D200N, L603W, T330P, T306K, and W313F relative to wildtype M-MLV RT enzyme. In general, a prime editing enzyme requires a prime editing guide RNA (pegRNA) to catalyze the modification. Such a pegRNA can be capable of identifying the nucleotide or nucleotide sequence in the target nucleic acid to be edited and encoding the new genetic information that replaces the targeted nucleotide or nucleotide sequence in the nucleic acid. In some embodiments, the target nucleic acid is a dsDNA molecule. In some embodiments, the pegRNA comprises a guide RNA comprising a first region that is bound by the effector protein, and a second region comprising a spacer sequence that is complementary to a target sequence of the target dsDNA molecule; a template RNA comprising a primer binding sequence that hybridizes to a primer sequence of the target dsDNA molecule that is formed when target nucleic acid is cleaved, and a template sequence that is complementary to at least a portion of the target sequence of the target dsDNA molecule with the exception of at least one nucleotide. In some embodiments, the spacer sequence is complementary to the target sequence on the target strand of the dsDNA molecule. In some embodiments, the spacer sequence is complementary to the target sequence on the non-target strand of the dsDNA molecule. In some instances, the primer binding sequence hybridizes to a primer sequence on the non-target strand of the target dsDNA molecule. In some instances, the primer binding sequence hybridizes to a primer sequence on the target strand of the target dsDNA molecule. In some instances, the target strand is cleaved. In some instances, the non-target strand is cleaved.

### Modifying Target Nucleic Acids

[0130] Disclosed herein are compositions and methods for modifying a target nucleic acid. The target nucleic acid may be a gene or a portion thereof. Methods and compositions may modify a coding portion of a gene, a non-coding portion of a gene, or a combination thereof. Modifying at least one gene using the compositions and methods described herein may reduce or increase expression of one or more genes. In some embodiments, compositions and methods reduce expression of one or more genes by at least 10%, at least 20%, at least 30%, at least 40%, at least 50%, at least 60%, at least 70%, at least 80%, at least 90%, or at least 95%. In some embodiments, compositions and methods remove all expression of a gene, also referred to as genetic knock out. In some embodiments, compositions and methods increase expression of one or more genes by at least 10%, at least 20%, at least 30%, at least 40%, at least 50%, at least 60%, at least 70%, at least 80%, at least 90%, or at least 100%.

### Base Editors.

[0131] In some embodiments, fusion partners modify a nucleobase of a target nucleic acid. Fusion proteins comprising such fusion partners and an effector protein may be referred to as base editors. When a base editor is described herein, it can refer to a fusion protein comprising a base editing enzyme fused to an effector protein. The base editor is functional when the effector protein is coupled to a guide nucleic acid. The guide nucleic acid imparts sequence specific activity to the base editor. By way of non-limiting example, the effector protein may comprise a catalytically inactive effector protein. Also, by way of non-limiting example, the base editing enzyme may comprise deaminase activity. Additional base editors are described herein.

[0132] In some embodiments, base editors modify a sequence of a target nucleic acid. In some embodiments, base editors provide a nucleobase change in a DNA molecule. In some embodiments, the nucleobase change in the DNA molecule is selected from: an adenine (A) to guanine (G); cytosine (C) to thymine (T); and cytosine (C) to guanine (G). In some embodiments, base editors provide a nucleobase change in an RNA molecule. In some embodiments, the nucleobase change in the RNA molecule is selected from: adenine (A) to guanine (G); uracil (U) to cytosine (C); cytosine (C) to guanine (G); and guanine (G) to adenine (A). In some embodiments, the fusion partner is a deaminase, e.g., ADAR1/2.

[0133] Some base editors modify a nucleobase of on a single strand of DNA. In some embodiments, base editors modify a nucleobase on both strands of dsDNA. In some embodiments, upon binding to its target locus in DNA, base pairing between the guide nucleic acid and target DNA strand leads to displacement of a small segment of single-stranded DNA in an “R-loop”. In some embodiments, DNA bases within the R-loop are modified by the deaminase enzyme. In some embodiments, DNA base editors for improved efficiency in eukaryotic cells comprise a catalytically inactive effector protein that may generate a nick in the non-edited DNA strand, inducing repair of the non-edited strand using the edited strand as a template.

[0134] In some embodiments, a catalytically inactive effector protein can comprise an effector protein that is modified relative to a naturally-occurring nuclease to have a reduced or eliminated catalytic activity relative to that of the naturally-occurring nuclease, but retains its ability to interact with a guide nucleic acid. The catalytic activity that is reduced or eliminated is often a nuclease activity. The naturally-occurring nuclease may be a wildtype protein. In some embodiments, the catalytically inactive effector protein is referred to as a catalytically inactive variant of a nuclease, e.g., a Cas nuclease.

[0135] Some base editors modify a nucleobase of an RNA. In some embodiments, RNA base editors comprise an adenosine deaminase. In some embodiments, ADAR proteins bind to RNAs and alter their sequence by changing an adenosine into an inosine. In some embodiments, RNA base editors comprise an effector protein that is activated by or binds RNA.

[0136] In some embodiments, base editors are used to treat a subject having or a subject suspected of having a disease related to a gene of interest. In some embodiments, base editors are useful for treating a disease or a disorder caused by a point mutation in a gene of interest. In some embodiments, compositions comprise a base editor and a guide nucleic acid, wherein the guide nucleic acid directs the base editor to a sequence in a target gene. The target gene may be associated with a disease. In some embodiments, the guide nucleic acid directs that base editor to or near a mutation in the sequence of a target gene. The mutation may be the deletion of one more nucleotides. The mutation may be the addition of one or more nucleotides. The mutation may be the substitution of one or more nucleotides. The mutation may be the insertion, deletion or substitution of a single nucleotide, also referred to as a point mutation. The point mutation may be a SNP. The mutation may be associated with a disease. In some embodiments, the guide nucleic acid directs the base editor to bind a target sequence within the target nucleic acid that is within 0, 1, 2, 3, 4, 5, 6, 7, 8, 9, 10, 11, 12, 13, 14, 15, 16, 17, 18, 19, or 20 nucleotides of the mutation. In some embodiments, the guide nucleic acid comprises a sequence that is identical, complementary or reverse complementary to a target sequence of a target nucleic acid that comprises the mutation. In some embodiments, the guide nucleic acid comprises a sequence that is identical, complementary or reverse complementary to a target sequence of a target nucleic acid that is within 1, 2, 3, 4, 5, 6, 7, 8, 9, 10, 11, 12, 13, 14, 15, 16, 17, 18, 19, or 20 nucleotides of the mutation.

[0137] Some base editors modify a nucleobase of an RNA. In some embodiments, RNA base editors comprise an adenosine deaminase. In some embodiments, ADAR proteins bind to RNAs and alter their sequence by changing an adenosine into an inosine. In some embodiments, RNA base editors comprise an effector protein that is activated by or binds RNA.

[0138] In some embodiments, base editors are used to treat a subject having or a subject suspected of having a disease related to a gene of interest. In some embodiments, base editors are useful for treating a disease or a disorder caused by a point mutation in a gene of interest. In some embodiments, compositions comprise a base editor and a guide nucleic acid, wherein the guide nucleic acid directs the base editor to a sequence in a target gene.

[0139] In some embodiments, fusion partners comprise a base editing enzyme. When a base editing enzyme is described herein, it can refer to a protein, polypeptide, or fragment thereof that is capable of catalyzing the chemical modification of a nucleobase of a deoxyribonucleotide or a ribonucleotide. Such a base editing enzyme, for example, is capable of catalyzing a reaction that modifies a nucleobase that is present in a nucleic acid molecule, such as DNA or RNA (single stranded or double stranded). Non-limiting examples of the type of modification that a base editing enzyme is capable of catalyzing includes converting an existing nucleobase to a different nucleobase, such as converting a cytosine to a guanine or thymine or converting an adenine to a guanine, hydrolytic deamination of an adenine or adenosine, or methylation of cytosine (e.g., CpG, CpA, CpT or CpC). A base editing enzyme itself may or may not bind to the nucleic acid molecule containing the nucleobase.

[0140] In some embodiments, the base editing enzyme modifies the nucleobase of a deoxyribonucleotide. In some embodiments, the base editing enzyme modifies the nucleobase of a ribonucleotide. A base editing enzyme that converts a cytosine to a guanine or thymine may be referred to as a cytosine base editing enzyme. A base editing enzyme that converts an adenine to a to a guanine may be referred to as an adenine base editing enzyme. In some embodiments, the base editing enzyme comprises a deaminase enzyme. In some embodiments, the deaminase functions as a monomer. In some embodiments, the deaminase functions as heterodimer with an additional protein. In some embodiments, base editors comprise a DNA glycosylase inhibitor. In some embodiments, base editors comprise a uracil glycosylase inhibitor (UGI) or uracil N-glycosylase (UNG). In some embodiments, base editors do not comprise a UGI. In some embodiments, base editors do not comprise a UNG. In some embodiments, base editors do not comprise a functional fragment of a UGI. A functional fragment of a UGI is a fragment of a UGI that is capable of excising a uracil residue from DNA by cleaving an N-glycosydic bond. In some embodiments, a functional fragment comprises a fragment of a protein that retains some function relative to the entire protein. Non-limiting examples of functions are nucleic acid binding, protein binding, nuclease activity, nickase activity, deaminase activity, demethylase activity, or acetylation activity.

[0141] In some embodiments, a base editing enzyme can comprise a protein, polypeptide or fragment thereof that is capable of catalyzing the chemical modification of a nucleobase of a deoxyribonucleotide or a ribonucleotide. Such a base editing enzyme, for example, is capable of catalyzing a reaction that modifies a nucleobase that is present in a nucleic acid molecule, such as DNA or RNA (single stranded or double stranded). Non-limiting examples of the type of modification that a base editing enzyme is capable of catalyzing includes converting an existing nucleobase to a different nucleobase, such as converting a cytosine to a guanine or thymine or converting an adenine to a guanine, hydrolytic deamination of an adenine or adenosine, or methylation of cytosine (e.g., CpG, CpA, CpT or CpC). A base editing enzyme itself may or may not bind to the nucleic acid molecule containing the nucleobase. In some embodiments, a base editor can be a fusion protein comprising a base editing enzyme fused to an effector protein. The base editor is functional when the effector protein is coupled to a guide nucleic acid. The guide nucleic acid imparts sequence specific activity to the base editor. By way of non-limiting example, the effector protein may comprise a catalytically inactive effector protein. Also, by way of non-limiting example, the base editing enzyme may comprise deaminase activity. Additional base editors are described herein.

[0142] In some embodiments, the base editor is a cytidine deaminase base editor generated by ancestral sequence reconstruction as described in WO2019226953, which is hereby incorporated by reference in its entirety.

[0143] Exemplary deaminase domains are described WO 2018027078 and WO2017070632, and each are hereby incorporated in its entirety by reference. Also, additional exemplary deaminase domains are described in Komor et al., Nature, 533, 420-424 (2016); Gaudelli et al., Nature, 551, 464-471 (2017); Komor et al., Science Advances, 3:eaao4774 (2017), and Rees et al., Nat Rev Genet. 2018 December; 19(12):770-788. doi: 10.1038/s41576-018-0059-1, which are hereby incorporated by reference in their entirety.

[0144] In some embodiments, the base editor is a cytosine base editor (CBE). In general, a CBE comprises a cytosine base editing enzyme and a catalytically inactive effector protein. In some embodiments, the catalytically inactive effector protein is a catalytically inactive variant of an effector protein described herein. The CBE may convert a cytosine to a thymine. In some embodiments, the base editor is an adenine base editor (ABE). In general, an ABE comprises an adenine base editing enzyme and a catalytically inactive effector protein. In some embodiments, the catalytically inactive effector protein is a catalytically inactive variant of an effector protein described herein. The ABE generally converts an adenine to a guanine. In some embodiments, the base editor is a cytosine to guanine base editor (CGBE). In general, a CGBE converts a cytosine to a guanine.

[0145] In some embodiments, the base editor is a CBE. In some embodiments, the cytosine base editing enzyme is a cytidine deaminase. In some embodiments, the cytosine deaminase is an APOBEC1 cytosine deaminase, which accept ssDNA as a substrate but is incapable of cleaving dsDNA, fused to a catalytically inactive effector protein. In some embodiments, when bound to its cognate DNA, the catalytically inactive effector protein performs local denaturation of the DNA duplex to generate an R-loop in which the DNA strand not paired with the guide nucleic acid exists as a disordered single-stranded bubble. In some embodiments, the catalytically inactive effector protein generated ssDNA R-loop enables the CBE to perform efficient and localized cytosine deamination in vitro. In some examples, deamination activity is exhibited in a window of about 4 to about 10 base pairs. In some embodiments, fusion to the catalytically inactive effector protein presents the target site to APOBEC1 in high effective molarity, enabling the CBE to deaminate cytosines located in a variety of different sequence motifs, with differing efficacies. In some embodiments, the CBE is capable of mediating RNA-programmed deamination of target cytosines in vitro. In some embodiments, the CBE is capable of mediating RNA-programmed deamination of target cytosines in vivo. In some embodiments, the cytosine base editing enzyme is a cytosine base editing enzyme described by Koblan et al. (2018) Nature Biotechnology 36:848-846; Komor et al. (2016) Nature 533:420-424; Koblan et al. (2021) “Efficient C⋅G-to-G⋅C base editors developed using CRISPRi screens, target-library analysis, and machine learning,” Nature Biotechnology; Kurt et al. (2021) Nature Biotechnology 39:41-46; Zhao et al. (2021) Nature Biotechnology 39:35-40; and Chen et al. (2021) Nature Communications 12:1384, all incorporated herein by reference.

[0146] In some embodiments, CBEs comprise an uracil glycosylase inhibitor (UGI) or uracil N-glycosylase (UNG). In some embodiments, base excision repair (BER) of U⋅G in DNA is initiated by a UNG, which recognizes the U⋅G mismatch and cleaves the glyosidic bond between uracil and the deoxyribose backbone of DNA. In some embodiments, BER results in the reversion of the U⋅G intermediate created by the first CBE back to a C⋅G base pair. In some embodiments, UNG may be inhibited by fusion of uracil DNA glycosylase inhibitor (UGI), in some embodiments, a small protein from bacteriophage PBS, to the C-terminus of the CBE. In some embodiments, UGI is a DNA mimic that potently inhibits both human and bacterial UNG. In some embodiments, a UGI inhibitor is any protein or polypeptide that inhibits UNG. In some embodiments, the CBE mediates efficient base editing in bacterial cells and moderately efficient editing in mammalian cells, enabling conversion of a C⋅G base pair to a T⋅A base pair through a U⋅G intermediate. In some embodiments, the CBE is modified to increase base editing efficiency while editing more than one strand of DNA.

[0147] In some embodiments, the CBE nicks the non-edited DNA strand. In some embodiments, the non-edited DNA strand nicked by the CBE biases cellular repair of the U⋅G mismatch to favor a U⋅A outcome, elevating base editing efficiency. In some embodiments, the APOBEC1-nickase-UGI fusion efficiently edits in mammalian cells, while minimizing frequency of non-target indels.

[0148] In some embodiments, the cytidine deaminase is selected from APOBEC1, APOBEC2, APOBEC3C, APOBEC3D, APOBEC3F, APOBEC3G, APOBEC3H, APOBEC4, APOBEC3A, BE1 (APOBEC1-XTEN-dCas9), BE2 (APOBEC1-XTEN-dCas9-UGI), BE3 (APOBEC1-XTEN-dCas9(A840H)-UGI), BE3-Gam, saBE3, saBE4-Gam, BE4, BE4-Gam, saBE4, or saBE4-Gam as described in WO2021163587, WO2021087246, WO2021062227, and WO2020123887, which are incorporated herein by reference in their entirety.

[0149] In some embodiments, the fusion protein further comprises a non-protein uracil-DNA glcosylase inhibitor (npUGI). In some embodiments, the npUGI is selected from a group of small molecule inhibitors of uracil-DNA glycosylase (UDG), or a nucleic acid inhibitor of UDG. In some embodiments, the non-protein uracil-DNA glcosylase inhibitor (npUGI) is a small molecule derived from uracil. Examples of small molecule non-protein uracil-DNA glcosylase inhibitors, fusion proteins, and Cas-CRISPR systems comprising base editing activity are described in WO2021087246, which is incorporated by reference in its entirety,

[0150] In some embodiments, the fusion partner is a deaminase, e.g., ADAR1/2, ADAR-2, or AID. In some embodiments, the base editor is an ABE. In some embodiments, the adenine base editing enzyme of the ABE is an adenosine deaminase. In some embodiments, the adenine base editing enzyme is selected from ABE8e, ABE8.20m, APOBEC3A, Anc APOBEC (a.k.a. AncBE4Max), and BtAPOBEC2. In some embodiments, the ABE base editor is an ABE7 base editor. In some embodiments, the deaminase or enzyme with deaminase activity is selected from ABE8.1m, ABE8.2m, ABE8.3m, ABE8.4m, ABE8.5m, ABE8.6m, ABE8.7m, ABE8.8m, ABE8.9m, ABE8.10m, ABE8.11m, ABE8.12m, ABE8.13m, ABE8.14m, ABE8.15m, ABE8.16m, ABE8.17m, ABE8.18m, ABE8.19m, ABE8.20m, ABE8.21m, ABE8.22m, ABE8.23m, ABE8.24m, ABE8.1d, ABE8.2d, ABE8.3d, ABE8.4d, ABE8.5d, ABE8.6d, ABE8.7d, ABE8.8d, ABE8.9d, ABE8.10d, ABE8.11d, ABE8.12d, ABE8.13d, ABE8.14d, ABE8.15d, ABE8.16d, ABE8.17d, ABE8.18d, ABE8.19d, ABE8.20d, ABE8.21d, ABE8.22d, ABE8.23d, or ABE8.24d. In some embodiments, the adenine base editing enzyme is ABE8.1d. In some embodiments, the adenosine base editor is ABE9. Exemplary deaminases are described in US20210198330, WO2021041945, WO2021050571A1, and WO2020123887, all of which are incorporated herein by reference in their entirety. In some embodiments, the adenine base editing enzyme is an adenine base editing enzyme described in Chu et al., (2021) The CRISPR Journal 4:2:169-177, incorporated herein by reference. In some embodiments, the adenine deaminase is an adenine deaminase described by Koblan et al. (2018) Nature Biotechnology 36:848-846, incorporated herein by reference. In some embodiments, the adenine base editing enzyme is an adenine base editing enzyme described by Tran et al. (2020) Nature Communications 11:4871. Additional examples of deaminase domains are also described in WO2018027078 and WO2017070632, which are hereby incorporated by reference in their entirety.

[0151] In some embodiments, an ABE converts an A⋅T base pair to a G⋅C base pair. In some embodiments, the ABE converts a target A⋅T base pair to G⋅C in vivo. In some embodiments, the ABE converts a target A⋅T base pair to G⋅C in vitro. In some embodiments, ABEs provided herein reverse spontaneous cytosine deamination, which has been linked to pathogenic point mutations. In some embodiments, ABEs provided herein enable correction of pathogenic SNPs (˜47% of disease-associated point mutations). In some embodiments, the adenine comprises exocyclic amine that has been deaminated (e.g., resulting in altering its base pairing preferences). In some embodiments, deamination of adenosine yields inosine. In some embodiments, inosine exhibits the base-pairing preference of guanine in the context of a polymerase active site, although inosine in the third position of a tRNA anticodon is capable of pairing with A, U, or C in mRNA during translation. In some embodiments, an ABE comprises an engineered adenosine deaminase enzyme capable of acting on ssDNA.

[0152] In some embodiments, a base editor comprises an adenosine deaminase variant that differs from a naturally occurring deaminase. Relative to the naturally occurring deaminase, the adenosine deaminase variant may comprise a V82S alteration, a T166R alteration, or a combination thereof. In some embodiments, the adenosine deaminase variant comprises at least one of the following alterations relative to a naturally occurring adenosine deaminase: Y147T, Y147R, Q154S, Y123H, and Q154R., which are incorporated herein by reference in their entirety.

[0153] In some embodiments, a base editor comprises a deaminase dimer. In some embodiments, a base editor is a deaminase dimer further comprising a base editing enzyme and an adenine deaminase (e.g., TadA).

[0154] In some embodiments, the adenosine deaminase is a TadA monomer (e.g., Tad*7.10, TadA*8 or TadA*9). In some embodiments, the adenosine deaminase is a TadA*8 variant. Such a TadA*8 variant includes TadA*8.1, TadA*8.2, TadA*8.3, TadA*8.4, TadA*8.5, TadA*8.6, TadA*8.7, TadA*8.8, TadA*8.9, TadA*8.10, TadA*8.11, TadA*8.12, TadA*8.13, TadA*8.14, TadA*8.15, TadA*8.16, TadA*8.17, TadA*8.18, TadA*8.19, TadA*8.20, TadA*8.21, TadA*8.22, TadA*8.23, or TadA*8.24 as described in WO2021163587 and WO2021050571, which are each hereby incorporated by reference in its entirety. In some embodiments, a base editor is a deaminase dimer comprising a base editing enzyme fused to TadA via a linker.

[0155] In some embodiments, the amino terminus of the fusion partner protein is linked to the carboxy terminus of the effector protein via the linker. In some embodiments, the carboxy terminus of the fusion partner protein is linked to the amino terminus of the effector protein via the linker.

[0156] In some embodiments, the base editing enzyme is fused to TadA at the N-terminus. In some embodiments, the base editing enzyme is fused to TadA at the C-terminus. In some embodiments, the base editing enzyme is a deaminase dimer comprising an ABE. In some embodiments, the deaminase dimer comprises an adenosine deaminase. In some embodiments, the deaminase dimer comprises TadA fused to an adenine base editing enzyme selected from ABE8e, ABE8.20m, APOBEC3A, Anc APOBEC (a.k.a. AncBE4Max), and BtAPOBEC2. In some embodiments TadA is fused to ABE8e or a variant thereof. In some embodiments TadA is fused to ABE8e or a variant thereof at the amino-terminus (ABE8e-TadA). In some embodiments, TadA is fused to ABE8e or a variant thereof at the carboxy terminus (ABE8e-TadA).

### Recombinases

[0157] In some embodiments, the fusion partners comprise a recombinase domain. In some embodiments, the enzymatically inactive protein is fused with a recombinase. In some embodiments, the recombinase is a site-specific recombinase. In some embodiments, the fusion partners comprise a recombinase domain wherein the recombinase is a site-specific recombinase. In some embodiments, described herein is a programmed nuclease comprising reduced nuclease activity or no nuclease activity and fused with a recombinase, wherein the recombinase can be a site-specific recombinase. Such polypeptides can be used for site-directed transgene insertion. Examples of site-specific recombinases include a tyrosine recombinase (e.g., Cre, Flp or lambda integrase), a serine recombinase (e.g., gamma-delta resolvase, Tn3 resolvase, Sin resolvase, Gin invertase, Hin invertase, Tn5044 resolvase, IS607 transposase and integrase), or mutants or variants thereof. In some embodiments, the recombinase is a serine recombinase. Non-limiting examples of serine recombinases include, but are not limited to, gamma-delta resolvase, Tn3 resolvase, Sin resolvase, Gin invertase, Hin invertase, Tn5044 resolvase, IS607 transposase, and IS607 integrase. In some embodiments, the site-specific recombinase is an integrase. Non-limiting examples of integrases include, but are not limited to: Bxb1, wBeta, BL3, phiR4, A118, TG1, MR11, phi370, SPBc, TP901-1, phiRV, FC1, K38, phiBT1, and phiC31. Further discussion and examples of suitable recombinase fusion partners are described in U.S. Pat. No. 10,975,392, which is incorporated herein by reference in its entirety.

[0158] In some embodiments, the fusion protein comprises a linker that links the recombinase domain to the Cas-CRISPR domain of the effector protein. In some embodiments, the linker is The-Ser.

### Modifying Proteins

[0159] In some embodiments, a fusion partner provides enzymatic activity that modifies a protein (e.g., a histone) associated with a target nucleic acid. Such enzymatic activities include, but are not limited to, methyltransferase activity, demethylase activity, acetyltransferase activity, deacetylase activity, kinase activity, phosphatase activity, ubiquitin ligase activity, deubiquitinating activity, adenylation activity, deadenylation activity, SUMOylating activity, deSUMOylating activity, ribosylation activity, de-ribosylation activity, myristoylation activity, and demyristoylation activity.

[0160] In some embodiments, the fusion partner has enzymatic activity that modifies a protein associated with a target nucleic acid. The protein may be a histone, an RNA binding protein, or a DNA binding protein. Examples of such protein modification activities include methyltransferase activity such as that provided by a histone methyltransferase (HMT) (e.g., suppressor of variegation 3-9 homolog 1 (SUV39H1, also known as KMT1A), euchromatic histone lysine methyltransferase 2 (G9A, also known as KMT1C and EHMT2), SUV39H2, ESET/SETDB1, SET1A, SET1B, MLL1 to 5, ASH1, SYMD2, NSD1, DOT1L, Pr-SET7/8, SUV4-20H1, EZH2, RIZ1); demethylase activity such as that provided by a histone demethylase (e.g., Lysine Demethylase 1A (KDM1A also known as LSD1), JHDM2a/b, JMJD2A/JHDM3A, JMJD2B, JMJD2C/GASC1, JMJD2D, JARID1A/RBP2, JARID1B/PLU-1, JARID1C/SMCX, JARID1D/SMCY, UTX, JMJD3); acetyltransferase activity such as that provided by a histone acetylase transferase (e.g., catalytic core/fragment of the human acetyltransferase p300, GCN5, PCAF, CBP, TAF1, TIP60/PLIP, MOZ/MYST3, MORF/MYST4, HBO1/MYST2, HMOF/MYST1, SRC1, ACTR, P160, CLOCK); deacetylase activity such as that provided by a histone deacetylase (e.g., HDAC1, HDAC2, HDAC3, HDAC8, HDAC4, HDAC5, HDAC7, HDAC9, SIRT1, SIRT2, HDAC11); kinase activity, phosphatase activity, ubiquitin ligase activity, deubiquitinating activity, adenylation activity, deadenylation activity, SUMOylating activity, deSUMOylating activity, ribosylation activity, deribosylation activity, myristoylation activity, and demyristoylation activity.

### CRISPRa Fusions and CRISPRi Fusions

[0161] In some embodiments, fusion partners activate or increase expression of a target nucleic acid. Fusion proteins comprising such fusion partners and an effector protein may be referred to as CRISPRa fusions. In some embodiments, fusion partners increase expression of the target nucleic acid relative to its expression in the absence of the fusion effector protein. Relative expression, including transcription and RNA levels, may be assessed, quantified, and compared, e.g., by RT-qPCR. In some embodiments, fusion partners comprise a transcriptional activator. In some embodiments, a transcriptional activator can describe a polypeptide or a fragment thereof that can activate or increase transcription of a target nucleic acid molecule. Transcriptional activators may promote transcription via: recruitment of other transcription factor proteins; modification of target DNA such as demethylation; recruitment of a DNA modifier; modulation of histones associated with target DNA; recruitment of a histone modifier such as those that modify acetylation and/or methylation of histones; or a combination thereof.

[0162] In some embodiments, fusions partners inhibit or reduce expression of a target nucleic acid. Fusion proteins comprising such fusion partners and an effector protein may be referred to as CRISPRi fusions. In some embodiments, fusion partners reduce expression of the target nucleic acid relative to its expression in the absence of the fusion effector protein. Relative expression, including transcription and RNA levels, may be assessed, quantified, and compared, e.g., by RT-qPCR. In some embodiments, fusion partners may comprise a transcriptional repressor. In some embodiments, a transcriptional repressor can describe a polypeptide or a fragment thereof that is capable of arresting, preventing, or reducing transcription of a target nucleic acid. Transcriptional repressors may inhibit transcription via: recruitment of other transcription factor proteins; modification of target DNA such as methylation; recruitment of a DNA modifier; modulation of histones associated with target DNA; recruitment of a histone modifier such as those that modify acetylation and/or methylation of histones; or a combination thereof.

### Additional Fusion Partners

[0163] In some embodiments, the fusion partner is a chloroplast transit peptide (CTP), also referred to as a plastid transit peptide. In some embodiments, this targets the fusion protein to a chloroplast. Chromosomal transgenes from bacterial sources must have a sequence encoding a CTP sequence fused to a sequence encoding an expressed protein if the expressed protein is to be compartmentalized in the plant plastid (e.g. chloroplast). The CTP is removed in a processing step during translocation into the plastid. Accordingly, localization of an exogenous protein to a chloroplast is often accomplished by means of operably linking a polynucleotide sequence encoding a CTP sequence to the 5′ region of a polynucleotide encoding the exogenous protein. In some embodiments, the CTP is located at the N-terminus of the fusion protein. Processing efficiency may, however, be affected by the amino acid sequence of the CTP and nearby sequences at the amino terminus (NH2 terminus) of the peptide.

[0164] In some embodiments, the fusion partner is an endosomal escape peptide. In some embodiments, an endosomal escape protein comprises the amino acid sequence GLFXALLXLLXSLWXLLLXA, wherein each X is independently selected from lysine, histidine, and arginine. In some embodiments, an endosomal escape protein comprises the amino acid sequence GLFHALLHLLHSLWHLLLHA. In some embodiments, the amino acid sequence of the endosomal escape protein is GLFXALLXLLXSLWXLLLXA or GLFHALLHLLHSLWHLLLHA.

[0165] Further suitable fusion partners include, but are not limited to, proteins (or fragments/domains thereof) that are boundary elements (e.g., CTCF), proteins and fragments thereof that provide periphery recruitment (e.g., Lamin A, Lamin B, etc.), protein docking elements (e.g., FKBP/FRB, Pil1/Aby1, etc.).

### Linkers for Fusion Partners

[0166] In some embodiments, fusion proteins comprise an effector protein and a fusion partner protein. The effector protein may be fused or linked to the fusion partner protein. The terms “fused” and “linked” may be used interchangeably. In some instances, the effector protein and the fusion partner are directly linked via a covalent bond. In some instances, effector proteins and fusion partners of a fusion effector protein are connected via a linker. The linker may comprise or consist of a covalent bond. The linker may comprise or consist of a chemical group. In some embodiments, the linker comprises an amino acid. In some embodiments, a linker comprises a bond or molecule that links a first polypeptide to a second polypeptide. In some embodiments, a peptide linker comprises at least two amino acids linked by an amide bond. In general, the linker connects a terminus of the effector protein to a terminus of the fusion partner. In some embodiments, the carboxy terminus of the effector protein is linked to the amino terminus of the fusion partner. In some embodiments, the carboxy terminus of the fusion partner is linked to the amino terminus of the effector protein.

[0167] In some embodiments, a terminus of the effector protein is linked to a terminus of the fusion partner through an amide bond. In some embodiments, a terminus of the effector protein is linked to a terminus of the fusion partner through a peptide bond. In some instances, linkers comprise an amino acid. In some embodiments, linkers comprise a peptide. In some embodiments, an effector protein is coupled to a fusion partner via a linker protein. The linker protein may have any of a variety of amino acid sequences. A linker protein may comprise a region of rigidity (e.g., beta sheet, alpha helix), a region of flexibility, or any combination thereof. In some embodiments, the linker comprises small amino acids, such as glycine and alanine, that impart high degrees of flexibility. The ordinarily skilled artisan will recognize that design of a peptide conjugated to any desired element may include linkers that are all or partially flexible, such that the linker may include a flexible linker as well as one or more portions that confer less flexible structure. Suitable linkers include proteins of 4 linked amino acids to 40 linked amino acids in length, or between 4 linked amino acids and 25 linked amino acids in length. In some embodiments, when a linked amino acids is described herein, it can refer to at least two amino acids linked by an amide bond.

[0168] These linkers may be produced by using synthetic, linker-encoding oligonucleotides to couple the proteins, or may be encoded by a nucleic acid sequence encoding a fusion protein (e.g., an effector protein coupled to a fusion partner). Examples of linker proteins include glycine polymers (G)n, glycine-serine polymers (including, for example, (GS)n, GSGGSn, GGSGGSn, and GGGSn, where n is an integer of at least one), glycine-alanine polymers, and alanine-serine polymers. Exemplary linkers may comprise amino acid sequences including, but not limited to, GGSG, GGSGG, GSGSG, GSGGG, GGGSG, and GSSSG.

[0169] In some instances, linkers do not comprise an amino acid. In some instances, linkers do not comprise a peptide. In some instances, linkers comprise a nucleotide, a polynucleotide, a polymer, or a lipid.

### Nuclease-Dead Effector Proteins

[0170] In some embodiments, the effector protein can comprise an enzymatically inactive and/or “dead” (abbreviated by “d”) effector protein in combination (e.g., fusion) with a polypeptide comprising recombinase activity. Although an effector protein normally has nuclease activity, in some embodiments, an effector protein does not have nuclease activity. In some embodiments, an effector protein comprising at least 65%, at least 70%, at least 75%, at least 80%, at least 85%, at least 90%, at least 92%, at least 95%, at least 97%, at least 98%, at least 99%, or 100% sequence identity with any one of the sequences selected from SEQ ID NOS: 1-1614 and 3195-3302 is a nuclease-dead effector protein. In some embodiments, the effector protein comprising at least 65%, at least 70%, at least 75%, at least 80%, at least 85%, at least 90%, at least 92%, at least 95%, at least 97%, at least 98%, at least 99%, or 100% sequence identity with any one of the sequences selected from SEQ ID NOS: 1-1614 and 3195-3302 is modified or engineered to be a nuclease-dead effector protein.

[0171] The effector protein can comprise a modified form of a wild type counterpart. The modified form of the wild type counterpart can comprise an amino acid change (e.g., deletion, insertion, or substitution) that reduces the nucleic acid-cleaving activity of the effector protein. For example, a nuclease domain (e.g., HEPN domain) of an effector polypeptide can be deleted or mutated so that it is no longer functional or comprises reduced nuclease activity. The modified form of the effector protein can have less than 90%, less than 80%, less than 70%, less than 60%, less than 50%, less than 40%, less than 30%, less than 20%, less than 10%, less than 5%, or less than 1% of the nucleic acid-cleaving activity of the wild-type counterpart. The modified form of an effector protein can have no substantial nucleic acid-cleaving activity. When an effector protein is a modified form that has no substantial nucleic acid-cleaving activity, it can be referred to as enzymatically inactive and/or dead. A dead effector polypeptide can bind to a target sequence but may not cleave the target nucleic acid. A dead effector polypeptide can associate with a guide nucleic acid to activate or repress transcription of a target nucleic acid.

[0172] In some embodiments, the effector proteins disclosed herein (e.g. an effector protein of a CRISPR-Cas system, or a Cas protein) are modified relative to a naturally-occurring effector protein to have reduced or eliminated catalytic activity relative to that of the naturally-occurring effector protein, but retain their ability to interact with a guide nucleic acid. For example, a “dCas” protein refers to any one of the Cas proteins disclosed herein that is modified relative to a naturally-occurring Cas protein to have a reduced or eliminated catalytic activity relative to that of the naturally-occurring effector protein, but retains its ability to interact with a guide nucleic acid.

### Effector Protein Activity

[0173] The effector proteins of the present disclosure may show an enhanced activity (e.g., nucleic acid binding activity, nuclease activity), when measured in a cleavage assay or a reporter assay, under certain conditions relative to a control condition. For example, the effector proteins of the present disclosure may have variable levels of activity based on a buffer formulation, a pH level, temperature, or salt. Buffers consistent with the present disclosure include phosphate buffers, Tris buffers, and HEPES buffers. Effector proteins of the present disclosure can show optimal activity in phosphate buffers, Tris buffers, and HEPES buffers.

[0174] Effector proteins can also exhibit varying levels of activity at different pH levels. For example, enhanced nuclease activity can be observed between pH 7 and pH 9. In some embodiments, effector proteins of the present disclosure exhibit enhanced cleavage at about pH 7, about pH 7.1, about pH 7.2, about pH 7.3, about pH 7.4, about pH 7.5, about pH 7.6, about pH 7.7, about pH 7.8, about pH 7.9, about pH 8, about pH 8.1, about pH 8.2, about pH 8.3, about pH 8.4, about pH 8.5, about pH 8.6, about pH 8.7, about pH 8.8, about pH 8.9, about pH 9, from pH 7 to 7.5, from pH 7.5 to 8, from pH 8 to 8.5, from pH 8.5 to 9, or from pH 7 to 8.5.

[0175] In some embodiments, the effector proteins of the present disclosure exhibit activity or enhanced activity at a temperature of 25° C. to 50° C. in the presence of target nucleic acid. For example, the effector proteins of the present disclosure can exhibit enhanced cleavage of an ssDNA-FQ reporter at about 25° C., about 26° C., about 27° C., about 28° C., about 29° C., about 30° C., about 31° C., about 32° C., about 33° C., about 34° C., about 35° C., about 36° C., about 37° C., about 38° C., about 39° C., about 40° C., about 41° C., about 42° C., about 43° C., about 44° C., about 45° C., about 46° C., about 47° C., about 48° C., about 49° C., about 50° C., from 30° C. to 40° C., from 35° C. to 45° C., or from 35° C. to 40° C.

[0176] In some embodiments, the effector proteins of the present disclosure exhibit activity or enhanced activity under a salt concentration from 25 nM salt to 200 mM salt. Non-limiting examples of such salts are NaCl and KCl. The effector proteins of the present disclosure can be active at salt concentrations of from 25 nM to 500 nM salt, from 500 nM to 1000 nM salt, from 1000 nM to 2000 nM salt, from 2000 nM to 3000 nM salt, from 3000 nM to 4000 nM salt, from 4000 nM to 5000 nM salt, from 5000 nM to 6000 nM salt, from 6000 nM to 7000 nM salt, from 7000 nM to 8000 nM salt, from 8000 nM to 9000 nM salt, from 9000 nM to 0.01 mM salt, from 0.01 mM to 0.05 mM salt, from 0.05 mM to 0.1 mM salt, from 0.1 mM to 10 mM salt, from 10 mM to 100 mM salt, or from 100 mM to 500 mM salt. The effector proteins of the present disclosure can exhibit cleavage activity independent of the salt concentration in a sample.

[0177] In some embodiments, the effector proteins of the present disclosure exhibit activity or enhanced activity in the presence of a co-factor. In certain embodiments, the co-factor allows the effector proteins to perform a function. In some embodiments, the function is pre-crRNA processing and/or target nucleic acid cleavage. As discussed in Jiang F. and Doudna J. A. (Annu. Rev. Biophys. 2017. 46:505-29), Cas9 uses divalent metal ions as co-factors. The suitability of a divalent metal ion as a cofactor can easily be assessed, such as by methods based on those described by Sundaresan et al. (Cell Rep. 2017 Dec. 26; 21(13): 3728-3739). In some embodiments, the co-factor is a divalent metal ion. Exemplary divalent metal ions include: Mg²⁺, Mn²⁺, Zn²⁺, Ca²⁺, and Cu²⁺. In some embodiments, an effector protein forms a complex with a divalent metal ion. In preferred embodiments, an effector protein forms a complex with Mg²⁺, Mn²⁺, Zn²⁺, Ca²⁺, or Cu².

### Synthesis, Isolation and Assaying

[0178] Effector proteins of the present disclosure may be synthesized, using any suitable method. Effector proteins of the present disclosure may be produced in vitro or by eukaryotic cells or by prokaryotic cells. Effector proteins can be further processed by unfolding, e.g. heat denaturation, dithiothreitol reduction, etc. and may be further refolded, using any suitable method.

[0179] Methods of generating and assaying the effector proteins described herein are well known to one of skill in the art. Examples of such methods are described in the Examples provided herein. Any of a variety of methods can be used to generate an effector protein disclosed herein. Such methods include, but are not limited to, site-directed mutagenesis, random mutagenesis, combinatorial libraries, and other mutagenesis methods described herein (see, e.g., Sambrook et al., Molecular Cloning: A Laboratory Manual, Third Ed., Cold Spring Harbor Laboratory, New York (2001); Ausubel et al., Current Protocols in Molecular Biology, John Wiley and Sons, Baltimore, M D (1999); Gillman et al., Directed Evolution Library Creation: Methods and Protocols (Methods in Molecular Biology) Springer, 2nd ed (2014)). One non-limiting example of a method for preparing an effector protein is to express recombinant nucleic acids encoding the effector protein in a suitable microbial organism, such as a bacterial cell, a yeast cell, or other suitable cell, using methods well known in the art.

[0180] In some embodiments, an effector protein provided herein is an isolated effector protein. In some embodiments, effector proteins described herein can be isolated and purified for use in compositions, systems, and/or methods described herein. Methods described here can include the step of isolating effector proteins described herein. An isolated effector protein provided herein can be isolated by a variety of methods well-known in the art, for example, recombinant expression systems, precipitation, gel filtration, ion-exchange, reverse-phase and affinity chromatography, and the like. Other well-known methods are described in Deutscher et al., Guide to Protein Purification: Methods in Enzymology, Vol. 182, (Academic Press, (1990)). Alternatively, the isolated polypeptides of the present disclosure can be obtained using well-known recombinant methods (see, e.g., Sambrook et al., Molecular Cloning: A Laboratory Manual, Third Ed., Cold Spring Harbor Laboratory, New York (2001); and Ausubel et al., Current Protocols in Molecular Biology, John Wiley and Sons, Baltimore, MD (1999)). The methods and conditions for biochemical purification of a polypeptide described herein can be chosen by those skilled in the art, and purification monitored, for example, by a functional assay.

[0181] For example, compositions and/or systems described herein can further comprise a purification tag that can be attached to an effector protein, or a nucleic acid encoding for a purification tag that can be attached to a nucleic acid encoding for an effector protein as described herein. A purification tag, as used herein, can be an amino acid sequence which can attach or bind with high affinity to a separation substrate and assist in isolating the protein of interest from its environment, which can be its biological source, such as a cell lysate. Attachment of the purification tag can be at the N or C terminus of the effector protein. Furthermore, an amino acid sequence recognized by a protease or a nucleic acid encoding for an amino acid sequence recognized by a protease, such as TEV protease or the HRV3C protease can be inserted between the purification tag and the effector protein, such that biochemical cleavage of the sequence with the protease after initial purification liberates the purification tag. Purification and/or isolation can be through high performance liquid chromatography (HPLC), exclusion chromatography, gel electrophoresis, affinity chromatography, or other purification technique. Examples of purification tags are as described herein.

[0182] In some embodiments, effector proteins described herein are isolated from cell lysate. In some embodiments, the compositions described herein can comprise 20% or more by weight, 75% or more by weight, 95% or more by weight, or 99.5% or more by weight of an effector protein, related to the method of preparation of compositions described herein and its purification thereof, wherein percentages can be upon total protein content in relation to contaminants. Thus, in some embodiments, an effector protein described herein is at least 80% pure, at least 85% pure, at least 90% pure, at least 95% pure, at least 98% pure, or at least 99% pure (e.g., free of contaminants, non-engineered polypeptide proteins or other macromolecules, etc.).

### V. Multimeric Complexes

[0183] Compositions, systems, and methods of the present disclosure may comprise a multimeric complex or uses thereof, wherein the multimeric complex comprises multiple effector proteins that non-covalently interact with one another. A multimeric complex may comprise enhanced activity relative to the activity of any one of its effector proteins alone. For example, a multimeric complex comprising two effector proteins may comprise greater nucleic acid binding affinity and/or nuclease activity than that of either of the effector proteins provided in monomeric form under the same conditions that the activity with the multimeric complex was observed. A multimeric complex may have an affinity for a target sequence of a target nucleic acid and is capable of catalytic activity (e.g., cleaving, nicking or modifying the nucleic acid) at or near the target sequence. Multimeric complexes may be activated when complexed with a guide nucleic acid. Multimeric complexes may be activated when complexed with a guide nucleic acid and a target nucleic acid. In some instances, the multimeric complex cleaves the target nucleic acid. In some instances, the multimeric complex nicks the target nucleic acid. Effector proteins of a multimeric complex may target different nucleic acid sequences. Effector proteins of a multimeric complex may target different types of nucleic acids. By way of non-limiting example, a first effector protein may target double- and single-stranded nucleic acids, and a second effector protein may only target single-stranded nucleic acids).

[0184] In some instances, the multimeric complex is a dimer comprising two effector proteins of identical amino acid sequences. In some instances, the multimeric complex comprises a first effector protein and a second effector protein, wherein the amino acid sequence of the first effector protein is at least 90%, at least 92%, at least 94%, at least 96%, at least 98% identical, or at least 99% identical to the amino acid sequence of the second effector protein.

[0185] In some instances, the multimeric complex is a heterodimeric complex comprising at least two effector proteins of different amino acid sequences. In some instances, the multimeric complex is a heterodimeric complex comprising a first effector protein and a second effector protein, wherein the amino acid sequence of the first effector protein is less than 90%, less than 85%, less than 80%, less than 75%, less than 70%, less than 65%, less than 60%, less than 55%, less than 50%, less than 45%, less than 40%, less than 35%, less than 30%, less than 25%, less than 20%, less than 15%, or less than 10% identical to the amino acid sequence of the second effector protein.

[0186] Various aspects of the present disclosure include compositions and methods comprising multiple effector proteins, and uses thereof, respectively. An effector protein comprising at least 65% sequence identity to any one of the sequences selected from SEQ ID NOS: 1-1614 and 3195-3302 may be provided with a second effector protein. Two effector proteins may target different nucleic acid sequences. Two effector proteins may target different types of nucleic acids (e.g., a first effector protein may target double- and single-stranded nucleic acids, and a second effector protein may only target single-stranded nucleic acids).

[0187] In some embodiments, multimeric complexes comprise at least one effector protein, or a fusion protein thereof, comprising an amino acid sequence with at least 65%, at least 70%, at least 75%, at least 80%, at least 85%, at least 90%, at least 95% or 100% identity to any one of the sequences selected from SEQ ID NOS: 1-1614 and 3195-3302. In some embodiments, multimeric complexes comprise at least one effector protein or a fusion protein thereof, wherein the amino acid sequence of the effector protein is at least 65%, at least 70%, at least 75%, at least 80%, at least 85%, at least 90%, at least 95% or 100% identical to any one of the sequences selected from SEQ ID NOS: 1-1614 and 3195-3302.

### VI. Guide Nucleic Acids

[0188] The compositions, systems, and methods of the present disclosure may comprise a guide nucleic acid or a use thereof. Unless otherwise indicated, compositions, systems and methods comprising guide nucleic acids or uses thereof, as described herein and throughout, include DNA molecules, such as expression vectors, that encode a guide nucleic acid. In general, a guide nucleic acid is a nucleic acid molecule, at least a portion of which may be bound by an effector protein, thereby forming a ribonucleoprotein complex (RNP). In some embodiments, the guide nucleic acid imparts activity or sequence selectivity to the effector protein. When complexed with an effector protein, guide nucleic acids can bring the effector protein into proximity of a target nucleic acid. The guide nucleic acid may hybridize to a target nucleic acid or a portion thereof. In some embodiments, when a guide nucleic acid and an effector protein form an RNP, at least a portion of the RNP binds, recognizes, and/or hybridizes to a target nucleic acid. Those skilled in the art in reading the below specific examples of guide nucleic acids as used in RNPs described herein, will understand that in some embodiments, a RNP can hybridize to one or more target sequences in a target nucleic acid, thereby allowing the RNP to modify and/or recognize a target nucleic acid or sequence contained therein or to modify and/or recognize non-target sequences depending on the guide nucleic acid, and in some embodiments, the effector protein, used.

[0189] Guide nucleic acids may also be referred to herein as a “guide RNA.” However, a guide nucleic acid, including guide RNAs described herein, may comprise various modified nucleotides and deoxyribonucleotides. The term “guide RNA,” as well as crRNA and tracrRNA, includes nucleic acids comprising ribonucleosides, deoxyribonucleosides and biochemically or chemically modified nucleotides (e.g., one or more sequence modifications as described herein), and any combinations thereof. Modified nucleosides may comprise modified sugar moieties (e.g., 2′-OMe, 2′-fluoro, and constrained ethyl), modified nucleobases or modified backbone linkages (phosphorothioate linkage).

[0190] The guide nucleic acid may comprise a first region complementary to a target nucleic acid (FR1) and a second region that is not complementary to the target nucleic acid (FR2). In some cases, FR1 is located 5′ to FR2 (FR1-FR2). In some cases, FR2 is located 5′ to FR1 (FR2-FR1). In some embodiments, the first region comprises a spacer region, wherein the spacer region can interact in a sequence-specific manner with (e.g., has complementarity with, or can hybridize to) a target nucleic acid. In certain embodiments, the second region comprises a repeat region that interacts with the effector protein.

[0191] A guide nucleic acid may comprise a naturally occurring sequence. A guide nucleic acid may comprise a non-naturally occurring sequence, wherein the sequence of the guide nucleic acid, or any portion thereof, may be different from the sequence of a naturally occurring nucleic acid. The guide nucleic acid may be chemically synthesized or recombinantly produced. Guide nucleic acids and portions thereof may be found in or identified from a CRISPR array present in the genome of a host organism or cell. In some embodiments, an effector protein or a multimeric complex thereof cleaves a precursor RNA (“pre-crRNA”) to produce a guide RNA, also referred to as a “mature guide RNA.” An effector protein that cleaves pre-crRNA to produce a mature guide RNA is said to have pre-crRNA processing activity. In some embodiments, a repeat region of a guide RNA comprises mutations or truncations relative to respective regions in a corresponding pre-crRNA.

[0192] In some embodiments, the compositions, systems, and methods of the present disclosure comprise two or more guide nucleic acids (e.g., 2, 3, 4, 5, 6, 7, 9, 10 or more guide nucleic acids), and/or uses thereof. Multiple guide nucleic acids may target an effector protein to different locations in the target nucleic acid by binding to different portions of the target nucleic acid. A first guide nucleic acid may bind or cleave a first portion of a target nucleic acid and a second guide nucleic acid may bind or cleave a second portion of the target nucleic acid. The first portion and the second portion of the target nucleic acid may be located at least 10, at least 20, at least 30, at least 40, at least 50, at least 60, at least 70, at least 80, at least 90 or at least 100 nucleotides apart. The first portion and the second portion of the target nucleic acid may be located between 100 and 200, 200 and 300, 300 and 400, 400 and 500, 500 and 600, 600 and 700, 700 and 800, 800 and 900 or 900 and 1000 nucleotides apart. In some instances, the first portion and/or the second portion of the target nucleic acid are located in an intron of a gene. In some instances, the first portion and/or the second portion of the target nucleic acid are located in an exon of a gene. In some instances, the first portion and/or the second portion of the target nucleic acid span and exon-intron junction of a gene. In some instances, the first portion and/or the second portion of the target nucleic acid are located on either side of an exon and cutting at both sites results in deletion of the exon. In some embodiments, composition, systems and methods comprise a donor nucleic acid that may be inserted in replacement of a deleted or cleaved sequence of the target nucleic acid. In some embodiments, compositions, systems and methods comprising multiple guide nucleic acids or uses thereof comprise multiple different effector proteins.

[0193] In some embodiments, a guide nucleic acid comprises 10, 11, 12, 13, 14, 15, 16, 17, 18, 19, 20, 21, 22, 23, 24, 25, 26, 27, 28, 29, or 30 linked nucleotides. In general, a guide nucleic acid comprises at least 10 linked nucleotides. In some embodiments, a guide nucleic acid comprises at least 25 linked nucleotides. A guide nucleic acid may comprise 10 to 50 linked nucleotides. In some embodiments, the guide nucleic acid comprises or consists essentially of about 12 to about 80 linked nucleotides, about 12 to about 50, about 12 to about 45, about 12 to about 40, about 12 to about 35, about 12 to about 30, about 12 to about 25, from about 12 to about 20, about 12 to about 19, about 19 to about 20, about 19 to about 25, about 19 to about 30, about 19 to about 35, about 19 to about 40, about 19 to about 45, about 19 to about 50, about 19 to about 60, about 20 to about 25, about 20 to about 30, about 20 to about 35, about 20 to about 40, about 20 to about 45, about 20 to about 50, or about 20 to about 60 linked nucleotides. In some embodiments, the guide nucleic acid has about 10 to about 60, about 20 to about 50, or about 30 to about 40 linked nucleotides.

[0194] In some embodiments, a guide nucleic acid comprises at least 10, 11, 12, 13, 14, 15, 16, 17, 18, 19, 20, 21, 22, 23, 24, 25, 26, 27, 28, 29, or 30 contiguous nucleotides that are complementary to a eukaryotic sequence. Such a eukaryotic sequence is a sequence of nucleotides that is present in a host eukaryotic cell. Such a sequence of nucleotides is distinguished from nucleotide sequences present in other host cells, such as prokaryotic cells, or viruses. Said sequences present in a eukaryotic cell can be located a gene, an exon, an intron, a non-coding (e.g., promoter or enhancer) region, a selectable marker, tag, signal, and the like.

[0195] In some embodiments, the guide nucleic acid can bind to a target sequence, wherein the target sequence is eukaryotic. The guide nucleic acid may bind to a target nucleic acid, such as DNA or RNA, from a cancer gene or gene associated with a genetic disorder, or an amplicon thereof, as described herein. The guide nucleic acid may bind to a target nucleic acid such as a nucleic acid from a bacterium, a virus, a parasite, a protozoon, a fungus or other agents responsible for a disease, or an amplicon thereof. The target nucleic acid may comprise a mutation, such as a single nucleotide polymorphism (SNP). A mutation may confer for example, resistance to a treatment, such as antibiotic treatment.

[0196] In general, the guide nucleic acid comprises a CRISPR RNA (crRNA) that is at least partially complementary to a target nucleic acid. In some instances, the guide nucleic acid comprises a trans-activating crRNA (tracrRNA), at least a portion of which interacts with the effector protein. In general, tracrRNA comprises a first sequence that is capable of being non-covalently bound by an effector protein. TracrRNAs may comprise a second sequence that hybridizes to a portion of a crRNA, which may be referred to as a repeat hybridization sequence. The tracrRNA may hybridize to a portion of the guide nucleic acid that does not hybridize to the target nucleic acid. In some instances, the crRNA and tracrRNA are provided as a single guide nucleic acid, also referred to as a single guide RNA (sgRNA). In some instances, a crRNA and tracrRNA function as two separate, unlinked molecules.

[0197] In some instances, guide nucleic acids do not comprise a tracrRNA. In some cases, effector proteins do not require a tracrRNA to locate and/or cleave a target nucleic acid. In some instances, the crRNA of the guide nucleic acid comprises a repeat region and a spacer region, wherein the repeat region binds to the effector protein and the spacer region hybridizes to a target sequence of the target nucleic acid. The repeat sequence of the crRNA may interact with the effector protein, allowing for the guide nucleic acid and the effector protein to form an RNP complex.

[0198] In some embodiments, guide nucleic acids comprise additional elements that contribute additional functionality (e.g., stability, heat resistance, etc.) to the guide nucleic acid. Such elements may be one or more nucleotide alterations, nucleotide sequences, intermolecular secondary structures, or intramolecular secondary structures (e.g., one or more hair pin regions, one or more bulges, etc.).

### Spacer Region

[0199] In general, guide nucleic acids comprise a spacer sequence within the spacer region that hybridizes with a target sequence of a target nucleic acid. The spacer sequence may comprise complementarity with a target sequence of a target nucleic acid. The spacer sequence can function to direct the guide nucleic acid to the target nucleic acid for detection and/or modification. The spacer sequence may be complementary to a target sequence that is adjacent to a PAM that is recognizable by an effector protein of interest.

[0200] In some embodiments, the spacer region is 15-28 linked nucleotides in length. In some embodiments, the spacer region is 15-26, 15-24, 15-22, 15-20, 15-18, 16-28, 16-26, 16-24, 16-22, 16-20, 16-18, 17-26, 17-24, 17-22, 17-20, 17-18, 18-26, 18-24, or 18-22 linked nucleotides in length. In some embodiments, the spacer region is 18-24 linked nucleotides in length. In some embodiments, the spacer region is at least 15 linked nucleotides in length. In some embodiments, the spacer region is at least 16, 18, 20, or 22 linked nucleotides in length. In some embodiments, the spacer region comprises at least 10, 11, 12, 13, 14, 15, 16, 17, 18, 19, 20, 21, 22, 23, 24, 25, 26, 27, 28, 29, or 30 nucleotides. In some embodiments, the spacer region is at least 17 linked nucleotides in length. In some embodiments, the spacer region is at least 18 linked nucleotides in length. In some embodiments, the spacer region is at least 20 linked nucleotides in length. In some embodiments, the spacer region is at least 80%, at least 85%, at least 90%, at least 95% or 100% complementary to a target sequence of the target nucleic acid. In some embodiments, the spacer region is 100% complementary to the target sequence of the target nucleic acid. In some embodiments, the spacer region comprises at least 15 contiguous nucleotides that are complementary to the target nucleic acid. It is understood that the sequence of a spacer region need not be 100% complementary to that of a target sequence of a target nucleic acid to hybridize or hybridize specifically to the target sequence. The spacer sequence may comprise at least one nucleotide that is not complementary to the corresponding nucleotide of the target sequence.

### Repeat Region

[0201] Guide nucleic acids can also comprise a repeat region that interacts with the effector protein. The repeat region may also be referred to as a “protein-binding segment.” Typically, the repeat region is adjacent to the spacer region. For example, a guide nucleic acid that interacts with the effector protein may comprise a repeat region that is 5′ of the spacer region. In certain embodiments, the repeat region is followed by the spacer region in the 5′ to 3′ direction. In some embodiments, the repeat region is between 10 and 50, 12 and 48, 14 and 46, 16 and 44, and 18 and 42 nucleotides in length. In certain embodiments, the repeat region is between 19 and 37 nucleotides in length.

[0202] In some embodiments, the spacer sequence and the direct repeat sequence(s) of the guide nucleic acid are present within the same molecule. In some embodiments, the spacer and repeat sequences are linked directly to one another. In some embodiments, a linker is present between the spacer and repeat sequences. The linker may comprise 1, 2, 3, 4, 5, 6, 7, 8, 9 or 10 nucleotides. The linker may comprise more than 10 nucleotides. In some instances, the linker comprises the sequence 5′-GAAA-3′. In some embodiments, the spacer sequence and the repeat sequence(s) of the guide nucleic acid are present in separate molecules, which are joined to one another by base pairing interactions.

[0203] In some embodiments, the protein binding segment includes two sequences that are complementary to each other and hybridize to form a double stranded RNA duplex (dsRNA duplex). In some instances, the two sequences are not directly linked and hybridize to form a stem loop structure. In some embodiments, the dsRNA duplex comprises 5, 10, 15, 20 or 25 base pairs (bp). In some embodiments, not all nucleotides of the dsRNA duplex are paired, and therefore the duplex forming region can include a bulge. In certain embodiments, the repeat region comprises a hairpin or stem-loop structure, optionally at the 5′ portion of the repeat region. In some embodiments, a strand of the stem portion comprises a sequence and the other strand of the stem portion comprises a sequence that is, at least partially, complementary. In certain embodiments, a guide nucleic acid comprises nucleotide sequence that when involved in hybridization events may hybridize over one or more segments such that intervening or adjacent segments are not involved in the hybridization event (e.g., a bulge, a loop structure or hairpin structure, etc.).

[0204] In some embodiments, guide nucleic acids comprise a nucleotide sequence as described herein (e.g., Columns B1, B2, and B3 of TABLE 1 and Columns D1 and D2 of TABLE 2). Such nucleotide sequences described herein may be described as a nucleotide sequence of either DNA or RNA, however, no matter the form the sequence is described, it is readily understood that such nucleotide sequences can be revised to be RNA or DNA, as needed, for describing a sequence within a guide nucleic acid itself or the sequence that encodes a guide nucleic acid, such as a nucleotide sequence described herein for a vector. Similarly, disclosure of the nucleotide sequences described herein (e.g., Columns B1, B2, and B3 of TABLE 1 and Columns D1 and D2 of TABLE 2) also discloses the complementary nucleotide sequence, the reverse nucleotide sequence, and the reverse complement nucleotide sequence, any one of which can be a nucleotide sequence for use in a guide nucleic acid as described herein.

[0205] In some embodiments, the guide nucleic acid comprises a sequence that is at least 70%, at least 80%, at least 85%, at least 90%, at least 95%, or 100% identical to any one of the sequences recited in Columns B1, B2, and B3 of TABLE 1 and Columns D1 and D2 of TABLE 2 or any combination thereof.

[0206] In some embodiments, the guide nucleic acid comprises a sequence that is at least 70%, at least 75%, at least 80%, at least 85%, at least 90%, at least 95%, or 100% identical to any one of the sequences of Columns B1, B2, and B3 of TABLE 1. In some embodiments, the guide nucleic acid comprises a sequence that is at least 70%, at least 75%, at least 80%, at least 85%, at least 90%, at least 95%, or 100% identical to any one of the sequences of Columns D1 and D2 of TABLE 2. In some embodiments, the guide nucleic acid comprises a sequence that is at least 70%, at least 75%, at least 80%, at least 85%, at least 90%, at least 95%, or 100% identical to any one of the sequences of Columns B1, B2, and B3 of TABLE 1 and a sequence that is at least 70%, at least 75%, at least 80%, at least 85%, at least 90%, at least 95%, or 100% identical to any one of the sequences of Columns D1 and D2 of TABLE 2.

[0207] The guide nucleic acid may bind to a target nucleic acid (e.g., a single strand of a target nucleic acid) or a portion thereof. The guide nucleic acid may bind to a target nucleic acid such as a nucleic acid from a bacterium, a virus, a parasite, a protozoa, a fungus or other agents responsible for a disease, or an amplicon thereof. The target nucleic acid may comprise a mutation, such as a single nucleotide polymorphism (SNP). A mutation may confer for example, resistance to a treatment, such as antibiotic treatment. The guide nucleic acid may bind to a target nucleic acid, such as DNA or RNA, from a cancer gene or gene associated with a genetic disorder, or an amplicon thereof, as described herein.

[0208] In some cases, the guide comprises 10, 11, 12, 13, 14, 15, 16, 17, 18, 19, 20, 21, 22, 23, 24, 25, 26, 27, 28, 29, or 30 linked nucleosides. In general, a guide nucleic acid comprises at least linked nucleosides. In some instances, a guide nucleic acid comprises at least 25 linked nucleosides. A guide nucleic acid may comprise 10 to 50 linked nucleosides. In some cases, the guide nucleic acid comprises or consists essentially of about 12 to about 80 linked nucleosides, about 12 to about 50, about 12 to about 45, about 12 to about 40, about 12 to about 35, about 12 to about 30, about 12 to about 25, from about 12 to about 20, about 12 to about 19, about 19 to about 20, about 19 to about 25, about 19 to about 30, about 19 to about 35, about 19 to about 40, about 19 to about 45, about 19 to about 50, about 19 to about 60, about 20 to about 25, about 20 to about 30, about 20 to about 35, about 20 to about 40, about 20 to about 45, about 20 to about 50, or about 20 to about 60 linked nucleosides. In some cases, the guide nucleic acid has about 10 to about 60, about 20 to about 50, or about 30 to about 40 linked nucleosides.

[0209] A guide nucleic acid can generally comprise a crRNA, at least a portion of which is complementary to a target sequence of a target nucleic acid. In some embodiments, the composition comprising an effector protein and a guide nucleic acid further comprises a tracrRNA that interacts with the effector protein. In some embodiments, the crRNA and the tracrRNA are covalently linked. In some embodiments, the crRNA and tracrRNA are linked by a phosphodiester bond. In some embodiments, the crRNA and tracrRNA are linked by one or more linked nucleotides. In some embodiments, a crRNA and tracrRNA function as two separate, unlinked molecules. In some embodiments, compositions, systems and methods does not comprise or require a tracrRNA. In some embodiments, an effector protein does not require a tracrRNA to locate and/or cleave a target nucleic acid. In some embodiments, the crRNA of the guide nucleic acid comprises a repeat region and a spacer region, wherein the repeat region binds to the effector protein and the spacer region hybridizes to a target sequence of the target nucleic acid. The repeat sequence of the crRNA may interact with an effector protein, allowing for the guide nucleic acid and the effector protein to form an RNP complex. In some embodiments, the guide nucleic acid is a sgRNA.

[0210] In some instances, compositions and systems provided herein comprise a nucleic acid expression vector encoding an effector protein. In some instances, compositions and systems comprise multiple nucleic acid expression vectors. In some instances, at least one of the multiple nucleic acid expression vectors encodes a guide nucleic acid described herein. In some instances, the guide nucleic acid and the effector protein are encoded by the same nucleic acid expression vector. In some instances, the engineered guide nucleic acid and the effector protein are encoded by different nucleic acid expression vectors. In some instances, a nucleic acid expression vector may encode one or more guide nucleic acids.

crRNA

[0211] In general, a crRNA comprises a spacer region that hybridizes to a target sequence of a target nucleic acid. In some embodiments, the crRNA of the guide nucleic acid comprises a repeat region and a spacer region, wherein the repeat region binds to the effector protein and the spacer region hybridizes to a target sequence of the target nucleic acid. The repeat sequence of the crRNA may interact with an effector protein, allowing for the guide nucleic acid and the effector protein to form an RNP complex. Accordingly in some embodiments, the guide nucleic acid is a crRNA.

[0212] A crRNA may be the product of processing of a longer precursor CRISPR RNA (pre-crRNA) transcribed from the CRISPR array by cleavage of the pre-crRNA within each direct repeat sequence to afford shorter, mature crRNAs. A crRNA may be generated by a variety of mechanisms, including the use of dedicated endonucleases (e.g., Cas6 or Cas5d in Type I and III systems), coupling of a host endonuclease (e.g., RNase III) with tracrRNA (Type II systems), or a ribonuclease activity endogenous to the effector protein itself (e.g., Cpfl, from Type V systems). A crRNA may also be specifically generated outside of processing of a pre-crRNA and individually contacted to an effector protein in vivo or in vitro.

[0213] In some embodiments, the length of the crRNA is not greater than about 40, about 45, about 50, about 55, about 60, about 65, about 70 or about 75 linked nucleosides. In some embodiments, the length of the crRNA is about 30 to about 120 linked nucleosides. In some embodiments, the length of a crRNA is about 40 to about 100, about 40 to about 90, about 40 to about 80, about 40 to about 70, about 40 to about 60, about 40 to about 50, about 50 to about 90, about 50 to about 80, about 50 to about 70, or about 50 to about 60 linked nucleosides. In some embodiments, the length of a crRNA is about 40, about 45, about 50, about 55, about 60, about 65, about 70 or about 75 linked nucleosides.

tracrRNA

[0214] In some embodiments, the compositions comprising a guide nucleic acid and an effector protein (e.g., in a dual nucleic acid system) comprises a tracrRNA. A tracrRNA may include deoxyribonucleosides, ribonucleosides, chemically modified nucleosides, or any combination thereof. A tracrRNA may be separate from, but form a complex with, a guide nucleic acid and an effector protein. A tracrRNA may include a nucleotide sequence that hybridizes with a portion of a guide nucleic acid (e.g., a repeat hybridization region). A tracrRNA may also form a secondary structure (e.g., one or more hairpin loops) that facilitates the binding of an effector protein to a guide nucleic acid and/or modification activity of an effector protein on a target nucleic acid (e.g., a hairpin region). A tracrRNA may include a repeat hybridization region and a hairpin region. The repeat hybridization region may hybridize to all or part of the repeat sequence of a guide nucleic acid. The repeat hybridization region may be positioned 3′ of the hairpin region. The hairpin region may include a first sequence, a second sequence that is reverse complementary to the first sequence, and a stem-loop linking the first sequence and the second sequence.

[0215] In some embodiments, tracrRNAs comprise a stem-loop structure comprising a stem region and a loop region. In some embodiments, the stem region is 4 to 8 linked nucleotides in length. In some embodiments, the stem region is 5 to 6 linked nucleotides in length. In some embodiments, the stem region is 4 to 5 linked nucleotides in length. In some embodiments, the tracrRNA comprises a pseudoknot (e.g., a secondary structure comprising a stem at least partially hybridized to a second stem or half-stem secondary structure). An effector protein may recognize a tracrRNA comprising multiple stem regions. In some embodiments, the nucleotide sequences of the multiple stem regions are identical to one another. In some embodiments, the nucleotide sequences of at least one of the multiple stem regions is not identical to those of the others. In some embodiments, the tracrRNA comprises at least 2, at least 3, at least 4, or at least 5 stem regions.

[0216] In some embodiments, the length of a tracrRNA is not greater than 50, 56, 68, 71, 73, 95, or 105 linked nucleotides. In some embodiments, the length of a tracrRNA is about 30 to about 120 linked nucleotides. In some embodiments, the length of a tracrRNA is about 50 to about 105, about 50 to about 95, about 50 to about 73, about 50 to about 71, about 50 to about 68, or about 50 to about 56 linked nucleotides. In some embodiments, the length of a tracrRNA is 56 to 105 linked nucleotides, from 56 to 105 linked nucleotides, 68 to 105 linked nucleotides, 71 to 105 linked nucleotides, 73 to 105 linked nucleotides, or 95 to 105 linked nucleotides. In some embodiments, the length of a tracrRNA is 40 to 60 nucleotides. In some embodiments, the length of a tracrRNA is 50, 56, 68, 71, 73, 95, or 105 linked nucleotides. In some embodiments, the length of a tracrRNA is 50 nucleotides.

[0217] An exemplary tracrRNA may comprise, from 5′ to 3′, a 5′ region, a hairpin region, a repeat hybridization region, and a 3′ region. In some embodiments, the 5′ region may hybridize to the 3′ region. In some embodiments, the 5′ region does not hybridize to the 3′ region. In some embodiments, the 3′ region is covalently linked to the crRNA (e.g., through a phosphodiester bond). In some embodiments, a tracrRNA may comprise an un-hybridized region at the 3′ end of the tracrRNA. The un-hybridized region may have a length of about 1, about 2, about 3, about 4, about 5, about 6, about 7, about 8, about 9, about 10, about 12, about 14, about 16, about 18, or about 20 linked nucleotides. In some embodiments, the length of the un-hybridized region is 0 to 20 linked nucleotides.

sgRNA

[0218] In some embodiments, compositions comprise a guide nucleic acid and an effector protein without a tracrRNA (e.g., a single guide nucleic acid system), wherein the guide nucleic acid is referred to herein as a sgRNA. A sgRNA may include deoxyribonucleosides, ribonucleosides, chemically modified nucleosides, or any combination thereof. A sgRNA may also include a nucleotide sequence that forms a secondary structure (e.g., one or more hairpin loops) that facilitates the binding of an effector protein to the sgRNA and/or modification activity of an effector protein on a target nucleic acid (e.g., a hairpin region). Such a sequence can be contained within a handle sequence as described herein. A sgRNA may include a handle sequence having a hairpin region, as well as a linker and a repeat sequence. The sgRNA having a handle sequence can have a hairpin region positioned 3′ of the linker and/or repeat sequence. The sgRNA having a handle sequence can have a hairpin region positioned 5′ of the linker and/or repeat sequence. The hairpin region may include a first sequence, a second sequence that is reverse complementary to the first sequence, and a stem-loop linking the first sequence and the second sequence.

[0219] In some embodiments, the handle sequence of a sgRNA comprises a stem-loop structure comprising a stem region and a loop region. In some embodiments, the stem region is 4 to 8 linked nucleotides in length. In some embodiments, the stem region is 5 to 6 linked nucleotides in length. In some embodiments, the stem region is 4 to 5 linked nucleotides in length. In some embodiments, the sgRNA comprises a pseudoknot (e.g., a secondary structure comprising a stem at least partially hybridized to a second stem or half-stem secondary structure). An effector protein may recognize a sgRNA comprising multiple stem regions. In some embodiments, the nucleotide sequences of the multiple stem regions are identical to one another. In some embodiments, the nucleotide sequences of at least one of the multiple stem regions is not identical to those of the others. In some embodiments, the sgRNA comprises at least 2, at least 3, at least 4, or at least 5 stem regions.

[0220] In some embodiments, the length of a handle sequence in a sgRNA is not greater than 50, 56, 66, 67, 68, 69, 70, 71, 72, 73, 95, or 105 linked nucleotides. In some embodiments, the length of a handle sequence in a sgRNA is about 30 to about 120 linked nucleotides. In some embodiments, the length of a handle sequence in a sgRNA is about 50 to about 105, about 50 to about 95, about 50 to about 73, about 50 to about 71, about 50 to about 70, or about 50 to about 69 linked nucleotides. In some embodiments, the length of a handle sequence in a sgRNA is 56 to 105 linked nucleotides, from 56 to 105 linked nucleotides, 66 to 105 linked nucleotides, 67 to 105 linked nucleotides, 68 to 105 linked nucleotides, 69 to 105 linked nucleotides, 70 to 105 linked nucleotides, 71 to 105 linked nucleotides, 72 to 105 linked nucleotides, 73 to 105 linked nucleotides, or 95 to 105 linked nucleotides. In some embodiments, the length of a handle sequence in a sgRNA is 40 to 70 nucleotides. In some embodiments, the length of a handle sequence in a sgRNA is 50, 56, 66, 67, 68, 69, 70, 71, 72, 73, 95, or 105 linked nucleotides. In some embodiments, the length of a handle sequence in a sgRNA is 69 nucleotides.

[0221] An exemplary handle sequence in a sgRNA may comprise, from 5′ to 3′, a 5′ region, a hairpin region, and a 3′ region. In some embodiments, the 5′ region may hybridize to the 3′ region. In some embodiments, the 5′ region does not hybridize to the 3′ region. In some embodiments, the 3′ region is covalently linked to a spacer sequence (e.g., through a phosphodiester bond). In some embodiments, the 5′ region is covalently linked to a spacer sequence (e.g., through a phosphodiester bond).

### Pooling Guide Nucleic Acids

[0222] In some embodiments, compositions, systems or methods provided herein comprise a pool of guide nucleic acids. In some embodiments, the pool of guide nucleic acids were tiled against a target nucleic acid, e.g., the genomic locus of interest or uses thereof. In some embodiments, a guide nucleic acid is selected from a group of guide nucleic acids that have been tiled against a nucleic acid sequence of a genomic locus of interest. The genomic locus of interest may belong to a viral genome, a bacterial genome, or a mammalian genome. Non-limiting examples of viral genomes are an HPV genome, an HIV genome, an influenza genome, or a coronavirus genome. Often, these guide nucleic acids are pooled for detecting a target nucleic acid in a single assay. Pooling of guide nucleic acids may ensure broad spectrum identification, or broad coverage, of a target species within a single reaction. This may be particularly helpful in diseases or indications, like sepsis, that may be caused by multiple organisms. The pool of guide nucleic acids may enhance the detection of a target nucleic using systems of methods described herein relative to detection with a single guide nucleic acid. The pool of guide nucleic acids may ensure broad coverage of the target nucleic acid within a single reaction using the methods described herein. In some embodiments, the pool of guide nucleic acids are collectively complementary to at least 50%, at least 55%, at least 60%, at least 65%, at least 70%, at least 75%, at least 80%, at least 85%, at least 90%, at least 95% or 100% of the target nucleic acid. In some embodiments, at least a portion of the guide nucleic acids of the pool overlap in sequence. In some embodiments, at least a portion of the guide nucleic acids of the pool do not overlap in sequence. In some embodiments, the pool of guide nucleic acids comprises at least 2, at least 3, at least 4, at least 5, or at least 6 guide nucleic acids targeting different sequences of a target nucleic acid.

### VII. Sequence Modifications

[0223] Polypeptides (e.g., effector proteins) and nucleic acids (e.g., engineered guide nucleic acids) described herein can be further modified as described throughout and as further described herein. Examples are modifications of interest that do not alter primary sequence, including chemical derivatization of polypeptides, e.g., acylation, acetylation, carboxylation, amidation, etc. Also included are modifications of glycosylation, e.g. those made by modifying the glycosylation patterns of a polypeptide during its synthesis and processing or in further processing steps; e.g. by exposing the polypeptide to enzymes which affect glycosylation, such as mammalian glycosylating or deglycosylating enzymes. Also embraced are sequences that have phosphorylated amino acid residues, e.g. phosphotyrosine, phosphoserine, or phosphothreonine.

[0224] Modifications disclosed herein can also include modification of described polypeptides and/or engineered guide nucleic acids through any suitable method, such as molecular biological techniques and/or synthetic chemistry, to improve their resistance to proteolytic degradation, to change the target sequence specificity, to optimize solubility properties, to alter protein activity (e.g., transcription modulatory activity, enzymatic activity, etc.) or to render them more suitable. Analogs of such polypeptides include those containing residues other than naturally occurring L-amino acids, e.g. D-amino acids or non-naturally occurring synthetic amino acids. D-amino acids may be substituted for some or all of the amino acid residues. Modifications can also include modifications with non-naturally occurring unnatural amino acids. The particular sequence and the manner of preparation will be determined by convenience, economics, purity required, and the like.

[0225] Modifications can further include the introduction of various groups to polypeptides and/or engineered guide nucleic acids described herein. For example, groups can be introduced during synthesis or during expression of a polypeptide (e.g., an effector protein), which allow for linking to other molecules or to a surface. Thus, e.g., cysteines can be used to make thioethers, histidines for linking to a metal ion complex, carboxyl groups for forming amides or esters, amino groups for forming amides, and the like.

[0226] Modifications can further include modification of nucleic acids described herein (e.g., engineered guide nucleic acids) to provide the nucleic acid with a new or enhanced feature, such as improved stability. Such modifications of a nucleic acid include a base modification, a backbone modification, a sugar modification, or combinations thereof, of one or more nucleotides, nucleosides, or nucleobases in a nucleic acid.

[0227] In some embodiments, nucleic acids (e.g., engineered guide nucleic acids) described herein comprise one or more modifications comprising: 2′O-methyl modified nucleotides, 2′ Fluoro modified nucleotides; locked nucleic acid (LNA) modified nucleotides; peptide nucleic acid (PNA) modified nucleotides; nucleotides with phosphorothioate linkages; a 5′ cap (e.g., a 7-methylguanylate cap (m7G)), phosphorothioates, chiral phosphorothioates, phosphorodithioates, phosphotriesters, aminoalkylphosphotriesters, methyl and other alkyl phosphonates including 3′-alkylene phosphonates, 5′-alkylene phosphonates and chiral phosphonates, phosphinates, phosphoramidates including 3′-amino phosphoramidate and aminoalkyl phosphoramidates, phosphorodiamidates, thionophosphor amidates, thionoalkylphosphonates, thionoalkylphosphotriesters, selenophosphates and boranophosphates having normal 3′-5′ linkages, 2′-5′ linked analogs of these, and those having inverted polarity wherein one or more internucleotide linkages is a 3′ to 3′, 5′ to 5′ or 2′ to 2′ linkage; phosphorothioate and/or heteroatom internucleoside linkages, such as —CH2-NH—O—CH2-, —CH2-N(CH3)-O—CH2- (known as a methylene (methylimino) or MMI backbone), —CH2-O—N(CH3)-CH2-, —CH2-N(CH3)-N(CH3)-CH2- and —O—N(CH3)-CH2-CH2- (wherein the native phosphodiester internucleotide linkage is represented as —O—P(═O)(OH)—O—CH2-); morpholino linkages (formed in part from the sugar portion of a nucleoside); morpholino backbones; phosphorodiamidate or other non-phosphodiester internucleoside linkages; siloxane backbones; sulfide, sulfoxide and sulfone backbones; formacetyl and thioformacetyl backbones; methylene formacetyl and thioformacetyl backbones; riboacetyl backbones; alkene containing backbones; sulfamate backbones; methyleneimino and methylenehydrazino backbones; sulfonate and sulfonamide backbones; amide backbones; other backbone modifications having mixed N, O, S and CH2 component parts; and combinations thereof.

### VIII. Vectors and Multiplexed Expression Vectors

[0228] In some embodiments, compositions and systems provided herein comprise a vector system encoding a polypeptide (e.g., an effector protein) described herein. In some embodiments, compositions and systems provided herein comprise a vector system encoding a guide nucleic acid (e.g., crRNA) described herein. In some embodiments, compositions and systems provided herein comprise a multi-vector system encoding an effector protein and a guide nucleic acid described herein, wherein the guide nucleic acid and the effector protein are encoded by the same or different vectors. In some embodiments, the engineered guide and the engineered effector protein are encoded by different vectors of the system. In some embodiments, a nucleic acid encoding a polypeptide (e.g., an effector protein) comprises an expression vector. In some embodiments, a nucleic acid encoding a polypeptide is a messenger RNA. In some embodiments, an expression vector comprises or encodes an engineered guide nucleic acid. In some embodiments, the expression vector encodes the crRNA.

[0229] In some embodiments, a vector may encode one or more engineered effector proteins. In some embodiments, a vector may encode 1, 2, 3, 4, 5, 6, 7, 8, 9, 10, 11, 12, 13, 14, 15, 16, 17, 18, 19, 20, 21, 22, 23, 24, 25, 26, 27, 28, 29, 30, 31, 32, 33, 34, 35, 36, 37, 38, 39, 40, 41, 42, 43, 44, or 45 engineered effector proteins. In some embodiments, a vector can encode one or more engineered effector proteins comprising an amino acid sequence of any one of the sequences selected from SEQ ID NOS: 1-1614 and 3195-3302.

[0230] In some embodiments, a vector may encode one or more guide nucleic acids. In some embodiments, a vector may encode 1, 2, 3, 4, 5, 6, 7, 8, 9, 10, 11, 12, 13, 14, 15, 16, 17, 18, 19, 20, 21, 22, 23, 24, 25, 26, 27, 28, 29, 30, 31, 32, 33, 34, 35, 36, 37, 38, 39, 40, 41, 42, 43, 44, or 45 different guide nucleic acids.

[0231] In some embodiments, a vector can comprise or encode one or more regulatory elements. Regulatory elements can refer to transcriptional and translational control sequences, such as promoters, enhancers, polyadenylation signals, terminators, protein degradation signals, and the like, that provide for and/or regulate transcription of a non-coding sequence or a coding sequence and/or regulate translation of an encoded polypeptide. In some embodiments, a vector can comprise or encode for one or more additional elements, such as, for example, replication origins, antibiotic resistance (or a nucleic acid encoding the same), a tag (or a nucleic acid encoding the same), selectable markers, and the like.

[0232] Vectors described herein can encode a promoter—a regulatory region on a nucleic acid, such as a DNA sequence, capable of initiating transcription of a downstream (3′ direction) coding or non-coding sequence. As used herein, a promoter can be bound at its 3′ terminus to a nucleic acid the expression or transcription of which is desired, and extends upstream (5′ direction) to include bases or elements necessary to initiate transcription or induce expression, which could be measured at a detectable level. A promoter can comprise a nucleotide sequence, referred to herein as a “promoter sequence”. A promoter sequence can include a transcription initiation site, and one or more protein binding domains responsible for the binding of transcription machinery, such as RNA polymerase. When eukaryotic promoters are used, such promoters can contain “TATA” boxes and “CAT” boxes. Various promoters, including inducible promoters, may be used to drive expression, i.e., transcriptional activation, of the nucleic acid of interest. Accordingly, in some embodiments, the nucleic acid of interest can be operably linked to a promoter.

[0233] Promotors can be any suitable type of promoter envisioned for the compositions, systems, and methods described herein. Examples include constitutively active promoters (e.g., CMV promoter), inducible promoters (e.g., heat shock promoter, tetracycline-regulated promoter, steroid-regulated promoter, metal-regulated promoter, estrogen receptor-regulated promoter, etc.), spatially restricted and/or temporally restricted promoters (e.g., a tissue specific promoter, a cell type specific promoter, etc.), etc. Suitable promoters include, but are not limited to: SV40 early promoter, mouse mammary tumor virus long terminal repeat (LTR) promoter; adenovirus major late promoter (Ad MLP); a herpes simplex virus (HSV) promoter, a cytomegalovirus (CMV) promoter such as the CMV immediate early promoter region (CMVIE), a rous sarcoma virus (RSV) promoter, a human U6 small nuclear promoter (U6), an enhanced U6 promoter, and a human H1 promoter (H1). By transcriptional activation, it is intended that transcription will be increased above basal levels in the target cell by 10 fold, by 100 fold, or by 1000 fold, or more. In addition, vectors used for providing a nucleic acid that, when transcribed, produces an engineered guide nucleic acid and/or a nucleic acid that encodes an effector protein to a cell may include nucleic acid sequences that encode for selectable markers in the target cells, so as to identify cells that have taken up the engineered guide nucleic acid and/or an effector protein.

[0234] In general, vectors provided herein comprise at least one promotor or a combination of promoters driving expression or transcription of one or more genome editing tools described herein. In some embodiments, the viral vector comprises a nucleotide sequence of a promoter. In some embodiments, the viral vector comprises two promoters. In some embodiments, the viral vector comprises three promoters. In some embodiments, the length of the promoter is less than about 500, less than about 400, or less than about 300 linked nucleotides. In some embodiments, the length of the promoter is at least 100 linked nucleotides. Non-limiting examples of promoters include CMV, 7SK, EF1a, RPBSA, hPGK, EFS, SV40, PGK1, Ubc, human beta actin promoter, CAG, TRE, UAS, Ac5, Polyhedrin, CaMKIIa, GAL1, H1, TEF1, GDS, ADH1, CaMV35S, Ubi, U6, MNDU3, MSCV, Ck8e, SPC5-12, Desmin, MND and CAG.

[0235] In some embodiments, the promoter is an inducible promoter that only drives expression of its corresponding gene when a signal is present, e.g., a hormone, a small molecule, a peptide. Non-limiting examples of inducible promoters are the T7 RNA polymerase promoter, the T3 RNA polymerase promoter, the Isopropyl-beta-D-thiogalactopyranoside (IPTG)-regulated promoter, a lactose induced promoter, a heat shock promoter, a tetracycline-regulated promoter (tetracycline-inducible or tetracycline-repressible), a steroid regulated promoter, a metal-regulated promoter, and an estrogen receptor-regulated promoter. In some embodiments, the promoter is an activation-inducible promoter, such as a CD69 promoter, as described further in Kulemzin et al., (2019), BMC Med Genomics, 12:44. In some embodiments, the promoter for expressing effector protein is a muscle-specific promoter. In some embodiments, the muscle-specific promoter comprises Ck8e, SPC5-12, or Desmin promoter sequence. In some embodiments, the promoter for expressing effector protein is a ubiquitous promoter. In some embodiments, the ubiquitous promoter comprises MND or CAG promoter sequence.

[0236] In some embodiments, an effector protein (or a nucleic acid encoding same) and/or an engineered guide nucleic acid (or a nucleic acid that, when transcribed, produces same) are coadministered with a donor nucleic acid. Coadministration can be contact with a target nucleic acid, administered to a cell, such as a host cell, or administered as method of nucleic acid detection, editing, and/or treatment as described herein, in a single vehicle, such as a single expression vector. In certain embodiments, an effector protein (or a nucleic acid encoding same) and/or an engineered guide nucleic acid (or a nucleic acid that, when transcribed, produces same) are not co-administered with donor nucleic acid in a single vehicle. In certain embodiments, an effector protein (or a nucleic acid encoding same), an engineered guide nucleic acid (or a nucleic acid that, when transcribed, produces same), and/or donor nucleic acid are administered in one or more or two or more vehicles, such as one or more, or two or more expression vectors.

### Lipid Particles

[0237] In some embodiments, compositions and systems provided herein comprise a lipid particle. In some embodiments, a lipid particle is a lipid nanoparticle (LNP). In some embodiments, a lipid or a lipid nanoparticle can encapsulate an expression vector. In some embodiments, a lipid or a lipid nanoparticle can encapsulate the effector protein, the sgRNA or crRNA, the nucleic acid encoding the effector protein and/or the DNA molecule encoding the sgRNA or crRNA. LNPs are effective for delivery of nucleic acids. Beneficial properties of LNP include ease of manufacture, low cytotoxicity and immunogenicity, high efficiency of nucleic acid encapsulation and cell transfection, multi-dosing capabilities and flexibility of design (Kulkarni et al., (2018) Nucleic Acid Therapeutics, 28(3):146-157). In some embodiments, a method can comprise contacting a cell with an expression vector. In some embodiments, contacting can comprise electroporation, lipofection, or lipid nanoparticle (LNP) delivery of an expression vector.

### Viral Vectors

[0238] An expression vector can be a viral vector. In some embodiments, a viral vector comprises a nucleic acid to be delivered into a host cell via a recombinantly produced virus or viral particle. The nucleic acid may be single-stranded or double stranded, linear or circular, segmented or non-segmented. The nucleic acid may comprise DNA, RNA, or a combination thereof. In some embodiments, the expression vector is an adeno-associated viral vector. There are a variety of viral vectors that are associated with various types of viruses, including but not limited to retroviruses (e.g., lentiviruses and y-retroviruses), adenoviruses, arenaviruses, alphaviruses, adeno-associated viruses (AAVs), baculoviruses, vaccinia viruses, herpes simplex viruses and poxviruses. A viral vector provided herein can be derived from or based on any such virus. Often the viral vectors provided herein are an adeno-associated viral vector (AAV vector). Generally, an AAV vector has two inverted terminal repeats (ITRs). According, in some embodiments, the viral vector provided herein comprises two inverted terminal repeats of AAV. The DNA sequence in between the ITRs of an AAV vector provided herein may be referred to herein as the sequence encoding the genome editing tools. These genome editing tools can include, but are not limited to, an effector protein, effector protein modifications (e.g., nuclear localization signal (NLS), polyA tail), guide nucleic acid(s), respective promoter(s), and a donor nucleic acid, or combinations thereof. In some embodiments, a nuclear localization signal comprises an entity (e.g., peptide) that facilitates localization of a nucleic acid, protein, or small molecule to the nucleus, when present in a cell that contains a nuclear compartment.

[0239] In general, viral vectors provided herein comprise at least one promotor or a combination of promoters driving expression or transcription of one or more genome editing tools described herein. In some embodiments, the length of the promoter is less than about 500, less than about 400, or less than about 300 linked nucleotides. In some embodiments, the length of the promoter is at least 100 linked nucleotides. Non-limiting examples of promoters include CMV, EF1a, RPBSA, hPGK, EFS, SV40, PGK1, Ubc, human beta actin promoter, CAG, TRE, UAS, Ac5, Polyhedrin, CaMKIIa, GAL1, H1, TEF1, GDS, ADH1, CaMV35S, Ubi, U6, MNDU3, and MSCV. In some embodiments, the promoter is an inducible promoter that only drives expression of its corresponding gene when a signal is present, e.g., a hormone, a small molecule, a peptide. Non-limiting examples of inducible promoters are the T7 RNA polymerase promoter, the T3 RNA polymerase promoter, the Isopropyl-beta-D-thiogalactopyranoside (IPTG)-regulated promoter, a lactose induced promoter, a heat shock promoter, a tetracycline-regulated promoter (tetracycline-inducible or tetracycline-repressible), a steroid regulated promoter, a metal-regulated promoter, and an estrogen receptor-regulated promoter. In some embodiments, the promoter is an activation-inducible promoter, such as a CD69 promoter, as described further in Kulemzin et al., (2019), BMC Med Genomics, 12:44.

[0240] In some embodiments, the coding region of the AAV vector forms an intramolecular double-stranded DNA template thereby generating an AAV vector that is a self-complementary AAV (scAAV) vector. In general, the sequence encoding the genome editing tools of an scAAV vector has a length of about 2 kb to about 3 kb. The scAAV vector can comprise nucleotide sequences encoding an effector protein, providing guide nucleic acids described herein, and a donor nucleic acid described herein. In some embodiments, the AAV vector provided herein is a self-inactivating AAV vector.

[0241] In some embodiments, an AAV vector provided herein comprises a modification, such as an insertion, deletion, chemical alteration, or synthetic modification, relative to a wild-type AAV vector.

[0242] In some embodiments, the viral particle that delivers the viral vector described herein is an AAV. AAVs are characterized by their serotype. Non-limiting examples of AAV serotypes are AAV1, AAV2, AAV3, AAV4, AAV5, AAV6, AAV7, AAV8, AAV9, AAV10, AAV11, AAV12, scAAV, AAV-rh10, chimeric or hybrid AAV, or any combination, derivative, or variant thereof.

### Producing AAV Particles

[0243] The AAV particles described herein can be referred to as recombinant AAV (rAAV). Often, rAAV particles are generated by transfecting AAV producing cells with an AAV-containing plasmid carrying the sequence encoding the genome editing tools, a plasmid that carries viral encoding regions, i.e., Rep and Cap gene regions; and a plasmid that provides the helper genes such as E1A, E1B, E2A, E40RF6 and VA. In some embodiments, the AAV producing cells are mammalian cells. In some embodiments, host cells for rAAV viral particle production are mammalian cells. In some embodiments, a mammalian cell for rAAV viral particle production is a COS cell, a HEK293T cell, a HeLa cell, a KB cell, a derivative thereof, or a combination thereof. In some embodiments, rAAV virus particles can be produced in the mammalian cell culture system by providing the rAAV plasmid to the mammalian cell. In some embodiments, producing rAAV virus particles in a mammalian cell can comprise transfecting vectors that express the rep protein, the capsid protein, and the gene-of-interest expression construct flanked by the ITR sequence on the 5′ and 3′ ends. Methods of such processes are provided in, for example, Naso et al., BioDrugs, 2017 August; 31(4):317-334 and Benskey et al., (2019), Methods Mol Biol., 1937:3-26, each of which is incorporated by reference in their entireties.

[0244] In some embodiments, rAAV is produced in a non-mammalian cell. In some embodiments, rAAV is produced in an insect cell. In some embodiments, an insect cell for producing rAAV viral particles comprises a Sf9 cell. In some embodiments, production of rAAV virus particles in insect cells can comprise baculovirus. In some embodiments, production of rAAV virus particles in insect cells can comprise infecting the insect cells with three recombinant baculoviruses, one carrying the cap gene, one carrying the rep gene, and one carrying the gene-of-interest expression construct enclosed by an ITR on both the 5′ and 3′ end. In some embodiments, rAAV virus particles are produced by the One Bac system. In some embodiments, rAAV virus particles can be produced by the Two Bac system. In some embodiments, in the Two Bac system, the rep gene and the cap gene of the AAV is integrated into one baculovirus virus genome, and the ITR sequence and the gene-of-interest expression construct is integrated into another baculovirus virus genome. In some embodiments, in the One Bac system, an insect cell line that expresses both the rep protein and the capsid protein is established and infected with a baculovirus virus integrated with the ITR sequence and the gene-of-interest expression construct. Details of such processes are provided in, for example, Smith et. al., (1983), Mol. Cell. Biol., 3(12):2156-65; Urabe et al., (2002), Hum. Gene. Ther., 1; 13(16):1935-43; and Benskey et al., (2019), Methods Mol Biol., 1937:3-26, each of which is incorporated by reference in its entirety

### IX. Systems

[0245] Disclosed herein, in some aspects, are systems for modifying a nucleic acid, comprising any one of the effector proteins described herein, or a multimeric complex thereof. In some instances, systems comprise a guide nucleic acid described herein. Systems may be used to detect, modify, or edit a target nucleic acid.

[0246] In some embodiments, the effector proteins having reduced or eliminated catalytic activity relative to that of the naturally-occurring effector protein, but having the ability to interact with a guide nucleic acid disclosed herein (such as, a dCas protein) associates with, or forms a complex with an engineered transposon system to provide a CRISPR-associated transposase (CAST) system for improved RNA-guided DNA integration. The engineered transposon system may comprise one or more transposase proteins, including a functional TnsB protein, a functional TnsC protein and/or a functional TniQ protein. In some embodiments, the engineered transposon system comprises a functional TnsB protein, a functional TnsC protein and a functional TniQ protein. In some embodiments, the engineered transposon system lacks a functional TnsA protein. Further details on transposases that may be used in association with the effector proteins disclosed herein are provided in Peters J E, et al., Proc Natl Acad Sci USA. 2017 Aug. 29; 114(35):E7358-E7366; Strecker, J. et al. Science 365, 48-53 (2019); Saito M, et al., Cell. 2021 Apr. 29; 184(9):2441-2453.e18; Petassi M T, et al., Cell. 2020 Dec. 23; 183(7):1757-1771, and Klompe S E, et al., Nature. 2019 July; 571(7764):219-225, the contents of each of which are herein incorporated by reference in their entireties for all purposes. In some embodiments, the effector proteins disclosed herein are capable of directing the engineered transposon system to a target insertion site of the target nucleic acid.

[0247] In some embodiments, the disclosed system for RNA-guided DNA integration comprises the following elements: (a) a CRISPR-Cas system, comprising: (i) any one of the dCas proteins disclosed herein, and (ii) a guide RNA (gRNA); (b) an engineered transposon system, wherein the engineered transposon system comprises a functional TnsB protein, a functional TnsC protein and a functional TniQ protein, but lacks a functional TnsA protein; (c) at least one nicking effector protein (e.g. at least one effector protein having nickase activity disclosed herein, or the nickase domain therefrom, and/or one or more vectors encoding the effector protein having nickase activity); and (d) at least one donor nucleic acid to be integrated into a target nucleic acid.

[0248] In some embodiments, the effector protein with nickase activity disclosed herein is fused to the TnsB protein. In yet other embodiments, the CRISPR-Cas system comprises a effector protein having nickase activity disclosed herein.

[0249] In the RNA-guided DNA integration systems disclosed herein, the 3′ nicking activity of TnsB is combined with the catalytic activity (e.g. 5′ nicking activity) of an effector protein having nickase activity disclosed herein to catalyze the “cut and paste” insertion of the donor nucleic acid into the target site in a targeted, RNA-mediated manner through the function of any one of the dCas proteins disclosed herein. Thus, the RNA-guided DNA integration systems disclosed herein exhibit not only the simplicity and orientation predictability characteristic of the Type V-K CRISPR-associated transposase (CAST) systems, but also the on-target specificity and “cut-and-paste” capability of the Type I CAST systems.

[0250] Systems may be used to modify the activity or expression of a target nucleic acid. In some instances, systems comprise an effector protein described herein, a reagent, support medium, or a combination thereof. In some instances, systems comprise a fusion protein described herein. In some instances, effector proteins comprise an amino acid sequence that is at least 70%, at least 75%, at least 80%, at least 85%, at least 90%, at least 95%, or 100% identical to any one of the amino acid sequences selected from SEQ ID NOS: 1-1614 and 3195-3302. In some instances, the amino acid sequence of the effector protein is at least 70%, at least 75%, at least 80%, at least 85%, at least 90%, at least 95%, or 100% identical to any one of the amino acid sequences selected from SEQ ID NOS: 1-1614 and 3195-3302.

[0251] In some embodiments, systems comprise an effector protein described herein, a guide nucleic acid described herein, a reagent, support medium, or a combination thereof. In some embodiments, the effector protein comprises an effector protein, or a fusion protein thereof, described herein. In some embodiments, effector protein comprises an amino acid sequence that is at least 65%, at least 70%, at least 75%, at least 80%, at least 85%, at least 90%, at least 95%, or 100% identical to any one of the sequences selected from SEQ ID NOS: 1-1614 and 3195-3302. In some embodiments, the amino acid sequence of the effector protein is at least 65%, at least 70%, at least 75%, at least 80%, at least 85%, at least 90%, at least 95%, or 100% identical to any one of the sequences selected from SEQ ID NOS: 1-1614 and 3195-3302.

[0252] Systems may be used for detecting the presence of a target nucleic acid associated with or causative of a disease, such as cancer, a genetic disorder, or an infection. In some instances, systems are useful for phenotyping, genotyping, or determining ancestry. In some instances, systems are useful for modifying a target nucleic acid associated with or causative of a disease, such as cancer, a genetic disorder, or an infection. Unless specified otherwise, systems include kits and may be referred to as kits. Unless specified otherwise, systems include devices and may also be referred to as devices. Systems described herein may be provided in the form of a companion diagnostic assay or device, a point-of-care assay or device, or an over-the-counter diagnostic assay/device.

[0253] Reagents and effector proteins of various systems may be provided in a reagent chamber or on the support medium. Alternatively, the reagent and/or effector protein may be contacted with the reagent chamber or the support medium by the individual using the system. An exemplary reagent chamber is a test well or container. The opening of the reagent chamber may be large enough to accommodate the support medium. Optionally, the system comprises a buffer and a dropper. The buffer may be provided in a dropper bottle for ease of dispensing. The dropper may be disposable and transfer a fixed volume. The dropper may be used to place a sample into the reagent chamber or on the support medium.

### System Solutions

[0254] In general, systems comprise a solution in which the activity of an effector protein occurs. Often, the solution comprises or consists essentially of a buffer. The solution or buffer may comprise a buffering agent, a salt, a crowding agent, a detergent, a reducing agent, a competitor, or a combination thereof. Often the buffer is the primary component or the basis for the solution in which the activity occurs. Thus, concentrations for components of buffers described herein (e.g., buffering agents, salts, crowding agents, detergents, reducing agents, and competitors) are the same or essentially the same as the concentration of these components in the solution in which the activity occurs. In some instances, a buffer is required for cell lysis activity or viral lysis activity.

[0255] In some instances, systems comprise a buffer, wherein the buffer comprise at least one buffering agent. Exemplary buffering agents include HEPES, TRIS, MES, ADA, PIPES, ACES, MOPSO, BIS-TRIS propane, BES, MOPS, TES, DISO, Trizma, TRICINE, GLY-GLY, HEPPS, BICINE, TAPS, A MPD, A MPSO, CHES, CAPSO, AMP, CAPS, phosphate, citrate, acetate, imidazole, or any combination thereof. In some instances, the concentration of the buffering agent in the buffer is 1 mM to 200 mM. A buffer compatible with an effector protein may comprise a buffering agent at a concentration of 10 mM to 30 mM. A buffer compatible with an effector protein may comprise a buffering agent at a concentration of about 20 mM. A buffering agent may provide a pH for the buffer or the solution in which the activity of the effector protein occurs. The pH may be 3 to 4, 3.5 to 4.5, 4 to 5, 4.5 to 5.5, 5 to 6, 5.5 to 6.5, 6 to 7, 6.5 to 7.5, 7 to 8, 7.5 to 8.5, 8 to 9, 8.5 to 9.5, 9 to 10, or 9.5 to 10.5.

[0256] In some instances, systems comprise a solution, wherein the solution comprises at least one salt. In some instances, the at least one salt is selected from potassium acetate, magnesium acetate, sodium chloride, potassium chloride, magnesium chloride, calcium chloride, and any combination thereof. In some instances, the concentration of the at least one salt in the solution is 5 mM to 100 mM, 5 mM to 10 mM, 1 mM to 60 mM, or 1 mM to 10 mM. In some instances, the concentration of the at least one salt is about 105 mM. In some instances, the concentration of the at least one salt is about 55 mM. In some instances, the concentration of the at least one salt is about 7 mM. In some instances, the solution comprises potassium acetate and magnesium acetate. In some instances, the solution comprises sodium chloride and magnesium chloride. In some instances, the solution comprises potassium chloride and magnesium chloride. In some instances, the salt is a magnesium salt and the concentration of magnesium in the solution is at least 5 mM, 7 mM, at least 9 mM, at least 11 mM, at least 13 mM, or at least 15 mM. In some instances, the concentration of magnesium is less than 20 mM, less than 18 mM or less than 16 mM.

[0257] In some instances, systems comprise a solution, wherein the solution comprises at least one crowding agent. A crowding agent may reduce the volume of solvent available for other molecules in the solution, thereby increasing the effective concentrations of said molecules. Exemplary crowding agents include glycerol and bovine serum albumin. In some instances, the crowding agent is glycerol. In some instances, the concentration of the crowding agent in the solution is 0.01% (v/v) to 10% (v/v). In some instances, the concentration of the crowding agent in the solution is 0.5% (v/v) to 10% (v/v).

[0258] In some instances, systems comprise a solution, wherein the solution comprises at least one detergent. Exemplary detergents include Tween, Triton-X, and IGEPAL. A solution may comprise Tween, Triton-X, or any combination thereof. A solution may comprise Triton-X. A solution may comprise IGEPAL CA-630. In some instances, the concentration of the detergent in the solution is 2% (v/v) or less. In some instances, the concentration of the detergent in the solution is 1% (v/v) or less. In some instances, the concentration of the detergent in the solution is 0.00001% (v/v) to 0.01% (v/v). In some instances, the concentration of the detergent in the solution is about 0.01% (v/v).

[0259] In some instances, systems comprise a solution, wherein the solution comprises at least one reducing agent. Exemplary reducing agents comprise dithiothreitol (DTT), B-mercaptoethanol (BME), or tris(2-carboxyethyl) phosphine (TCEP). In some instances, the reducing agent is DTT. In some instances, the concentration of the reducing agent in the solution is 0.01 mM to 100 mM. In some instances, the concentration of the reducing agent in the solution is 0.1 mM to 10 mM. In some instances, the concentration of the reducing agent in the solution is 0.5 mM to 2 mM. In some instances, the concentration of the reducing agent in the solution is 0.01 mM to 100 mM. In some instances, the concentration of the reducing agent in the solution is 0.1 mM to 10 mM. In some instances, the concentration of the reducing agent in the solution is about 1 mM.

[0260] In some instances, systems comprise a solution, wherein the solution comprises a competitor. In general, competitors compete with the target nucleic acid or the reporter nucleic acid for cleavage by the effector protein or a dimer thereof. Exemplary competitors include heparin, and imidazole, and salmon sperm DNA. In some instances, the concentration of the competitor in the solution is 1 μg/mL to 100 μg/mL. In some instances, the concentration of the competitor in the solution is 40 μg/mL to 60 μg/mL.

[0261] In some instances, systems comprise a solution, wherein the solution comprises a co-factor. In some instances, the co-factor allows an effector protein or a multimeric complex thereof to perform a function, including pre-crRNA processing and/or target nucleic acid cleavage. The suitability of a cofactor for an effector protein or a multimeric complex thereof may be assessed, such as by methods based on those described by Sundaresan et al. (Cell Rep. 2017 Dec. 26; 21(13): 3728-3739). In some instances, an effector or a multimeric complex thereof forms a complex with a co-factor. In some instances, the co-factor is a divalent metal ion. In some instances, the divalent metal ion is selected from Mg²⁺, Mn²⁺, Zn²⁺, Ca²⁺, Cu²⁺. In some instances, the divalent metal ion is Mg²⁺. In some instances, the co-factor is Mg²⁺.

### Reporters

[0262] In some instances, systems disclosed herein comprise a reporter. By way of non-limiting and illustrative example, a reporter may comprise a single stranded nucleic acid and a detection moiety (e.g., a labeled single stranded RNA reporter), wherein the nucleic acid is capable of being cleaved by an effector protein (e.g., a CRISPR/Cas protein as disclosed herein) or a multimeric complex thereof, releasing the detection moiety, and, generating a detectable signal. As used herein, “reporter” is used interchangeably with “reporter nucleic acid” or “reporter molecule.” The effector proteins disclosed herein, activated upon hybridization of a guide nucleic acid to a target nucleic acid, may cleave the reporter. Cleaving the “reporter” may be referred to herein as cleaving the “reporter nucleic acid,” the “reporter molecule,” or the “nucleic acid of the reporter.” Reporters may comprise RNA. Reporters may comprise DNA. Reporters may be double-stranded. Reporters may be single-stranded.

[0263] In some instances, reporters comprise a protein capable of generating a signal. A signal may be a calorimetric, potentiometric, amperometric, optical (e.g., fluorescent, colorimetric, etc.), or piezo-electric signal. In some instances, the reporter comprises a detection moiety. Suitable detectable labels and/or moieties that may provide a signal include, but are not limited to, an enzyme, a radioisotope, a member of a specific binding pair; a fluorophore; a fluorescent protein; a quantum dot; and the like.

[0264] In some instances, the reporter comprises a detection moiety and a quenching moiety. In some instances, the reporter comprises a cleavage site, wherein the detection moiety is located at a first site on the reporter and the quenching moiety is located at a second site on the reporter, wherein the first site and the second site are separated by the cleavage site. Sometimes the quenching moiety is a fluorescence quenching moiety. In some instances, the quenching moiety is 5′ to the cleavage site and the detection moiety is 3′ to the cleavage site. In some instances, the detection moiety is 5′ to the cleavage site and the quenching moiety is 3′ to the cleavage site. Sometimes the quenching moiety is at the 5′ terminus of the nucleic acid of a reporter. Sometimes the detection moiety is at the 3′ terminus of the nucleic acid of a reporter. In some instances, the detection moiety is at the 5′ terminus of the nucleic acid of a reporter. In some instances, the quenching moiety is at the 3′ terminus of the nucleic acid of a reporter.

[0265] Suitable fluorescent proteins include, but are not limited to, green fluorescent protein (GFP) or variants thereof, blue fluorescent variant of GFP (BFP), cyan fluorescent variant of GFP (CFP), yellow fluorescent variant of GFP (YFP), enhanced GFP (EGFP), enhanced CFP (ECFP), enhanced YFP (EYFP), GFPS65T, Emerald, Topaz (TYFP), Venus, Citrine, mCitrine, GFPuv, destabilised EGFP (dEGFP), destabilised ECFP (dECFP), destabilised EYFP (dEYFP), mCFPm, Cerulean, T-Sapphire, CyPet, YPet, mKO, HcRed, t-HcRed, DsRed, DsRed2, DsRed-monomer, J-Red, dimer2, t-dimer2(12), mRFP1, pocilloporin, Renilla GFP, Monster GFP, paGFP, Kaede protein and kindling protein, Phycobiliproteins and Phycobiliprotein conjugates including B-Phycoerythrin, R-Phycoerythrin and Allophycocyanin. Suitable enzymes include, but are not limited to, horse radish peroxidase (HRP), alkaline phosphatase (AP), beta-galactosidase (GAL), glucose-6-phosphate dehydrogenase, beta-N-acetylglucosaminidase, (3-glucuronidase, invertase, Xanthine Oxidase, firefly luciferase, and glucose oxidase (GO).

[0266] In some instances, the detection moiety comprises an invertase. The substrate of the invertase may be sucrose. A DNS reagent may be included in the system to produce a colorimetric change when the invertase converts sucrose to glucose. In some instances, the reporter nucleic acid and invertase are conjugated using a heterobifunctional linker via sulfo-SMCC chemistry.

[0267] Suitable fluorophores may provide a detectable fluorescence signal in the same range as 6-Fluorescein (Integrated DNA Technologies), IRDye 700 (Integrated DNA Technologies), TYE 665 (Integrated DNA Technologies), Alex Fluor 594 (Integrated DNA Technologies), or ATTO TM 633 (NHS Ester) (Integrated DNA Technologies). Non-limiting examples of fluorophores are fluorescein amidite, 6-Fluorescein, IRDye 700, TYE 665, Alex Fluor 594, or ATTO TM 633 (NHS Ester). The fluorophore may be an infrared fluorophore. The fluorophore may emit fluorescence in the range of 500 nm and 720 nm. In some instances, the fluorophore emits fluorescence at a wavelength of 700 nm or higher. In other cases, the fluorophore emits fluorescence at about 665 nm. In some instances, the fluorophore emits fluorescence in the range of 500 nm to 520 nm, 500 nm to 540 nm, 500 nm to 590 nm, 590 nm to 600 nm, 600 nm to 610 nm, 610 nm to 620 nm, 620 nm to 630 nm, 630 nm to 640 nm, 640 nm to 650 nm, 650 nm to 660 nm, 660 nm to 670 nm, 670 nm to 680 nm, 690 nm to 690 nm, 690 nm to 700 nm, 700 nm to 710 nm, 710 nm to 720 nm, or 720 nm to 730 nm. In some instances, the fluorophore emits fluorescence in the range 450 nm to 750 nm, 500 nm to 650 nm, or 550 to 650 nm.

[0268] Systems may comprise a quenching moiety. A quenching moiety may be chosen based on its ability to quench the detection moiety. A quenching moiety may be a non-fluorescent fluorescence quencher. A quenching moiety may quench a detection moiety that emits fluorescence in the range of 500 nm and 720 nm. A quenching moiety may quench a detection moiety that emits fluorescence in the range of 500 nm and 720 nm. In some instances, the quenching moiety quenches a detection moiety that emits fluorescence at a wavelength of 700 nm or higher. In other cases, the quenching moiety quenches a detection moiety that emits fluorescence at about 660 nm or about 670 nm. In some instances, the quenching moiety quenches a detection moiety that emits fluorescence in the range of 500 to 520, 500 to 540, 500 to 590, 590 to 600, 600 to 610, 610 to 620, 620 to 630, 630 to 640, 640 to 650, 650 to 660, 660 to 670, 670 to 680, 690 to 690, 690 to 700, 700 to 710, 710 to 720, or 720 to 730 nm. In some instances, the quenching moiety quenches a detection moiety that emits fluorescence in the range 450 nm to 750 nm, 500 nm to 650 nm, or 550 to 650 nm. A quenching moiety may quench fluorescein amidite, 6-Fluorescein, IRDye 700, TYE 665, Alex Fluor 594, or ATTO TM 633 (NHS Ester). A quenching moiety may be Iowa Black RQ, Iowa Black FQ or IRDye QC-1 Quencher. A quenching moiety may quench fluorescein amidite, 6-Fluorescein (Integrated DNA Technologies), IRDye 700 (Integrated DNA Technologies), TYE 665 (Integrated DNA Technologies), Alex Fluor 594 (Integrated DNA Technologies), or ATTO TM 633 (NHS Ester) (Integrated DNA Technologies). A quenching moiety may be Iowa Black RQ (Integrated DNA Technologies), Iowa Black FQ (Integrated DNA Technologies) or IRDye QC-1 Quencher (LiCor). Any of the quenching moieties described herein may be from any commercially available source, may be an alternative with a similar function, a generic, or a non-tradename of the quenching moieties listed.

[0269] The generation of the detectable signal from the release of the detection moiety indicates that cleavage by the effector protein has occurred and that the sample contains the target nucleic acid. In some instances, the detection moiety comprises a fluorescent dye. Sometimes the detection moiety comprises a fluorescence resonance energy transfer (FRET) pair. In some instances, the detection moiety comprises an infrared (IR) dye. In some instances, the detection moiety comprises an ultraviolet (UV) dye. Alternatively, or in combination, the detection moiety comprises a protein. Sometimes the detection moiety comprises a biotin. Sometimes the detection moiety comprises at least one of avidin or streptavidin. In some instances, the detection moiety comprises a polysaccharide, a polymer, or a nanoparticle. In some instances, the detection moiety comprises a gold nanoparticle or a latex nanoparticle.

[0270] A detection moiety may be any moiety capable of generating a calorimetric, potentiometric, amperometric, optical (e.g., fluorescent, colorimetric, etc.), or piezo-electric signal. A nucleic acid of a reporter, sometimes, is protein-nucleic acid that is capable of generating a calorimetric, potentiometric, amperometric, optical (e.g., fluorescent, colorimetric, etc.), or piezo-electric signal upon cleavage of the nucleic acid. Often a calorimetric signal is heat produced after cleavage of the nucleic acids of a reporter. Sometimes, a calorimetric signal is heat absorbed after cleavage of the nucleic acids of a reporter. A potentiometric signal, for example, is electrical potential produced after cleavage of the nucleic acids of a reporter. An amperometric signal may be movement of electrons produced after the cleavage of nucleic acid of a reporter. Often, the signal is an optical signal, such as a colorimetric signal or a fluorescence signal. An optical signal is, for example, a light output produced after the cleavage of the nucleic acids of a reporter. Sometimes, an optical signal is a change in light absorbance between before and after the cleavage of nucleic acids of a reporter. Often, a piezo-electric signal is a change in mass between before and after the cleavage of the nucleic acid of a reporter.

[0271] The detectable signal may be a colorimetric signal or a signal visible by eye. In some instances, the detectable signal may be fluorescent, electrical, chemical, electrochemical, or magnetic. In some instances, the first detection signal may be generated by binding of the detection moiety to the capture molecule in the detection region, where the first detection signal indicates that the sample contained the target nucleic acid. Sometimes systems are capable of detecting more than one type of target nucleic acid, wherein the system comprises more than one type of guide nucleic acid and more than one type of reporter nucleic acid. In some instances, the detectable signal may be generated directly by the cleavage event. Alternatively, or in combination, the detectable signal may be generated indirectly by the signal event. Sometimes the detectable signal is not a fluorescent signal. In some instances, the detectable signal may be a colorimetric or color-based signal. In some instances, the detected target nucleic acid may be identified based on its spatial location on the detection region of the support medium. In some instances, the second detectable signal may be generated in a spatially distinct location than the first generated signal.

[0272] In some instances, the reporter nucleic acid is a single-stranded nucleic acid sequence comprising ribonucleotides. The nucleic acid of a reporter may be a single-stranded nucleic acid sequence comprising at least one ribonucleotide. In some instances, the nucleic acid of a reporter is a single-stranded nucleic acid comprising at least one ribonucleotide residue at an internal position that functions as a cleavage site. In some instances, the nucleic acid of a reporter comprises at least 2, at least 3, at least 4, at least 5, at least 6, at least 7, at least 8, at least 9, or at least 10 ribonucleotide residues at an internal position. In some instances, the nucleic acid of a reporter comprises from 2 to 10, from 3 to 9, from 4 to 8, or from 5 to 7 ribonucleotide residues at an internal position. Sometimes the ribonucleotide residues are continuous. Alternatively, the ribonucleotide residues are interspersed in between non-ribonucleotide residues. In some instances, the nucleic acid of a reporter has only ribonucleotide residues. In some instances, the nucleic acid of a reporter has only deoxyribonucleotide residues. In some instances, the nucleic acid comprises nucleotides resistant to cleavage by the effector protein described herein. In some instances, the nucleic acid of a reporter comprises synthetic nucleotides. In some instances, the nucleic acid of a reporter comprises at least one ribonucleotide residue and at least one non-ribonucleotide residue.

[0273] In some instances, the nucleic acid of a reporter comprises at least one uracil ribonucleotide. In some instances, the nucleic acid of a reporter comprises at least two uracil ribonucleotides. Sometimes the nucleic acid of a reporter has only uracil ribonucleotides. In some instances, the nucleic acid of a reporter comprises at least one adenine ribonucleotide. In some instances, the nucleic acid of a reporter comprises at least two adenine ribonucleotide. In some instances, the nucleic acid of a reporter has only adenine ribonucleotides. In some instances, the nucleic acid of a reporter comprises at least one cytosine ribonucleotide. In some instances, the nucleic acid of a reporter comprises at least two cytosine ribonucleotide. In some instances, the nucleic acid of a reporter comprises at least one guanine ribonucleotide. In some instances, the nucleic acid of a reporter comprises at least two guanine ribonucleotide. In some instances, a nucleic acid of a reporter comprises a single unmodified ribonucleotide. In some instances, a nucleic acid of a reporter comprises only unmodified deoxyribonucleotides.

[0274] In some instances, the nucleic acid of a reporter is 5 to 20, 5 to 15, 5 to 10, 7 to 20, 7 to 15, or 7 to 10 nucleotides in length. In some instances, the nucleic acid of a reporter is 3 to 20, 4 to 10, 5 to 10, or 5 to 8 nucleotides in length. In some instances, the nucleic acid of a reporter is 5 to 12 nucleotides in length. In some instances, the reporter nucleic acid is at least 2, at least 3, at least 4, at least 5, at least 6, at least 7, at least 8, at least 9, at least 10, at least 11, at least 12, at least 13, at least 14, at least 15, at least 16, at least 17, at least 18, at least 19, at least 20, at least 21, at least 22, at least 23, at least 24, at least 25, at least 26, at least 27, at least 28, at least 29, or at least 30 nucleotides in length. In some instances, the reporter nucleic acid is 2, 3, 4, 5, 6, 7, 8, 9, 10, 11, 12, 13, 14, 15, 16, 17, 18, 19, 20, 21, 22, 23, 24, 25, 26, 27, 28, 29, or 30 nucleotides in length.

[0275] In some instances, systems comprise a plurality of reporters. The plurality of reporters may comprise a plurality of signals. In some instances, systems comprise at least 2, at least 3, at least 4, at least 5, at least 6, at least 7, at least 8, at least 9, at least 10, at least 11, at least 12, at least 13, at least 14, at least 15, at least 20, at least 30, at least 40, or at least 50 reporters. In some instances, there are 2 to 50, 3 to 40, 4 to 30, 5 to 20, or 6 to 10 different reporters.

[0276] In some instances, systems comprise an effector protein and a reporter nucleic acid configured to undergo trans cleavage by the effector protein. Trans cleavage of the reporter may generate a signal from reporter or alter a signal from the reporter. In some instances, the signal is an optical signal, such as a fluorescence signal or absorbance band. Trans cleavage of the reporter may alter the wavelength, intensity, or polarization of the optical signal. For example, the reporter may comprise a fluorophore and a quencher, such that trans cleavage of the reporter separates the fluorophore and the quencher thereby increasing a fluorescence signal from the fluorophore. Herein, detection of reporter cleavage to determine the presence of a target nucleic acid sequence may be referred to as ‘DETECTR’. In some instances described herein is a method of assaying for a target nucleic acid in a sample comprising contacting the target nucleic acid with an effector protein, a non-naturally occurring guide nucleic acid that hybridizes to a segment of the target nucleic acid, and a reporter nucleic acid, and assaying for a change in a signal, wherein the change in the signal is produced by cleavage of the reporter nucleic acid.

[0277] In the presence of a large amount of non-target nucleic acids, an activity of an effector protein (e.g., an effector protein as disclosed herein) may be inhibited. This is because the activated effector proteins collaterally cleave any nucleic acids. If total nucleic acids are present in large amounts, they may outcompete reporters for the effector proteins. In some instances, systems comprise an excess of reporter(s), such that when the system is operated and a solution of the system comprising the reporter is combined with a sample comprising a target nucleic acid, the concentration of the reporter in the combined solution-sample is greater than the concentration of the target nucleic acid. In some instances, the sample comprises amplified target nucleic acid. In some instances, the sample comprises an unamplified target nucleic acid. In some instances, the concentration of the reporter is greater than the concentration of target nucleic acids and non-target nucleic acids. The non-target nucleic acids may be from the original sample, either lysed or unlysed. The non-target nucleic acids may comprise byproducts of amplification. In some instances, systems comprise a reporter wherein the concentration of the reporter in a solution 1.5 fold, at least 2 fold, at least 3 fold, at least 4 fold, at least 5 fold, at least 6 fold, at least 7 fold, at least 8 fold, at least 9 fold, at least 10 fold, at least 11 fold, at least 12 fold, at least 13 fold, at least 14 fold, at least 15 fold, at least 16 fold, at least 17 fold, at least 18 fold, at least 19 fold, at least 20 fold, at least 30 fold, at least 40 fold, at least 50 fold, at least 60 fold, at least 70 fold, at least 80 fold, at least 90 fold, at least 100 fold excess of total nucleic acids. 1.5 fold to 100 fold, 2 fold to 10 fold, 10 fold to 20 fold, 20 fold to 30 fold, 30 fold to 40 fold, 40 fold to 50 fold, 50 fold to 60 fold, 60 fold to 70 fold, 70 fold to 80 fold, 80 fold to 90 fold, 90 fold to 100 fold, 1.5 fold to 10 fold, 1.5 fold to 20 fold, 10 fold to 40 fold, 20 fold to 60 fold, or 10 fold to 80 fold excess of total nucleic acids.

### Amplification Reagents/Components

[0278] In some instances, systems described herein comprise a reagent or component for amplifying a nucleic acid. Non-limiting examples of reagents for amplifying a nucleic acid include polymerases, primers, and nucleotides. In some instances, systems comprise reagents for nucleic acid amplification of a target nucleic acid in a sample. Nucleic acid amplification of the target nucleic acid may improve at least one of sensitivity, specificity, or accuracy of the assay in detecting the target nucleic acid. In some instances, nucleic acid amplification is isothermal nucleic acid amplification, providing for the use of the system or system in remote regions or low resource settings without specialized equipment for amplification. In some instances, amplification of the target nucleic acid increases the concentration of the target nucleic acid in the sample relative to the concentration of nucleic acids that do not correspond to the target nucleic acid.

[0279] The reagents for nucleic acid amplification may comprise a recombinase, an oligonucleotide primer, a single-stranded DNA binding (SSB) protein, a polymerase, or a combination thereof that is suitable for an amplification reaction. Non-limiting examples of amplification reactions are transcription mediated amplification (TMA), helicase dependent amplification (HDA), or circular helicase dependent amplification (cHDA), strand displacement amplification (SDA), recombinase polymerase amplification (RPA), loop mediated amplification (LAMP), exponential amplification reaction (EXPAR), rolling circle amplification (RCA), ligase chain reaction (LCR), simple method amplifying RNA targets (SMART), single primer isothermal amplification (SPIA), multiple displacement amplification (MDA), nucleic acid sequence based amplification (NASBA), hinge-initiated primer-dependent amplification of nucleic acids (HIP), nicking enzyme amplification reaction (NEAR), and improved multiple displacement amplification (IMDA).

[0280] In some instances, systems comprise a PCR tube, a PCR well or a PCR plate. The wells of the PCR plate may be pre-aliquoted with the reagent for amplifying a nucleic acid, as well as a guide nucleic acid, an effector protein, a multimeric complex, or any combination thereof. The wells of the PCR plate may be pre-aliquoted with a guide nucleic acid targeting a target sequence, an effector protein capable of being activated when complexed with the guide nucleic acid and the target sequence, and at least one population of a single stranded reporter nucleic acid comprising a detection moiety. A user may thus add the biological sample of interest to a well of the pre-aliquoted PCR plate and measure for the detectable signal with a fluorescent light reader or a visible light reader.

[0281] In some instances, systems comprise a PCR plate; a guide nucleic acid targeting a target sequence; an effector protein capable of being activated when complexed with the guide nucleic acid and the target sequence; and a single stranded reporter nucleic acid comprising a detection moiety, wherein the reporter nucleic acid is capable of being cleaved by the activated nuclease, thereby generating a detectable signal.

[0282] In some instances, systems comprise a support medium; a guide nucleic acid targeting a target sequence; and an effector protein capable of being activated when complexed with the guide nucleic acid and the target sequence. In some instances, nucleic acid amplification is performed in a nucleic acid amplification region on the support medium. Alternatively, or in combination, the nucleic acid amplification is performed in a reagent chamber, and the resulting sample is applied to the support medium.

[0283] In some instances, a system for modifying a target nucleic acid comprises a PCR plate; a guide nucleic acid targeting a target sequence; and an effector protein capable of being activated when complexed with the guide nucleic acid and the target sequence. The wells of the PCR plate may be pre-aliquoted with the guide nucleic acid targeting a target sequence, and an effector protein capable of being activated when complexed with the guide nucleic acid and the target sequence. A user may thus add the biological sample of interest to a well of the pre-aliquoted PCR plate.

[0284] Often, the nucleic acid amplification is performed for no greater than 1, 2, 3, 4, 5, 6, 7, 8, 9, 10, 11, 12, 13, 14, 15, 16, 17, 18, 19, 20, 25, 30, 40, 50, or 60 minutes, or any value 1 to 60 minutes. Sometimes, the nucleic acid amplification is performed for 1 to 60, 5 to 55, 10 to 50, 15 to 45, 20 to 40, or 25 to 35 minutes. Sometimes, the nucleic acid amplification reaction is performed at a temperature of around 20-45° C. In some instances, the nucleic acid amplification reaction is performed at a temperature no greater than 20° C., 25° C., 30° C., 35° C., 37° C., 40° C., 45° C., or any value 20° C. to 45° C. In some instances, the nucleic acid amplification reaction is performed at a temperature of at least 20° C., 25° C., 30° C., 35° C., 37° C., 40° C., or 45° C., or any value 20° C. to 45° C. In some instances, the nucleic acid amplification reaction is performed at a temperature of 20° C. to 45° C., 25° C. to 40° C., 30° C. to 40° C., or 35° C. to 40° C.

[0285] Often, systems comprise primers for amplifying a target nucleic acid to produce an amplification product comprising the target nucleic acid and a PAM. For instance, at least one of the primers may comprise the PAM that is incorporated into the amplification product during amplification. The compositions for amplification of target nucleic acids and methods of use thereof, as described herein, are compatible with any of the methods disclosed herein including methods of assaying for at least one base difference (e.g., assaying for a SNP or a base mutation) in a target nucleic acid sequence, methods of assaying for a target nucleic acid that lacks a PAM by amplifying the target nucleic acid sequence to introduce a PAM, and compositions used in introducing a PAM via amplification into the target nucleic acid sequence.

### Additional System Components

[0286] In some instances, systems include a package, carrier, or container that is compartmentalized to receive one or more containers such as vials, tubes, and the like, each of the container(s) comprising one of the separate elements to be used in a method described herein. Suitable containers include, for example, test wells, bottles, vials, and test tubes. In one embodiment, the containers are formed from a variety of materials such as glass, plastic, or polymers. The system or systems described herein contain packaging materials. Examples of packaging materials include, but are not limited to, pouches, blister packs, bottles, tubes, bags, containers, bottles, and any packaging material suitable for intended mode of use.

[0287] A system may include labels listing contents and/or instructions for use, or package inserts with instructions for use. A set of instructions will also typically be included. In one embodiment, a label is on or associated with the container. In some instances, a label is on a container when letters, numbers or other characters forming the label are attached, molded or etched into the container itself; a label is associated with a container when it is present within a receptacle or carrier that also holds the container, e.g., as a package insert. In one embodiment, a label is used to indicate that the contents are to be used for a specific therapeutic application. The label also indicates directions for use of the contents, such as in the methods described herein. After packaging the formed product and wrapping or boxing to maintain a sterile barrier, the product may be terminally sterilized by heat sterilization, gas sterilization, gamma irradiation, or by electron beam sterilization. Alternatively, the product may be prepared and packaged by aseptic processing.

[0288] In some instances, systems comprise a solid support. An RNP or effector protein may be attached to a solid support. The solid support may be an electrode or a bead. The bead may be a magnetic bead. Upon cleavage, the RNP is liberated from the solid support and interacts with other mixtures. For example, upon cleavage of the nucleic acid of the RNP, the effector protein of the RNP flows through a chamber into a mixture comprising a substrate. When the effector protein meets the substrate, a reaction occurs, such as a colorimetric reaction, which is then detected. As another example, the protein is an enzyme substrate, and upon cleavage of the nucleic acid of the enzyme substrate-nucleic acid, the enzyme flows through a chamber into a mixture comprising the enzyme. When the enzyme substrate meets the enzyme, a reaction occurs, such as a calorimetric reaction, which is then detected.

### Certain System Conditions

[0289] In some instances, systems and methods are employed under certain conditions that enhance an activity of the effector protein relative to alternative conditions, as measured by a detectable signal released from cleavage of a reporter in the presence of the target nucleic acid. The detectable signal may be generated at about the rate of trans cleavage of a reporter nucleic acid. In some instances, the reporter nucleic acid is a homopolymeric reporter nucleic acid comprising 5 to 20 consecutive adenines, 5 to 20 consecutive thymines, 5 to 20 consecutive cytosines, or 5 to 20 consecutive guanines. In some instances, the reporter is an RNA-FQ reporter.

[0290] In some instances, effector proteins disclosed herein recognize, bind, or are activated by, different target nucleic acids having different sequences, but are active toward the same reporter nucleic acid, allowing for facile multiplexing in a single assay having a single ssRNA-FQ reporter.

[0291] In some instances, systems are employed under certain conditions that enhance trans cleavage activity of an effector protein. In some instances, under certain conditions, transcolatteral cleavage occurs at a rate of at least 0.005 mmol/min, at least 0.01 mmol/min, at least 0.05 mmol/min, at least 0.1 mmol/min, at least 0.2 mmol/min, at least 0.5 mmol/min, or at least 1 mmol/min. In some instances, systems and methods are employed under certain conditions that enhance cis-cleavage activity of the effector protein.

[0292] Certain conditions that may enhance the activity of an effector protein include a certain salt presence or salt concentration of the solution in which the activity occurs. For example, cis-cleavage activity of an effector protein may be inhibited or halted by a high salt concentration. The salt may be a sodium salt, a potassium salt, or a magnesium salt. In some instances, the salt is NaCl. In some instances, the salt is KNO₃. In some instances, the salt concentration is less than 150 mM, less than 125 mM, less than 100 mM, less than 75 mM, less than 50 mM, or less than 25 mM.

[0293] Certain conditions that may enhance the activity of an effector protein includes the pH of a solution in which the activity. For example, increasing pH may enhance trans cleavage activity. For example, the rate of trans cleavage activity may increase with increase in pH up to pH 9. In some instances, the pH is about 7, about 7.1, about 7.2, about 7.3, about 7.4, about 7.5, about 7.6, about 7.7, about 7.8, about 7.9, about 8, about 8.1, about 8.2, about 8.3, about 8.4, about 8.5, about 8.6, about 8.7, about 8.8, about 8.9, or about 9. In some instances, the pH is 7 to 7.5, 7.5 to 8, 8 to 8.5, 8.5 to 9, or 7 to 8.5. In some instances, the pH is less than 7. In some instances, the pH is greater than 7.

[0294] Certain conditions that may enhance the activity of an effector protein includes the temperature at which the activity is performed. In some instances, the temperature is about 25° C. to about 50° C. In some instances, the temperature is about 20° C. to about 40° C., about 30° C. to about 50° C., or about 40° C. to about 60° C. In some instances, the temperature is about 25° C., about 30° C., about 35° C., about 40° C., about 45° C., or about 50° C.

[0295] In some instances, a final concentration an effector protein in a buffer of a system is 1 pM to 1 nM, 1 pM to 10 pM, 10 pM to 100 pM, 100 pM to 1 nM, 1 nM to 10 nM, 10 nM to 20 nM, 20 nM to 30 nM, 30 nM to 40 nM, 40 nM to 50 nM, 50 nM to 60 nM, 60 nM to 70 nM, 70 nM to 80 nM, 80 nM to 90 nM, 90 nM to 100 nM, 100 nM to 200 nM, 200 nM to 300 nM, 300 nM to 400 nM, 400 nM to 500 nM, 500 nM to 600 nM, 600 nM to 700 nM, 700 nM to 800 nM, 800 nM to 900 nM, 900 nM to 1000 nM. The final concentration of the sgRNA complementary to the target nucleic acid may be 1 pM to 1 nM, 1 pM to 10 pM, 10 pM to 100 pM, 100 pM to 1 nM, 1 nM to 10 nM, 10 nM to 20 nM, 20 nM to 30 nM, 30 nM to 40 nM, 40 nM to 50 nM, 50 nM to 60 nM, 60 nM to 70 nM, 70 nM to 80 nM, 80 nM to 90 nM, 90 nM to 100 nM, 100 nM to 200 nM, 200 nM to 300 nM, 300 nM to 400 nM, 400 nM to 500 nM, 500 nM to 600 nM, 600 nM to 700 nM, 700 nM to 800 nM, 800 nM to 900 nM, 900 nM to 1000 nM. The concentration of the ssDNA-FQ reporter may be 1 pM to 1 nM, 1 pM to 10 pM, 10 pM to 100 pM, 100 pM to 1 nM, 1 nM to 10 nM, 10 nM to 20 nM, 20 nM to 30 nM, 30 nM to 40 nM, 40 nM to 50 nM, 50 nM to 60 nM, 60 nM to 70 nM, 70 nM to 80 nM, 80 nM to 90 nM, 90 nM to 100 nM, 100 nM to 200 nM, 200 nM to 300 nM, 300 nM to 400 nM, 400 nM to 500 nM, 500 nM to 600 nM, 600 nM to 700 nM, 700 nM to 800 nM, 800 nM to 900 nM, 900 nM to 1000 nM.

[0296] In some instances, systems comprise an excess volume of solution comprising the guide nucleic acid, the effector protein and the reporter, which contacts a smaller volume comprising a sample with a target nucleic acid. The smaller volume comprising the sample may be unlysed sample, lysed sample, or lysed sample which has undergone any combination of reverse transcription, amplification, and in vitro transcription. The presence of various reagents, (such as buffer, magnesium sulfate, salts, the pH, a reducing agent, primers, dNTPs, NTPs, cellular lysates, non-target nucleic acids, primers, or other components), in a crude, non-lysed sample, a lysed sample, or a lysed and amplified sample, may inhibit the ability of the effector protein to become activated or to find and cleave the nucleic acid of the reporter. This may be due to nucleic acids that are not the reporter outcompeting the nucleic acid of the reporter, for the effector protein. Alternatively, various reagents in the sample may simply inhibit the activity of the effector protein. Thus, the compositions and methods provided herein for contacting an excess volume comprising the engineered guide nucleic acid, the effector protein, and the reporter to a smaller volume comprising the sample with the target nucleic acid of interest provides for superior detection of the target nucleic acid by ensuring that the effector protein is able to find and cleaves the nucleic acid of the reporter. In some instances, the volume comprising the guide nucleic acid, the effector protein, and the reporter (may be referred to as “a second volume”) is 4-fold greater than a volume comprising the sample (may be referred to as “a first volume”). In some instances, the volume comprising the guide nucleic acid, the effector protein, and the reporter (may be referred to as “a second volume”) is at least 1.5 fold, at least 2 fold, at least 3 fold, at least 4 fold, at least 5 fold, at least 6 fold, at least 7 fold, at least 8 fold, at least 9 fold, at least 10 fold, at least 11 fold, at least 12 fold, at least 13 fold, at least 14 fold, at least 15 fold, at least 16 fold, at least 17 fold, at least 18 fold, at least 19 fold, at least 20 fold, at least 30 fold, at least 40 fold, at least 50 fold, at least 60 fold, at least 70 fold, at least 80 fold, at least 90 fold, at least 100 fold, 1.5 fold to 100 fold, 2 fold to 10 fold, 10 fold to 20 fold, 20 fold to 30 fold, 30 fold to 40 fold, 40 fold to 50 fold, 50 fold to 60 fold, 60 fold to 70 fold, 70 fold to 80 fold, 80 fold to 90 fold, 90 fold to 100 fold, 1.5 fold to 10 fold, 1.5 fold to 20 fold, 10 fold to 40 fold, 20 fold to 60 fold, or 10 fold to 80 fold greater than a volume comprising the sample (may be referred to as “a first volume”). In some instances, the volume comprising the sample is at least 0.5 μL, at least 1 μL, at least at least 1 μL, at least 2 μL, at least 3 μL, at least 4 μL, at least 5 μL, at least 6 μL, at least 7 μL, at least 8 μL, at least 9 μL, at least 10 μL, at least 11 μL, at least 12 μL, at least 13 μL, at least 14 μL, at least 15 μL, at least 16 μL, at least 17 μL, at least 18 μL, at least 19 μL, at least 20 μL, at least 25 μL, at least 30 μL, at least 35 μL, at least 40 μL, at least 45 μL, at least 50 μL, at least 55 μL, at least 60 μL, at least 65 μL, at least 70 μL, at least 75 μL, at least 80 μL, at least 85 μL, at least 90 μL, at least 95 μL, at least 100 μL, 0.5 μL to 5 μL μL, 5 μL to 10 μL, 10 μL to 15 μL, 15 μL to 20 μL, 20 μL to 25 μL, 25 μL to 30 μL, 30 μL to 35 μL, 35 μL to 40 μL, 40 μL to 45 μL, 45 μL to 50 μL, 10 μL to 20 μL, 5 μL to 20 μL, 1 μL to 40 μL, 2 μL to 10 μL, or 1 μL to 10 μL. In some instances, the volume comprising the effector protein, the guide nucleic acid, and the reporter is at least 10 μL, at least 11 μL, at least 12 μL, at least 13 μL, at least 14 μL, at least 15 μL, at least 16 μL, at least 17 μL, at least 18 μL, at least 19 μL, at least 20 μL, at least 21 μL, at least 22 μL, at least 23 μL, at least 24 μL, at least 25 μL, at least 26 μL, at least 27 μL, at least 28 μL, at least 29 μL, at least 30 μL, at least 40 μL, at least 50 μL, at least 60 μL, at least 70 μL, at least 80 μL, at least 90 μL, at least 100 μL, at least 150 μL, at least 200 μL, at least 250 μL, at least 300 μL, at least 350 μL, at least 400 μL, at least 450 μL, at least 500 μL, 10 μL to 15 μL μL, 15 μL to 20 μL, 20 μL to 25 μL, 25 μL to 30 μL, 30 μL to 35 μL, 35 μL to 40 μL, 40 μL to 45 μL, 45 μL to 50 μL, 50 μL to 55 μL, 55 μL to 60 μL, 60 μL to 65 μL, 65 μL to 70 μL, 70 μL to 75 μL, 75 μL to 80 μL, 80 μL to 85 μL, 85 μL to 90 μL, 90 μL to 95 μL, 95 μL to 100 μL, 100 μL to 150 μL, 150 μL to 200 μL, 200 μL to 250 μL, 250 μL to 300 μL, 300 μL to 350 μL, 350 μL to 400 μL, 400 μL to 450 μL, 450 μL to 500 μL, 10 μL to 20 μL, 10 μL to 30 μL, 25 μL to 35 μL, 10 μL to 40 μL, 20 μL to 50 μL, 18 μL to 28 μL, or 17 μL to 22 μL.

[0297] In some instances, systems comprise an effector protein that nicks a target nucleic acid, thereby producing a nicked product. In some instances, systems cleave a target nucleic acid, thereby producing a linearized product. In some instances, systems produce at least 50%, at least 55%, at least 60%, at least 65%, at least 70%, at least 75%, at least 80%, at least 85%, at least 90 or at least 95% of a maximum amount of nicked product within 1 minute, where the maximum amount of nicked product is the maximum amount detected within a 60 minute period from when the target nucleic acid is mixed with the effector protein or the multimeric complex thereof. In some instances, systems produce at least 50%, at least 55%, at least 60%, at least 65%, at least 70%, at least 75%, at least 80%, at least 85%, at least 90 or at least 95% of a maximum amount of linearized product within 1 minute, where the maximum amount of linearized product is the maximum amount detected within a 60-minute period from when the target nucleic acid is mixed with the effector protein. In some instances, at least 80% of the maximum amount of linearized product is produced within 1 minute. In some instances, at least 90% of the maximum amount of linearized product is produced within 1 minute.

### X. Target Nucleic Acids and Samples

[0298] Described herein are compositions, systems and methods for modifying or detecting a target nucleic acid, wherein the target nucleic acid is a gene, a portion thereof, a transcript thereof. In some embodiments, the target nucleic acid is a reverse transcript (e.g. a cDNA) of an mRNA transcribed from the gene, or an amplicon thereof. acid. In some embodiments, the target nucleic acid is a single stranded nucleic acid. Alternatively, or in combination, the target nucleic acid is a double stranded nucleic acid and is prepared into single stranded nucleic acids before or upon contacting the reagents. In some embodiments, the target nucleic acid is a double stranded nucleic acid. In some embodiments, the double stranded nucleic acid is DNA. The target nucleic acid may be a RNA. The target nucleic acids include but are not limited to mRNA, rRNA, tRNA, non-coding RNA, long non-coding RNA, and microRNA (miRNA). In some embodiments, the target nucleic acid is complementary DNA (cDNA) synthesized from a single-stranded RNA template in a reaction catalyzed by a reverse transcriptase. In some embodiments, the target nucleic acid is single-stranded RNA (ssRNA) or mRNA. In some embodiments, the target nucleic acid is from a virus, a parasite, or a bacterium described herein. As another non-limiting example, the target nucleic acid may be responsible for a disease, contain a mutation (e.g., single strand polymorphism, point mutation, insertion, or deletion), be contained in an amplicon, or be uniquely identifiable from the surrounding nucleic acids (e.g., contain a unique sequence of nucleotides).

[0299] In certain embodiments, the target nucleic acid is a double stranded nucleic acid comprising a target strand and a non-target strand, wherein the target strand comprises a target sequence. In some embodiments, where a target strand comprises a target sequence, at least a portion of the engineered guide nucleic acid is complementary to the target sequence on the target strand. In some embodiments, where the target nucleic acid is a double stranded nucleic acid comprising a target strand and a non-target strand, and wherein the target strand comprises a target sequence, at least a portion of the engineered guide nucleic acid is complementary to the target sequence on the target strand. In some embodiments, a target nucleic acid comprises a PAM as described herein that is located on the non-target strand. Such a PAM described herein, in some embodiments, is adjacent (e.g., within 1, 2, 3, 4 or 5 nucleotides) to the 5′ end of the target sequence on the non-target strand of the double stranded DNA molecule. In certain embodiments, such a PAM described herein is directly adjacent to the 5′ end of a target sequence on the non-target strand of the double stranded DNA molecule.

[0300] In some embodiments, an effector protein described herein, or a multimeric complex thereof recognizes a PAM on a target nucleic acid. In some embodiments, multiple effector proteins of the multimeric complex recognize a PAM on a target nucleic acid. In some embodiments, only one effector protein of the multimeric complex recognizes a PAM on a target nucleic acid. In some embodiments, the PAM is 3′ to the spacer region of the crRNA. In some embodiments, the PAM is directly 3′ to the spacer region of the crRNA.

[0301] An effector protein of the present disclosure, a dimer thereof, or a multimeric complex thereof may cleave or nick a target nucleic acid within or near a protospacer adjacent motif (PAM) sequence of the target nucleic acid. In some embodiments, cleavage occurs within 1, 2, 3, 4, 5, 6, 7, 8, 9 or 10 nucleotides of a 5′ or 3′ terminus of a PAM sequence. A target nucleic acid may comprise a PAM sequence adjacent to a sequence that is complementary to a guide nucleic acid spacer region.

[0302] In some embodiments, the target nucleic acid comprises 5 to 100, 5 to 90, 5 to 80, 5 to 70, 5 to 60, 5 to 50, 5 to 40, 5 to 30, 5 to 25, 5 to 20, 5 to 15, or 5 to 10 linked nucleotides. In some embodiments, the target nucleic acid comprises 10 to 90, 20 to 80, 30 to 70, or 40 to 60 linked nucleotides. In some embodiments, the target nucleic acid comprises 5, 6, 7, 8, 9, 10, 11, 12, 13, 14, 15, 16, 17, 18, 19, 20, 21, 22, 23, 24, 25, 26, 27, 28, 29, 30, 31, 32, 33, 34, 35, 36, 37, 38, 39, 40, 45, 50, 60, 70, 80, 90, or 100 linked nucleotides. In some embodiments, the target nucleic acid comprises at least 10, at least 20, at least 30, at least 40, at least 50, at least 60, at least 70, at least 80, at least 90, or at least 100 linked nucleotides.

[0303] In some embodiments, the target nucleic acid comprises a portion or a specific region of a nucleic acid from a genomic locus, any DNA amplicon of, a reverse transcribed mRNA, or a cDNA from a gene described herein. In some embodiments, the target nucleic acid is an amplicon of at least a portion of a gene. Non-limiting examples of genes are set forth in TABLE 4. Nucleic acid sequences of target nucleic acids and/or corresponding genes are readily available in public databases as known and used in the art. In some embodiments, the target nucleic acid is selected from TABLE 4.

TABLE 4
EXEMPLARY TARGETS
Exemplary targets

AAVS1, ABCA4, ABCB11, ABCC8, ABCD1, ABCG5, ABCG8, ACAD9, ACADM, ACADVL, ACAT1,
ACOX1, ACSF3, ADA, ADAMTS2, ADGRG1, AGA, AGL, AGPS, AGXT, AHI1, AIRE, ALDH3A2,
ALDOB, ALG6, ALK, ALKBH5, ALMS1, ALPL, AMRC9, AMT, ANAPC10, ANAPC11, ANGPTL3, APC,
Apo(a), APOCIII, APOEε4, APOL1, APP, AQP2, AR, ARFRP1, ARG1, ARH, ARL13B, ARL6, ARSA,
ARSB, ASL, ASNS, ASPA, ASS1, ATM, ATP6V1B1, ATP7A, ATP7B, ATRX, ATXN1, ATXN10, ATXN2,
ATXN3, ATXN7, ATXN8OS, AXIN1, AXIN2, B2M, BACE-1, BAK1, BAP1, BARD1, BAX2, BBS1,
BBS10, BBS12, BBS2, BCKDHA, BCKDHB, BCL2L2, BCS1L, BEST1, Betaglobin gene, BLM, BMPR1A,
BRAF, BRAFV600E, BRCA1, BRCA2, BRIP1, BSND, C9orf72, CA4, CACNA1A, CAPN3, CASR, CBS,
CCNB1 CC2D2A, CCR5, CD1, CD2, CD3, CD3D, CD3Z, CD4, CD5, CD6, CD7, CD8A, CD8B, CD9,
CD14, CD18, CD19, CD21, CD22, CD23, CD27, CD28, CD30, CD33, CD34, CD36, CD38, CD40,
CD40L, CD44, CD46, CD47, CD48, CD52, CD55, CD57, CD58, CD59, CD68, CD69, CD72, CD73,
CD74, CD79A, CD80, CD81, CD83, CD84, CD86, CD90, CD93, CD96, CD99, CD100, CD123, CD160,
CD163, CD164, CD164L2, CD166, CD200, CD204, CD207, CD209, CD226, CD244, CD247, CD274,
CD276, CD300, CD320, CDC73, CDH1, CDH23, CDK11, CDK4, CDKN1A, CDKN1B, CDKN1C,
CDKN2A, CDKN2B, CEBPA, CELA3B, CEP290, CERKL, CFB, CFTR, CHCHD10, CHEK2, CHM, CHRNE,
CIITA, CLN3, CLN5, CLN6, CLN8, CLRN1, CLTA, CNBP, CNGB1, CNGB3, COL1A1, COL1A2,
COL27A1, COL4A3, COL4A4, COL4A5, COL7A1, CPS1, CPT1A, CPT2, CRB1, CREBBP, CRX, CRYAA,
CTNNA1, CTNNB1, CTNND2, CTNS, CTSK, CXCL12, CYBA, CYBB, CYP11B1, CYP11B2, CYP17A1,
CYP19A1, CYP27A1, DBT, DCC, DCLRE1C, DERL2, DFNA36, DFNB31, DGAT2, DHCR7, DHDDS,
DICER1, DIS3L2, DLD, DMD, DMPK, DNAH5, DNAI1, DNAI2, DNM2, DNMT1, DPC4, DYSF, EDA,
EDN3, EDNRB, EGFR, EIF2B5, EMC2, EMC3, EMD, EMX1, EN1, EPCAM, ERCC6, ERCC8, ESCO2,
ETFA, ETFDH, ETHE1, EVC, EVC2, EYS, F5, F9, FXI, FAH, FAM161A, FANCA, FANCB, FANCC,
FANCD1, FANCD2, FANCE, FANCF, FANCG, FANCI, FANCJ, FANCL, FANCM, FANCN, FANCP,
FANCS, FBN1, FGF14, FGFR2, FGFR3, FGA, FGB, FGG, FH, FHL1, FIX, FKRP, FKTN, FLCN, FMR1,
FOXP3, FSCN2, FUS, FUT8, FVIII, FXII, FXN, G6PC, GAA, GALC, GALK1, GALT, GAMT, GATA2,
GATA-4, GBA, GBE1, GCDH, GCGR, GDNF, GFAP, GFM1, GHR, GJB1, GJB2, GLA, GLB1, GLDC,
GLE1, GNE, GNPTAB, GNPTG, GNS, GPC3, GPR98, GREM1, GRHPR, GRIN2B, H2AFX, H2AX,
HADHA, HAX1, HBA1, HBA2, HBB, HER2, HEXA, HEXB, HFE, HGSNAT, HLCS, HMGCL, HOGA1,
HOXB13, HPRPF3, HPRT1, HPS1, HPS3, HRAS, HRD1, HSD17B4, HSD3B2, HTT, HUS1, HYAL1,
HYLS1, IDS, IDUA, IFITM5, IKBKAP, IL2RG, IL7R, IMPDH1, INPP5E, IRF4, ITGB2, ITPR1, IVD, JAG1,
JAK1, JAK3, KCNC3, KCND3, KCNJ11, KLHL7, KRAS, LAMA2, LAMA3, LAMB3, LAMC2, LCA5, LDLR,
LDLRAP1, LHX3, LIFR, LIPA, LMNA, LOR, LOXHD1, LPL, LRAT, LRP6, LRPPRC, LRRK2, MADR2,
MAN2B1, MAPT, MAX, MCM6, MCOLN1, MECP2, MED17, MEFV, MEN1, MERTK, MESP2, MET,
METex14, MFN2, MFSD8, MIA3, MITF, MKL2, MKS1, MLC1, MLH1, MLH3, MMAA, MMAB,
MMACHC, MMADHC, MMD, MPI, MPL, MPV17, MSH2, MSH3, MSH6, MTHFD1L, MTHFR,
MTM1, MTRR, MTTP, MUT, MUTYH, MYC, MYH7, MYO7A, NAGLU, NAGS, NBN, NDRG1,
NDUFAF5, NDUFS6, NEB, NF1, NF2, NKX2-5, NOG, NOTCH1, NOTCH2, NPC1, NPC2, NPHP1,
NPHS1, NPHS2, NRAS, NR2E3, NTHL1, NTRK, NTRK1, OAT, OCT4, OFD1, OPA3, OTC, PAH, PALB2,
PAQR8, PAX3, PC, PCCA, PCCB, PCDH15, PCSK9, PD1, PDCD1, PDE6B, PDGFRA, PDHA1, PDHB,
PEX1, PEX10, PEX12, PEX13, PEX14, PEX16, PEX19, PEX2, PEX26, PEX3, PEX5, PEX6, PEX7, PFKM,
PHGDH, PHOX2B, PKD1, PKD2, PKHD1, PKK, PLEKHG4, PMM2, PMP22, PMS1, PMS2, PNPLA3,
POLD1, POLE, POMGNT1, POT1, POU5F1, PPM1A, PPP2R2B, PPT1, PRCD, PRKAG2, PRKAR1A,
PRKCG, PRNP, PROM1, PROP1, PRPF31, PRPF8, PRPH2, PRPS1, PSAP, PSD95, PSEN1, PSEN2,
PSRC1, PTCH1, PTEN, PTS, PUS1, PYGM, RAB23, RAD50, RAD51C, RAD51D, RAG1, RAG2, RAPSN,
RARS2, RB1, RDH12, RECQL4, RET, RHO, RICTOR, RMRP, ROS1, RP1, RP2, RPE65, RPGR,
RPGRIP1L, RPL32P3, RS1, RTCA, RTEL1, RUNX1, SACS, SAMHD1, SCN1A, SCN2A, SDHA, SDHAF2,
SDHB, SDHC, SDHD, SEL1L, SEPSECS, SERPINA1, SERPING1, SGCA, SGCB, SGCG, SGSH, SIRT1,
SLC12A3, SLC12A6, SLC17A5, SLC22A5, SLC25A13, SLC25A15, SLC26A2, SLC26A4, SLC35A3,
SLC35B4 SLC37A4, SLC39A4, SLC4A11, SLC6A8, SLC7A7, SMAD3, SMAD4, SMARCA4, SMARCAL1,
SMARCB1, SMARCE1, SMN1, SMPD1, SNAI2, SNCA, SNRNP200, SOD1, SOX10, SPARA7, SPTBN2,
STAR, STAT3, STK11, SUFU, SUMF1, SYNE1, SYNE2, SYS1, TARDBP, TAT, TBK1, TBP, TCIRG1,
TCTN3, TECPR2, TERC, TERT, TFR2, TGFBR2, TGM1, TH, TLE3, TMEM127, TMEM138, TMEM216,
TMEM43, TMEM67, TMPRSS6, TOP1, TOPORS, TP53, TPP1, TRAC, TRMU, TSC1, TSC2, TSFM,
TSPAN14, TTBK2, TTC8, TTPA, TTR, TULP1, TYMP, UBE2G2, UBE2J1, UBE3A, USH1C, USH1G,
USH2A, VEGF, VHL, VPS13A, VPS13B, VPS35, VPS45, VRK1, VSX2, VWF, WAS, WDR19, WDR48,
WNT10A, WRN, WS2B, WS2C, WT1, XPA, XPC, XPF, XRCC3, YAP1, ZAC1, ZEB1, ZFYVE26, and
ZNF423

[0304] In some embodiments, the target nucleic acid comprises a target locus. In certain embodiments, the target nucleic acid comprises more than one target loci. In some embodiments, the target nucleic acid comprises two target loci. Accordingly, in some embodiments, the target nucleic acid can comprise one or more target sequences.

[0305] In some embodiments, the one or more target sequence is within any one of the genes set forth in Table. In some embodiments, the target sequence is within an exon of any one of the genes set forth in Table. In some embodiments, then target sequence covers the junction of two exons. In some embodiments, the target sequence is located within about 1 to about 300 nucleotides, about 10 to about 250, about 20 to about 200, about 30 to about 150, about 40 to about 100, or about 50 nucleotides of the 5′ untranslated region (UTR). In some embodiments, the target sequence is located within about 1 to about 300 nucleotides, about 10 to about 250, about 20 to about 200, about 30 to about 150, about 40 to about 100, or about 50 nucleotides of the 3′ UTR.

[0306] In some embodiments, the target sequence is at least partially within a targeted exon within any one of the genes set forth in Table. A targeted exon can mean any portion within, contiguous with, or adjacent to a specified exon of interest can be targeted by the compositions, systems, and methods described herein. In some embodiments, one or more of the exons are targeted. In some embodiments, one or more of exons of any one the genes set forth in Table are targeted.

[0307] In some embodiments, the start of an exon is referred to interchangeably herein as the 5′ end of an exon. In certain embodiments, the 5′ region of an exon comprises a sequence about 1 to about 300 nucleotides adjacent to the 5′ end of an exon when moving upstream in the 5′ direction, or a sequence about 1 to about 300 nucleotides adjacent to the 5′ end of an exon when moving downstream in the 3′ direction, or both.

[0308] In some embodiments, the end of an exon is referred to interchangeably herein as the 3′ end of an exon. In certain embodiments, the 3′ region of an exon comprises a sequence about 1 to about 300 nucleotides adjacent to the 3′ end of an exon when moving upstream in the 5′ direction, or a sequence about 1 to about 300 nucleotides adjacent to the 3′ end of an exon when moving downstream in the 3′ direction, or both.

[0309] Nucleic acids, such as DNA and pre-mRNA, can contain at least one intron and at least one exon, wherein as read in the 5′ to the 3′ direction of a nucleic acid strand, the 3′ end of an intron can be adjacent to the 5′ end of an exon, and wherein said intron and exon correspond for transcription purposes. If a nucleic acid strand contains more than one intron and exon, the 5′ end of the second intron is adjacent to the 3′ end of the first exon, and 5′ end of the second exon is adjacent to the 3′ end of the second intron. The junction between an intron and an exon can be referred to herein as a splice junction, wherein a 5′ splice site (SS) can refer to the +1/+2 position at the 5′ end of intron and a 3′SS can refer to the last two positions at the 3′ end of an intron. Alternatively, a 5′ SS can refer to the 5′ end of an exon and a 3′SS can refer to the 3′ end of an exon. In certain embodiments, nucleic acids can contain one or more elements that act as a signal during transcription, splicing, and/or translation. In certain embodiments, signaling elements include a 5′SS, a 3′SS, a premature stop codon, U1 and/or U2 binding sequences, and cis acting elements such as branch site (BS), polypyridine tract (PYT), exonic and intronic splicing enhancers (ESEs and ISEs) or silencers (ESSs and ISSs).

[0310] In some embodiments, a target sequence that a guide nucleic acid binds is at least partially within a targeted exon within any one of the genes set forth in TABLE 4, and wherein at least a portion of the target nucleic acid is within a sequence about 1 to about 300 nucleotides adjacent to: the start of a targeted exon, the end of a targeted exon, or both. In some embodiments, at least a portion of the target sequence that a guide nucleic acid binds can comprise a sequence about 1 to about 300 nucleotides, about 10 to about 250, about 20 to about 200, about 30 to about 150, about 40 to about 100, or about 50 nucleotides adjacent to: the start of a targeted exon, the end of a targeted exon, or both.

[0311] In some embodiments, at least a portion of the target nucleic acid that a guide nucleic acid binds is within a sequence about 5 or more, about 10 or more, about 15 or more, about 20 or more, about 25 or more, about 30 or more, about 35 or more, about 40 or more, about 45 or more, about 50 or more, about 55 or more, about 60 or more, about 65 or more, about 70 or more, about 75 or more, about 80 or more, about 85 or more, about 90 or more, about 95 or more, about 100 or more, about 105 or more, about 110 or more, about 115 or more, about 120 or more, about 125 or more, about 130 or more, about 135 or more, about 140 or more, about 145 or more, or about 150 or more nucleotides adjacent to: the start of a targeted exon, the end of a targeted exon, or both.

[0312] In some embodiments, a target sequence that a guide nucleic acid binds is at least partially within a targeted exon within any one of the genes set forth in TABLE 4, and wherein at least a portion of the target nucleic acid is within a sequence about 1 to about 300 nucleotides adjacent to: the start of a targeted exon, the end of a targeted exon, or both. In some embodiments, at least a portion of the target sequence that a guide nucleic acid binds can comprise a sequence about 1 to about 300 nucleotides, about 10 to about 250, about 20 to about 200, about 30 to about 150, about 40 to about 100, or about 50 nucleotides adjacent to: one or more signaling element comprising a 5′SS, a 3′SS, a premature stop codon, U1 binding sequence, U2 binding sequence, a BS, a PYT, ESE, an ISE, an ESS, an ISS, more than one of the foregoing, or any combination thereof.

[0313] In certain embodiments, at least a portion of the target nucleic acid that a guide nucleic acid binds is within a sequence about 5 or more, about 10 or more, about 15 or more, about 20 or more, about 25 or more, about 30 or more, about 35 or more, about 40 or more, about 45 or more, about 50 or more, about 55 or more, about 60 or more, about 65 or more, about 70 or more, about 75 or more, about 80 or more, about 85 or more, about 90 or more, about 95 or more, about 100 or more, about 105 or more, about 110 or more, about 115 or more, about 120 or more, about 125 or more, about 130 or more, about 135 or more, about 140 or more, about 145 or more, or about 150 or more nucleotides adjacent to: one or more signaling element comprising a 5′SS, a 3′SS, a premature stop codon, U1 binding sequence, U2 binding sequence, a BS, a PYT, ESE, an ISE, an ESS, an ISS, more than one of the foregoing, or any combination thereof.

[0314] Further description of editing or detecting a target nucleic acid in the foregoing genes can be found in more detail in Kim et al., “Enhancement of target specificity of CRISPR-Cas12a by using a chimeric DNA-RNA guide”, Nucleic Acids Res. 2020 Sep. 4; 48(15):8601-8616; Wang et al., “Specificity profiling of CRISPR system reveals greatly enhanced off-target gene editing”, Scientific Reports volume 10, Article number: 2269 (2020); Tuladhar et al., “CRISPR-Cas9-based mutagenesis frequently provokes on-target mRNA misregulation”, Nature Communications volume 10, Article number: 4056 (2019); Dong et al., “Genome-Wide Off-Target Analysis in CRISPR-Cas9 Modified Mice and Their Offspring”, G3, Volume 9, Issue 11, 1 Nov. 2019, Pages 3645-3651; Winter et al., “Genome-wide CRISPR screen reveals novel host factors required for Staphylococcus aureus a-hemolysin-mediated toxicity”, Scientific Reports volume 6, Article number: 24242 (2016); and Ma et al., “A CRISPR-Based Screen Identifies Genes Essential for West-Nile-Virus-Induced Cell Death”, Cell Rep. 2015 Jul. 28; 12(4):673-83, which are hereby incorporated by reference in their entirety.

[0315] In some embodiments, the target nucleic acid is in a cell. In general, the cell is a human cell. In some embodiments, the human cell is a: muscle cell, cardiac cell, visceral cell, cardiac muscle cell, smooth muscle cell, cardiomyocyte, nodal cardiac muscle cell, smooth muscle cell, visceral muscle cell, skeletal muscle cell, myocyte, red (or slow) skeletal muscle cell, white (fast) skeletal muscle cell, intermediate skeletal muscle, muscle satellite cell, muscle stem cell, myoblast, muscle progenitor cell, induced pluripotent stem cell (iPS), or a cell derived from an iPS cell, modified to have its gene edited and differentiated into myoblasts, muscle progenitor cells, muscle satellite cells, muscle stem cells, skeletal muscle cells, cardiac muscle cells or smooth muscle cells.

[0316] An effector protein-guide nucleic acid complex may comprise high selectivity for a target sequence. In some embodiments, a ribonucleoprotein may comprise a selectivity of at least 200:1, 100:1, 50:1, 20:1, 10:1, or 5:1 for a target nucleic acid over a single nucleotide variant of the target nucleic acid. In some embodiments, a ribonucleoprotein may comprise a selectivity of at least 5:1 for a target nucleic acid over a single nucleotide variant of the target nucleic acid. Leveraging Effector protein selectivity, some methods described herein may detect a target nucleic acid present in the sample in various concentrations or amounts as a target nucleic acid population. In some embodiments, the sample has at least 2 target nucleic acids. In some embodiments, the sample has at least 3, 5, 10, 20, 30, 40, 50, 100, 200, 300, 400, 500, 600, 700, 800, 900, 1000, 2000, 3000, 4000, 5000, 6000, 7000, 8000, 9000, or 10000 target nucleic acids. In some embodiments, the sample comprises 1 to 10,000, 100 to 8000, 400 to 6000, 500 to 5000, 1000 to 4000, or 2000 to 3000 target nucleic acids. In some embodiments, the method detects target nucleic acid present at least at one copy per 10 non-target nucleic acids, 10² non-target nucleic acids, 10³ non-target nucleic acids, 10⁴ non-target nucleic acids, 10⁵ non-target nucleic acids, 10⁶ non-target nucleic acids, 10⁷ non-target nucleic acids, 10⁸ non-target nucleic acids, 10⁹ non-target nucleic acids, or 10¹⁰ non-target nucleic acids.

[0317] Often, the target nucleic acid may be from 0.05% to 20% of total nucleic acids in the sample. Sometimes, the target nucleic acid is 0.1% to 10% of the total nucleic acids in the sample. The target nucleic acid, in some embodiments, is 0.1% to 5% of the total nucleic acids in the sample. The target nucleic acid may also be 0.1% to 1% of the total nucleic acids in the sample. The target nucleic acid may be DNA or RNA. The target nucleic acid may be any amount less than 100% of the total nucleic acids in the sample. The target nucleic acid may be 100% of the total nucleic acids in the sample.

[0318] The target nucleic acid may be 0.05% to 20% of total nucleic acids in the sample. Sometimes, the target nucleic acid is 0.1% to 10% of the total nucleic acids in the sample. The target nucleic acid, in some embodiments, is 0.1% to 5% of the total nucleic acids in the sample. Often, a sample comprises the segment of the target nucleic acid and at least one nucleic acid comprising less than 100% sequence identity to the segment of the target nucleic acid but no less than 50% sequence identity to the segment of the target nucleic acid. For example, the segment of the target nucleic acid comprises a mutation as compared to at least one nucleic acid comprising less than 100% sequence identity to the segment of the target nucleic acid but no less than 50% sequence identity to the segment of the target nucleic acid. Often, the segment of the target nucleic acid comprises a single nucleotide mutation as compared to at least one nucleic acid comprising less than 100% sequence identity to the segment of the target nucleic acid but no less than 50% sequence identity to the segment of the target nucleic acid.

[0319] A target nucleic acid may be an amplified nucleic acid of interest. The nucleic acid of interest may be any nucleic acid disclosed herein or from any sample as disclosed herein. The nucleic acid of interest may be an RNA that is reverse transcribed before amplification. The nucleic acid of interest may be amplified then the amplicons may be transcribed into RNA.

[0320] In some embodiments, compositions described herein exhibit indiscriminate trans-cleavage of ssRNA, enabling their use for detection of RNA in samples. In some embodiments, target ssRNA are generated from many nucleic acid templates (RNA) in order to achieve cleavage of the FQ reporter in the DETECTR platform. Certain Effector proteins may be activated by ssRNA, upon which they may exhibit trans-cleavage of ssRNA and may, thereby, be used to cleave ssRNA FQ reporter molecules in the DETECTR system. These Effector proteins may target ssRNA present in the sample or ssRNA generated and/or amplified from any number of nucleic acid templates (RNA). Described herein are reagents comprising a single stranded reporter nucleic acid comprising a detection moiety, wherein the reporter nucleic acid (e.g., the ssDNA-FQ reporter described above) is capable of being cleaved by the Effector protein, upon generation and amplification of ssRNA from a nucleic acid template using the methods disclosed herein, thereby generating a first detectable signal.

[0321] In some embodiments, target nucleic acids comprise at least one nucleic acid comprising at least 50% sequence identity to the target nucleic acid or a portion thereof. Sometimes, the at least one nucleic acid comprises an amino acid sequence that is at least 60%, 70%, 75%, 80%, 85%, 90%, 91%, 92%, 93%, 94%, 95%, 96%, 97%, 98%, or 99% identical to an equal length portion of the target nucleic acid. Sometimes, the at least one nucleic acid comprises an amino acid sequence that is 100% identical to an equal length portion of the target nucleic acid. Sometimes, the amino acid sequence of the at least one nucleic acid is at least 60%, 70%, 75%, 80%, 85%, 90%, 91%, 92%, 93%, 94%, 95%, 96%, 97%, 98%, or 99% identical to the target nucleic acid. Sometimes, the target nucleic acid comprises an amino acid sequence that is less than 60%, 70%, 75%, 80%, 85%, 90%, 91%, 92%, 93%, 94%, 95%, 96%, 97%, 98%, or 99% identical to an equal length portion of the at least one nucleic acid.

[0322] In some embodiments, samples comprise a target nucleic acid at a concentration of less than 1 nM, less than 2 nM, less than 3 nM, less than 4 nM, less than 5 nM, less than 6 nM, less than 7 nM, less than 8 nM, less than 9 nM, less than 10 nM, less than 20 nM, less than 30 nM, less than 40 nM, less than 50 nM, less than 60 nM, less than 70 nM, less than 80 nM, less than 90 nM, less than 100 nM, less than 200 nM, less than 300 nM, less than 400 nM, less than 500 nM, less than 600 nM, less than 700 nM, less than 800 nM, less than 900 nM, less than 1 μM, less than 2 μM, less than 3 μM, less than 4 μM, less than 5 μM, less than 6 μM, less than 7 μM, less than 8 μM, less than 9 μM, less than 10 μM, less than 100 μM, or less than 1 mM. In some embodiments, the sample comprises a target nucleic acid at a concentration of 1 nM to 2 nM, 2 nM to 3 nM, 3 nM to 4 nM, 4 nM to 5 nM, 5 nM to 6 nM, 6 nM to 7 nM, 7 nM to 8 nM, 8 nM to 9 nM, 9 nM to 10 nM, 10 nM to 20 nM, 20 nM to 30 nM, 30 nM to 40 nM, 40 nM to 50 nM, 50 nM to 60 nM, 60 nM to 70 nM, 70 nM to 80 nM, 80 nM to 90 nM, 90 nM to 100 nM, 100 nM to 200 nM, 200 nM to 300 nM, 300 nM to 400 nM, 400 nM to 500 nM, 500 nM to 600 nM, 600 nM to 700 nM, 700 nM to 800 nM, 800 nM to 900 nM, 900 nM to 1 μM, 1 μM to 2 μM, 2 μM to 3 μM, 3 μM to 4 μM, 4 μM to 5 μM, 5 μM to 6 μM, 6 μM to 7 μM, 7 μM to 8 μM, 8 μM to 9 μM, 9 μM to 10 μM, 10 μM to 100 μM, 100 μM to 1 mM, 1 nM to 10 nM, 1 nM to 100 nM, 1 nM to 1 μM, 1 nM to 10 μM, 1 nM to 100 μM, 1 nM to 1 mM, 10 nM to 100 nM, 10 nM to 1 μM, 10 nM to 10 μM, 10 nM to 100 μM, 10 nM to 1 mM, 100 nM to 1 μM, 100 nM to 10 μM, 100 nM to 100 μM, 100 nM to 1 mM, 1 μM to 10 μM, 1 μM to 100 μM, 1 μM to 1 mM, 10 μM to 100 μM, 10 μM to 1 mM, or 100 μM to 1 mM. In some embodiments, the sample comprises a target nucleic acid at a concentration of 20 nM to 200 μM, 50 nM to 100 μM, 200 nM to 50 μM, 500 nM to 20 μM, or 2 μM to 10 μM. In some embodiments, the target nucleic acid is not present in the sample.

[0323] In some embodiments, samples comprise fewer than 10 copies, fewer than 100 copies, fewer than 1000 copies, fewer than 10,000 copies, fewer than 100,000 copies, or fewer than 1,000,000 copies of a target nucleic acid. In some embodiments, the sample comprises 10 copies to 100 copies, 100 copies to 1000 copies, 1000 copies to 10,000 copies, 10,000 copies to 100,000 copies, 100,000 copies to 1,000,000 copies, 10 copies to 1000 copies, 10 copies to 10,000 copies, 10 copies to 100,000 copies, 10 copies to 1,000,000 copies, 100 copies to 10,000 copies, 100 copies to 100,000 copies, 100 copies to 1,000,000 copies, 1,000 copies to 100,000 copies, or 1,000 copies to 1,000,000 copies of a target nucleic acid. In some embodiments, the sample comprises 10 copies to 500,000 copies, 200 copies to 200,000 copies, 500 copies to 100,000 copies, 1000 copies to 50,000 copies, 2000 copies to 20,000 copies, 3000 copies to 10,000 copies, or 4000 copies to 8000 copies. In some embodiments, the target nucleic acid is not present in the sample.

[0324] A number of target nucleic acid populations are consistent with the methods and compositions disclosed herein. Some methods described herein may detect two or more target nucleic acid populations present in the sample in various concentrations or amounts. In some embodiments, the sample has at least 2 target nucleic acid populations. In some embodiments, the sample has at least 3, 4, 5, 6, 7, 8, 9, 10, 20, 30, 40, or 50 target nucleic acid populations. In some embodiments, the sample has 3 to 50, 5 to 40, or 10 to 25 target nucleic acid populations. In some embodiments, the method detects target nucleic acid populations that are present at least at one copy per 10¹ non-target nucleic acids, 10² non-target nucleic acids, 10³ non-target nucleic acids, 10⁴ non-target nucleic acids, 10⁵ non-target nucleic acids, 10⁶ non-target nucleic acids, 10⁷ non-target nucleic acids, 10⁸ non-target nucleic acids, 10⁹ non-target nucleic acids, or 10¹⁰ non-target nucleic acids. The target nucleic acid populations may be present at different concentrations or amounts in the sample.

[0325] In some embodiments, target nucleic acids may activate an effector protein to initiate sequence-independent cleavage of a nucleic acid-based reporter (e.g., a reporter comprising an RNA sequence, or a reporter comprising DNA and RNA). For example, an effector protein of the present disclosure is activated by a target nucleic acid to cleave reporters having an RNA (also referred to herein as an “RNA reporter”). Alternatively, an effector protein of the present disclosure is activated by a target nucleic acid to cleave reporters having an RNA. Alternatively, an effector protein of the present disclosure is activated by a target RNA to cleave reporters having an RNA (also referred to herein as a “RNA reporter”). The RNA reporter may comprise a single-stranded RNA labelled with a detection moiety or may be any RNA reporter as disclosed herein.

[0326] In some embodiments, the target nucleic acid as described in the methods herein does not initially comprise a PAM sequence. However, any target nucleic acid of interest may be generated using the methods described herein to comprise a PAM sequence, and thus be a PAM target nucleic acid. A PAM target nucleic acid, as used herein, refers to a target nucleic acid that has been amplified to insert a PAM sequence that is recognized by an effector protein system.

[0327] In some embodiments, the target nucleic acid is in a cell. In some embodiments, the cell is a single-cell eukaryotic organism; a plant cell an algal cell; a fungal cell; an animal cell; a cell an invertebrate animal; a cell a vertebrate animal such as fish, amphibian, reptile, bird, and mammal; or a cell a mammal such as a human, a non-human primate, an ungulate, a feline, a bovine, an ovine, and a caprine. In preferred embodiments, the cell is a eukaryotic cell. In preferred embodiments, the cell is a mammalian cell, a human cell, or a plant cell.

[0328] In some embodiments, the target nucleic acid comprises a nucleic acid sequence from a pathogen responsible for a disease. Non-limiting examples of pathogens are bacteria, a virus and a fungus. The target nucleic acid, in some embodiments, is a portion of a nucleic acid from a sexually transmitted infection or a contagious disease. In some embodiments, the target nucleic acid is a portion of a nucleic acid from a genomic locus, or any DNA amplicon, such as a reverse transcribed mRNA or a cDNA from a gene locus, a transcribed mRNA, or a reverse transcribed cDNA from a gene locus in at least one of: human immunodeficiency virus (HIV), human papillomavirus (HPV), chlamydia, gonorrhea, syphilis, trichomoniasis, sexually transmitted infection, malaria, Dengue fever, Ebola, chikungunya, and leishmaniasis. Pathogens include viruses, fungi, helminths, protozoa, malarial parasites, Plasmodium parasites, Toxoplasma parasites, and Schistosoma parasites. Helminths include roundworms, heartworms, and phytophagous nematodes, flukes, Acanthocephala, and tapeworms. Protozoan infections include infections from Giardia spp., Trichomonas spp., African trypanosomiasis, amoebic dysentery, babesiosis, balantidial dysentery, Chaga's disease, coccidiosis, malaria and toxoplasmosis. Examples of pathogens such as parasitic/protozoan pathogens include, but are not limited to: Plasmodium falciparum, P. vivax, Trypanosoma cruzi and Toxoplasma gondii. Fungal pathogens include, but are not limited to Cryptococcus neoformans, Histoplasma capsulatum, Coccidioides immitis, Blastomyces dermatitidis, Chlamydia trachomatis, and Candida albicans. Pathogenic viruses include but are not limited to coronavirus (e.g., SARS-CoV-2); immunodeficiency virus (e.g., HIV); influenza virus; dengue; West Nile virus; herpes virus; yellow fever virus; Hepatitis Virus C; Hepatitis Virus A; Hepatitis Virus B; papillomavirus; and the like. Pathogens include, e.g., HIV virus, Mycobacterium tuberculosis, Streptococcus agalactiae, methicillin-resistant Staphylococcus aureus, Legionella pneumophila, Streptococcus pyogenes, Escherichia coli, Neisseria gonorrhoeae, Neisseria meningitidis, Pneumococcus, Cryptococcus neoformans, Histoplasma capsulatum, Hemophilus influenzae B, Treponema pallidum, Lyme disease spirochetes, Pseudomonas aeruginosa, Mycobacterium leprae, Brucella abortus, rabies virus, influenza virus, cytomegalovirus, herpes simplex virus I, herpes simplex virus II, human serum parvo-like virus, respiratory syncytial virus (RSV), M. genitalium, T. vaginalis, varicella-zoster virus, hepatitis B virus, hepatitis C virus, measles virus, adenovirus, human T-cell leukemia viruses, Epstein-Barr virus, murine leukemia virus, mumps virus, vesicular stomatitis virus, Sindbis virus, lymphocytic choriomeningitis virus, wart virus, blue tongue virus, Sendai virus, feline leukemia virus, Reovirus, polio virus, simian virus 40, mouse mammary tumor virus, dengue virus, rubella virus, West Nile virus, Plasmodium falciparum, Plasmodium vivax, Toxoplasma gondii, Trypanosoma rangeli, Trypanosoma cruzi, Trypanosoma rhodesiense, Trypanosoma brucei, Schistosoma mansoni, Schistosoma japonicum, Babesia bovis, Eimeria tenella, Onchocerca volvulus, Leishmania tropica, Mycobacterium tuberculosis, Trichinella spiralis, Theileria parva, Taenia hydatigena, Taenia ovis, Taenia saginata, Echinococcus granulosus, Mesocestoides corti, Mycoplasma arthritidis, M. hyorhinis, M. orale, M. arginini, Acholeplasma laidlawii, M. salivarium and M. pneumoniae. In some embodiments, the target sequence is a portion of a nucleic acid from a genomic locus, a transcribed mRNA, or a reverse transcribed cDNA from a gene locus of bacterium or other agents responsible for a disease in the sample comprising a mutation that confers resistance to a treatment, such as a single nucleotide mutation that confers resistance to antibiotic treatment.

[0329] In some embodiments, the target nucleic acid comprises a nucleic acid sequence of a virus, a bacterium, or other pathogen responsible for a disease in a plant (e.g., a crop). Methods and compositions of the disclosure may be used to treat or detect a disease in a plant. For example, the methods of the disclosure may be used to target a viral nucleic acid sequence in a plant. An effector protein of the disclosure may cleave the viral nucleic acid. In some embodiments, the target nucleic acid comprises a nucleic acid sequence of a virus or a bacterium or other agents (e.g., any pathogen) responsible for a disease in the plant (e.g., a crop). In some embodiments, the target nucleic acid comprises RNA. The target nucleic acid, in some embodiments, is a portion of a nucleic acid from a virus or a bacterium or other agents responsible for a disease in the plant (e.g., a crop). In some embodiments, the target nucleic acid is a portion of a nucleic acid from a genomic locus, or any NA amplicon, such as a reverse transcribed mRNA or a cDNA from a gene locus, a transcribed mRNA, or a reverse transcribed cDNA from a gene locus in at a virus or a bacterium or other agents (e.g., any pathogen) responsible for a disease in the plant (e.g., a crop). A virus infecting the plant may be an RNA virus. A virus infecting the plant may be a DNA virus. Non-limiting examples of viruses that may be targeted with the disclosure include Tobacco mosaic virus (TMV), Tomato spotted wilt virus (TSWV), Cucumber mosaic virus (CMV), Potato virus Y (PVY), Cauliflower mosaic virus (CaMV) (RT virus), Plum pox virus (PPV), Brome mosaic virus (BMV) and Potato virus X (PVX).

[0330] In some embodiments, compositions, systems, and methods described herein comprise a modified target nucleic acid which can describe a target nucleic acid wherein the target nucleic acid has undergone a modification, for example, after contact with an effector protein. In some embodiments, the modification is an alteration in the sequence of the target nucleic acid. In some embodiments, the modified target nucleic acid comprises an insertion, deletion, or replacement of one or more nucleotides compared to the unmodified target nucleic acid. In some embodiments, the modification is a mutation.

### Mutations

[0331] In some embodiments, target nucleic acids comprise a mutation. In some embodiments, a composition, system or method described herein can be used to modify a target nucleic acid comprising a mutation such that the mutation is modified to be a wild-type nucleotide or nucleotide sequence. In some embodiments, a composition, system or method described herein can be used to detect a target nucleic acid comprising a mutation. In some embodiments, a sequence comprising a mutation may be modified to a wildtype sequence with a composition, system or method described herein. In some embodiments, a sequence comprising a mutation may be detected with a composition, system or method described herein. The mutation may be a mutation of 1, 2, 3, 4, 5, 6, 7, 8, 9, 10, 11, 12, 13, 14, 15, 16, 17, 18, 19, 20 or more nucleotides. The mutation may comprise a deletion of about 5, about 10, about 15, about 20, about 25, about 30, about 35, about 40, about 45, about 50, about 55, about 60, about 65, about 70, about 75, about 80, about 85, about 90, about 95, about 100, about 200, about 300, about 400, about 500, about 600, about 700, about 800, about 900, or about 1000 nucleotides. The mutation may comprise a deletion of 1 to 5, 5 to 10, 10 to 15, 15 to 20, 20 to 25, 25 to 30, 30 to 35, 35 to 40, 40 to 45, 45 to 50, 50 to 55, 55 to 60, 60 to 65, 65 to 70, 70 to 75, 75 to 80, 80 to 85, 85 to 90, 90 to 95, 95 to 100, 100 to 200, 200 to 300, 300 to 400, 400 to 500, 500 to 600, 600 to 700, 700 to 800, 800 to 900, 900 to 1000, 1 to 50, 1 to 100, 25 to 50, 25 to 100, 50 to 100, 100 to 500, 100 to 1000, or 500 to 1000 nucleotides. Non-limiting examples of mutations are insertion-deletion (indel), single nucleotide polymorphism (SNP), and frameshift mutations. In some embodiments, guide nucleic acids described herein hybridize to a region of the target nucleic acid comprising the mutation. The mutation may be located in a non-coding region or a coding region of a gene.

[0332] A mutation may be in an open reading frame of a target nucleic acid. A mutation may result in the insertion of at least one amino acid in a protein encoded by the target nucleic acid. A mutation may result in the deletion of at least one amino acid in a protein encoded by the target nucleic acid. A mutation may result in the substitution of at least one amino acid in a protein encoded by the target nucleic acid. A mutation that results in the deletion, insertion, or substitution of one or more amino acids of a protein encoded by the target nucleic acid may result in misfolding of a protein encoded by the target nucleic acid. A mutation may result in a premature stop codon, thereby resulting in a truncation of the encoded protein.

[0333] In some embodiments, a mutation comprises a point mutation or single nucleotide polymorphism (SNP), a chromosomal mutation, a copy number mutation, or any combination thereof. A point mutation optionally comprises a substitution, insertion, or deletion. In some embodiments, a mutation comprises a chromosomal mutation. A chromosomal mutations can comprise an inversion, a deletion, a duplication, or a translocation of one or more nucleotides. In some embodiments, a mutation comprises a copy number variation. A copy number variation can comprise a gene amplification or an expanding trinucleotide repeat. In some embodiments, guide nucleic acids described herein hybridize to a target sequence of a target nucleic acid comprising the mutation. In some embodiments, mutations are located in a non-coding region of a gene.

[0334] In some embodiments, target nucleic acids comprise a mutation, wherein the mutation is a SNP. The single nucleotide mutation or SNP may be associated with a phenotype of the sample or a phenotype of the organism from which the sample was taken. The SNP, in some embodiments, is associated with altered phenotype from wild type phenotype. In some embodiments, a single nucleotide mutation, SNP, or deletion described herein is associated with a disease, such as a genetic disease. The SNP may be a synonymous substitution or a nonsynonymous substitution. The nonsynonymous substitution may be a missense substitution or a nonsense point mutation. The synonymous substitution may be a silent substitution. The mutation may be a deletion of one or more nucleotides. Often, the single nucleotide mutation, SNP, or deletion is associated with a disease such as cancer or a genetic disorder. The mutation, such as a single nucleotide mutation, a SNP, or a deletion, may be encoded in the sequence of a target nucleic acid from the germline of an organism or may be encoded in a target nucleic acid from a diseased cell, such as a cancer cell.

[0335] In some embodiments, the target nucleic acid comprises a mutation associated with a disease. In some examples, a mutation associated with a disease refers to a mutation whose presence in a subject indicates that the subject is susceptible to or suffers from, a disease, disorder, condition, or syndrome. In some examples, a mutation associated with a disease refers to a mutation which causes, contributes to the development of, or indicates the existence of the disease, disorder, condition, or syndrome. A mutation associated with a disease may also refer to any mutation which generates transcription or translation products at an abnormal level, or in an abnormal form, in cells affected by a disease relative to a control without the disease. In some examples, a mutation associated with a disease refers to a mutation whose presence in a subject indicates that the subject is susceptible to, or suffers from, a disease, disorder, or pathological state. In some embodiments, a mutation associated with a disease, comprises the co-occurrence of a mutation and the phenotype of a disease. The mutation may occur in a gene, wherein transcription or translation products from the gene occur at a significantly abnormal level or in an abnormal form in a cell or subject harboring the mutation as compared to a non-disease control subject not having the mutation.

[0336] In some embodiments, target nucleic acids comprise a mutation, wherein the mutation is a deletion of 1, 2, 3, 4, 5, 6, 7, 8, 9, 10, 11, 12, 13, 14, 15, 16, 17, 18, 19, 20 or more nucleotides. In some embodiments, a target nucleic acid comprises a mutation of 1, 2, 3, 4, 5, 6, 7, 8, 9, 10, 11, 12, 13, 14, 15, 16, 17, 18, 19, 20 or more nucleotides. The mutation may be a deletion of about 5, about 10, about 15, about 20, about 25, about 30, about 35, about 40, about 45, about 50, about 55, about 60, about 65, about 70, about 75, about 80, about 85, about 90, about 95, about 100, about 200, about 300, about 400, about 500, about 600, about 700, about 800, about 900, or about 1000 nucleotides. The mutation may be a deletion of 1 to 5, 5 to 10, 10 to 15, 15 to 20, 20 to 25, 25 to 30, 30 to 35, 35 to 40, 40 to 45, 45 to 50, 50 to 55, 55 to 60, 60 to 65, 65 to 70, 70 to 75, 75 to 80, 80 to 85, 85 to 90, 90 to 95, 95 to 100, 100 to 200, 200 to 300, 300 to 400, 400 to 500, 500 to 600, 600 to 700, 700 to 800, 800 to 900, 900 to 1000, 1 to 50, 1 to 100, 25 to 50, 25 to 100, 50 to 100, 100 to 500, 100 to 1000, or 500 to 1000 nucleotides.

### Certain Samples

[0337] Various sample types comprising a target nucleic acid of interest are consistent with the present disclosure. These samples may comprise a target nucleic acid for detection. In some instances, the detection of the target nucleic indicates an ailment, such as a disease, cancer, or genetic disorder, or genetic information, such as for phenotyping, genotyping, or determining ancestry and are compatible with the reagents and support mediums as described herein. Generally, a sample from an individual or an animal or an environmental sample may be obtained to test for presence of a disease, cancer, genetic disorder, or any mutation of interest.

[0338] In some embodiments, the sample is a biological sample, an environmental sample, or a combination thereof. Non-limiting examples of biological samples are blood, serum, plasma, saliva, urine, mucosal sample, peritoneal sample, cerebrospinal fluid, gastric secretions, nasal secretions, sputum, pharyngeal exudates, urethral or vaginal secretions, an exudate, an effusion, and a tissue sample (e.g., a biopsy sample). A tissue sample from a subject may be dissociated or liquified prior to application to detection system of the present disclosure. Non-limiting examples of environmental samples are soil, air, or water. In some embodiments, an environmental sample is taken as a swab from a surface of interest or taken directly from the surface of interest.

[0339] In some embodiments, the sample is a raw (unprocessed, unmodified) sample. Raw samples may be applied to a system for detecting or modifying a target nucleic acid, such as those described herein. In some embodiments, the sample is diluted with a buffer or a fluid or concentrated prior to its application to the system or be applied neat to the detection system. Sometimes, the sample contains no more 20 μl of buffer or fluid. The sample, in some embodiments, is contained in no more than 1, 5, 10, 15, 20, 25, 30, 35 40, 45, 50, 55, 60, 65, 70, 75, 80, 90, 100, 200, 300, 400, 500 μl, or any of value 1 μl to 500 μl, preferably 10 μL to 200 μL, or more preferably 50 μL to 100 μL of buffer or fluid. Sometimes, the sample is contained in more than 500 μl.

[0340] In some embodiments, the sample is taken from a single-cell eukaryotic organism; a plant or a plant cell; an algal cell; a fungal cell; an animal cell, tissue, or organ; a cell, tissue, or organ from an invertebrate animal; a cell, tissue, fluid, or organ from a vertebrate animal such as fish, amphibian, reptile, bird, and mammal; a cell, tissue, fluid, or organ from a mammal such as a human, a non-human primate, an ungulate, a feline, a bovine, an ovine, and a caprine. In some embodiments, the sample is taken from nematodes, protozoans, helminths, or malarial parasites. In some embodiments, the sample comprises nucleic acids from a cell lysate from a eukaryotic cell, a mammalian cell, a human cell, a prokaryotic cell, or a plant cell. In some embodiments, the sample comprises nucleic acids expressed from a cell.

[0341] In some embodiments, samples are used for diagnosing a disease. In some embodiments the disease is cancer. The sample used for cancer testing may comprise at least one target nucleic acid that may bind to a guide nucleic acid of the reagents described herein. The target nucleic acid, in some embodiments, comprises a portion of a gene comprising a mutation associated with a disease, such as cancer, a gene whose overexpression is associated with cancer, a tumor suppressor gene, an oncogene, a checkpoint inhibitor gene, a gene associated with cellular growth, a gene associated with cellular metabolism, or a gene associated with cell cycle. Sometimes, the target nucleic acid encodes a cancer biomarker, such as a prostate cancer biomarker or non-small cell lung cancer. In some embodiments, the assay may be used to detect “hotspots” in target nucleic acids that may be predictive of lung cancer. In some embodiments, the target nucleic acid comprises a portion of a nucleic acid that is associated with a blood fever. In some embodiments, the target nucleic acid is a portion of a nucleic acid from a genomic locus, any DNA amplicon of, a reverse transcribed mRNA, or a cDNA from a locus of at least one of: ALK, APC, ATM, AXIN2, BAP1, BARD1, BLM, BMPR1A, BRCA1, BRCA2, BRIP1, CASR, CDC73, CDH1, CDK4, CDKN1B, CDKN1C, CDKN2A, CEBPA, CHEK2, CTNNA1, DICER1, DIS3L2, EGFR, EPCAM, FH, FLCN, GATA2, GPC3, GREM1, HOXB13, HRAS, system, MAX, MEN1, MET, MITF, MLH1, MSH2, MSH3, MSH6, MUTYH, NBN, NF1, NF2, NTHL1, PALB2, PDGFRA, PHOX2B, PMS2, POLD1, POLE, POT1, PRKAR1A, PTCH1, PTEN, RAD50, RAD51C, RAD51D, RB1, RECQL4, RET, RUNX1, SDHA, SDHAF2, SDHB, SDHC, SDHD, SMAD4, SMARCA4, SMARCB1, SMARCE1, STK11, SUFU, TERC, TERT, TMEM127, TP53, TSC1, TSC2, VHL, WRN, and WT1. Any region of the aforementioned gene loci may be probed for a mutation or deletion using the compositions and methods disclosed herein. For example, in the EGFR gene locus, the compositions and methods for detection disclosed herein may be used to detect a single nucleotide polymorphism or a deletion.

[0342] In some embodiments, samples are used to diagnose a genetic disorder, also referred to as genetic disorder testing. The sample used for genetic disorder testing may comprise at least one target nucleic acid that may bind to a guide nucleic acid of the reagents described herein. In some embodiments, the genetic disorder is hemophilia, sickle cell anemia, β-thalassemia, Duchene muscular dystrophy, severe combined immunodeficiency, Huntington's disease, or cystic fibrosis. The target nucleic acid, in some embodiments, is from a gene with a mutation associated with a genetic disorder, from a gene whose overexpression is associated with a genetic disorder, from a gene associated with abnormal cellular growth resulting in a genetic disorder, or from a gene associated with abnormal cellular metabolism resulting in a genetic disorder. In some embodiments, the target nucleic acid is a nucleic acid from a genomic locus, a transcribed mRNA, or a reverse transcribed mRNA, a DNA amplicon of or a cDNA from a locus of at least one of: CFTR, FMR1, SMN1, ABCB11, ABCC8, ABCD1, ACAD9, ACADM, ACADVL, ACAT1, ACOX1, ACSF3, ADA, ADAMTS2, ADGRG1, AGA, AGL, AGPS, AGXT, AIRE, ALDH3A2, ALDOB, ALG6, ALMS1, ALPL, AMT, AQP2, ARG1, ARSA, ARSB, ASL, ASNS, ASPA, ASS1, ATM, ATP6V1B1, ATP7A, ATP7B, ATRX, BBS1, BBS10, BBS12, BBS2, BCKDHA, BCKDHB, BCS1L, BLM, BSND, CAPN3, CBS, CDH23, CEP290, CERKL, CHM, CHRNE, CIITA, CLN3, CLN5, CLN6, CLN8, CLRN1, CNGB3, COL27A1, COL4A3, COL4A4, COL4A5, COL7A1, CPS1, CPT1A, CPT2, CRB1, CTNS, CTSK, CYBA, CYBB, CYP11B1, CYP11B2, CYP17A1, CYP19A1, CYP27A1, DBT, DCLRE1C, DHCR7, DHDDS, DLD, DMD, DNAH5, DNAI1, DNAI2, DYSF, EDA, EIF2B5, EMD, ERCC6, ERCC8, ESCO2, ETFA, ETFDH, ETHE1, EVC, EVC2, EYS, F9, FAH, FAM161A, FANCA, FANCC, FANCG, FH, FKRP, FKTN, G6PC, GAA, GALC, GALK1, GALT, GAMT, GBA, GBE1, GCDH, GFM1, GJB1, GJB2, GLA, GLB1, GLDC, GLE1, GNE, GNPTAB, GNPTG, GNS, GRHPR, HADHA, HAX1, HBA1, HBA2, HBB, HEXA, HEXB, HGSNAT, HLCS, HMGCL, HOGA1, HPS1, HPS3, HSD17B4, HSD3B2, HYAL1, HYLS1, IDS, IDUA, IKBKAP, IL2RG, IVD, KCNJ11, LAMA2, LAMA3, LAMB3, LAMC2, LCA5, LDLR, LDLRAP1, LHX3, LIFR, LIPA, LOXHD1, LPL, LRPPRC, MAN2B1, MCOLN1, MED17, MESP2, MFSD8, MKS1, MLC1, MMAA, MMAB, MMACHC, MMADHC, MPI, MPL, MPV17, MTHFR, MTM1, MTRR, MTTP, MUT, MYO7A, NAGLU, NAGS, NBN, NDRG1, NDUFAF5, NDUFS6, NEB, NPC1, NPC2, NPHS1, NPHS2, NR2E3, NTRK1, OAT, OPA3, OTC, PAH, PC, PCCA, PCCB, PCDH15, PDHA1, PDHB, PEX1, PEX10, PEX12, PEX2, PEX6, PEX7, PFKM, PHGDH, PKHD1, PMM2, POMGNT1, PPT1, PROP1, PRPS1, PSAP, PTS, PUS1, PYGM, RAB23, RAG2, RAPSN, RARS2, RDH12, RMRP, RPE65, RPGRIP1L, RS1, RTEL1, SACS, SAMHD1, SEPSECS, SGCA, SGCB, SGCG, SGSH, SLC12A3, SLC12A6, SLC17A5, SLC22A5, SLC25A13, SLC25A15, SLC26A2, SLC26A4, SLC35A3, SLC37A4, SLC39A4, SLC4A11, SLC6A8, SLC7A7, SMARCAL1, SMPD1, STAR, SUMF1, TAT, TCIRG1, TECPR2, TFR2, TGM1, TH, TMEM216, TPP1, TRMU, TSFM, TTPA, TYMP, USH1C, USH2A, VPS13A, VPS13B, VPS45, VRK1, VSX2, WNT10A, XPA, XPC, and ZFYVE26.

[0343] The sample used for phenotyping testing may comprise at least one target nucleic acid that may bind to a guide nucleic acid of the reagents described herein. The target nucleic acid, in some embodiments, is a nucleic acid encoding a sequence associated with a phenotypic trait.

[0344] The sample used for genotyping testing may comprise at least one target nucleic acid that may bind to a guide nucleic acid of the reagents described herein. The target nucleic acid, in some embodiments, is a nucleic acid encoding a sequence associated with a genotype of interest.

[0345] The sample used for ancestral testing may comprise at least one target nucleic acid that may bind to a guide nucleic acid of the reagents described herein. The target nucleic acid, in some embodiments, is a nucleic acid encoding a sequence associated with a geographic region of origin or ethnic group.

[0346] The sample may be used for identifying a disease status. For example, a sample is any sample described herein, and is obtained from a subject for use in identifying a disease status of a subject. The disease may be a cancer or genetic disorder. Sometimes, a method comprises obtaining a serum sample from a subject; and identifying a disease status of the subject. Often, the disease status is prostate disease status, but the status of any disease may be assessed.

[0347] In some instances, compositions, systems and methods disclosed herein may be employed for detecting the genotype or phenotype of a cell or organism by contacting a sample (including lysate) from the cell or organism with an effector protein disclosed herein, and a guide nucleic acid. The sample may comprise a target nucleic acid encoding a sequence associated with a phenotypic trait. The sample may comprise a target nucleic acid encoding a sequence indicative of a genotype. The target nucleic acid, in some cases, is a nucleic acid encoding a sequence associated with a geographic region of origin or ethnic group.

[0348] Any of the above disclosed samples are consistent with the methods, compositions, reagents, enzymes, and systems disclosed herein.

### XI. Methods and Formulations for Introducing Systems and Compositions into a Target Cell

[0349] A guide nucleic acid and/or an effector protein described herein can be introduced into a host cell by any of a variety of well-known methods. As a non-limiting example, a guide nucleic acid and/or effector protein can be combined with a lipid. As another non-limiting example, a guide nucleic acid and/or effector protein can be combined with a particle, or formulated into a particle.

### Methods for Introducing Systems and Compositions to a Host

[0350] Described herein are methods of introducing various components described herein to a host. A host can be any suitable host, such as a host cell. When described herein, a host cell can be an in vivo or in vitro eukaryotic cell, a prokaryotic cell (e.g., bacterial or archaeal cell), or a cell from a multicellular organism (e.g., a cell line) cultured as a unicellular entity, which eukaryotic or prokaryotic cells can be, or have been, used as recipients for methods of introduction described herein, and include the progeny of the original cell which has been transformed by the methods of introduction described herein. It is understood that the progeny of a single cell may not necessarily be completely identical in morphology or in genomic or total DNA complement as the original parent, due to natural, accidental, or deliberate mutation. A host cell can be a recombinant host cell or a genetically modified host cell, if a heterologous nucleic acid, e.g., an expression vector, has been introduced into the cell.

[0351] Methods of introducing a nucleic acid and/or protein into a host cell are known in the art, and any convenient method can be used to introduce a subject nucleic acid (e.g., a nucleic acid expression vector) into a target cell (e.g., a human cell, and the like). Suitable methods include, e.g., viral infection, transfection, conjugation, protoplast fusion, lipofection, electroporation, calcium phosphate precipitation, polyethyleneimine (PEI)-mediated transfection, DEAE-dextran mediated transfection, liposome-mediated transfection, particle gun technology, calcium phosphate precipitation, direct micro injection, nanoparticle-mediated nucleic acid delivery (see, e.g., Panyam et al. Adv Drug Deliv Rev. 2012 Sep. 13. pii: 50169-409X(12)00283-9. doi: 10.1016/j.addr.2012.09.023), and the like. In some embodiments, the nucleic acid and/or protein are introduced into a disease cell comprised in a pharmaceutical composition comprising the guide nucleic acid and/or effector protein and a pharmaceutically acceptable excipient.

[0352] In certain embodiments, molecules of interest, such as nucleic acids of interest, are introduced to a host. In certain embodiments, polypeptides, such as an effector protein are introduced to a host. In certain embodiments, vectors, such as lipid particles and/or viral vectors can be introduced to a host. Introduction can be for contact with a host or for assimilation into the host, for example, introduction into a host cell.

[0353] In some embodiments, described herein are methods of introducing one or more nucleic acids, such as a nucleic acid encoding an effector protein, a nucleic acid that, when transcribed, produces an engineered guide nucleic acid, and/or a donor nucleic acid, or combinations thereof, into a host cell. Any suitable method can be used to introduce a nucleic acid into a cell. Suitable methods include, for example, viral infection, transfection, lipofection, electroporation, calcium phosphate precipitation, polyethyleneimine (PEI)-mediated transfection, DEAE-dextran mediated transfection, liposome-mediated transfection, particle gun technology, calcium phosphate precipitation, direct microinjection, nanoparticle-mediated nucleic acid delivery, and the like. Further methods are described throughout.

[0354] Introducing one or more nucleic acids into a host cell can occur in any culture media and under any culture conditions that promote the survival of the cells. Introducing one or more nucleic acids into a host cell can be carried out in vivo or ex vivo. Introducing one or more nucleic acids into a host cell can be carried out in vitro.

[0355] In some embodiments, an effector protein can be provided as RNA. The RNA can be provided by direct chemical synthesis or may be transcribed in vitro from a DNA (e.g., encoding the effector protein). Once synthesized, the RNA may be introduced into a cell by way of any suitable technique for introducing nucleic acids into cells (e.g., microinjection, electroporation, transfection, etc.). In some embodiments, introduction of one or more nucleic acid can be through the use of a vector and/or a vector system, accordingly, in some embodiments, compositions and system described herein comprise a vector and/or a vector system.

[0356] Vectors may be introduced directly to a host. In certain embodiments, host cells can be contacted with one or more vectors as described herein, and in certain embodiments, said vectors are taken up by the cells. Methods for contacting cells with vectors include but are not limited to electroporation, calcium chloride transfection, microinjection, lipofection, micro-injection, contact with the cell or particle that comprises a molecule of interest, or a package of cells or particles that comprise molecules of interest.

[0357] Components described herein can also be introduced directly to a host. For example, an engineered guide nucleic acid can be introduced to a host, specifically introduced into a host cell. Methods of introducing nucleic acids, such as RNA into cells include, but are not limited to direct injection, transfection, or any other method used for the introduction of nucleic acids.

[0358] Polypeptides (e.g., effector proteins) described herein can also be introduced directly to a host. In some embodiments, polypeptides described herein can be modified to promote introduction to a host. For example, polypeptides described herein can be modified to increase the solubility of the polypeptide. Such a polypeptide may optionally be fused to a polypeptide domain that increases solubility. The domain may be linked to the polypeptide through a defined protease cleavage site, such as TEV sequence which is cleaved by TEV protease. The linker may also include one or more flexible sequences, e.g. from 1 to 10 glycine residues. In some embodiments, the cleavage of the polypeptide is performed in a buffer that maintains solubility of the product, e.g. in the presence of from 0.5 to 2 M urea, in the presence of polypeptides and/or polynucleotides that increase solubility, and the like. Domains of interest include endosomolytic domains, e.g. influenza HA domain; and other polypeptides that aid in production, e.g. IF2 domain, GST domain, GRPE domain, and the like. In another example, the polypeptide can be modified to improve stability. For example, the polypeptides may be PEGylated, where the polyethyleneoxy group provides for enhanced lifetime in the blood stream. Polypeptides can also be modified to promote uptake by a host, such as a host cell. For example, a polypeptide described herein can be fused to a polypeptide permeant domain to promote uptake by a host cell. Any suitable permeant domains can be used in the non-integrating polypeptides of the present disclosure, including peptides, peptidomimetics, and non-peptide carriers. Examples include penetratin, a permeant peptide may be derived from the third alpha helix of Drosophila melanogaster transcription factor Antennapaedia; the HIV-1 tat basic region amino acid sequence, e.g., amino acids 49-57 of a naturally-occurring tat protein; and poly-arginine motifs, for example, the region of amino acids 34-56 of HIV-1 rev protein, nonaarginine, octa-arginine, and the like. The site at which the fusion is made may be selected in order to optimize the biological activity, secretion or binding characteristics of the polypeptide. The optimal site can be determined by suitable methods.

### Formulations for Introducing Systems and Compositions to a Host

[0359] Described herein are formulations of introducing systems and compositions described herein to a host. In some embodiments, such formulations, systems and compositions described herein comprise an effector protein and a carrier (e.g., excipient, diluent, vehicle, or filling agent). In some aspects of the present invention the effector protein is provided in a pharmaceutical composition comprising the effector protein and any pharmaceutically acceptable excipient, carrier, or diluent.

### XII. Methods of Nucleic Acid Editing

[0360] Provided herein are compositions, methods, and systems for editing target nucleic acids. In general, editing refers to modifying the nucleotide sequence of a target nucleic acid. However, compositions, methods, and systems disclosed herein may also be capable of making epigenetic modifications of target nucleic acids. Effector proteins, multimeric complexes thereof and systems described herein may be used for editing or modifying a target nucleic acid. Editing a target nucleic acid may comprise one or more of cleaving the target nucleic acid, deleting one or more nucleotides of the target nucleic acid, inserting one or more nucleotides into the target nucleic acid, mutating one or more nucleotides of the target nucleic acid, or modifying (e.g., methylating, demethylating, deaminating, or oxidizing) of one or more nucleotides of the target nucleic acid.

[0361] The target nucleic acid may be a gene or a portion thereof. Methods and compositions may modify a coding portion of a gene, a non-coding portion of a gene, or a combination thereof. Modifying at least one gene using the compositions and methods described herein may reduce or increase expression of one or more genes. In some embodiments, compositions and methods reduce expression of one or more genes by at least 10%, at least 20%, at least 30%, at least 40%, at least 50%, at least 60%, at least 70%, at least 80%, at least 90%, or at least 95%. In some embodiments, compositions and methods remove all expression of a gene, also referred to as genetic knock out. In some embodiments, compositions and methods increase expression of one or more genes by at least 10%, at least 20%, at least 30%, at least 40%, at least 50%, at least 60%, at least 70%, at least 80%, at least 90%, or at least 100%.

[0362] In some embodiments, compositions and methods use effector proteins that are fused to a heterologous protein. Heterologous proteins include, but are not limited to, transcriptional activators, transcriptional repressors, deaminases, methyltransferases, acetyltransferases, and other nucleic acid modifying proteins. In some embodiments, effector proteins need not be fused to a partner protein to accomplish the required protein (expression) modification.

[0363] In some embodiments, compositions and methods comprise a nucleic acid expression vector, or use thereof, to introduce an effector protein, guide nucleic acid, donor template or any combination thereof to a cell. In some embodiments, the nucleic acid expression vector is a viral vector. Viral vectors include, but are not limited to, retroviruses, adenoviruses, adeno-associated viruses, and herpes simplex viruses. In some embodiments, the viral vector is a replication-defective viral vector, comprising an insertion of a therapeutic gene inserted in genes essential to the lytic cycle, preventing the virus from replicating and exerting cytotoxic effects. In some embodiments, the viral vector is an adeno associated viral (AAV) vector. In some embodiments, the nucleic acid expression vector is a non-viral vector. In some embodiments, compositions and methods comprise a lipid, polymer, nanoparticle, or a combination thereof, or use thereof, to introduce a Cas protein, guide nucleic acid, donor template or any combination thereof to a cell. Non-limiting examples of lipids and polymers are cationic polymers, cationic lipids, or bio-responsive polymers. In some embodiments, the bio-responsive polymer exploits chemical-physical properties of the endosomal environment (e.g., pH) to preferentially release the genetic material in the intracellular space.

[0364] Methods of editing may comprise contacting a target nucleic acid with an effector protein described herein and a guide nucleic acid, wherein the effector protein comprises an amino acid sequence that is at least 65%, at least 70%, at least 75%, at least 80%, at least 85%, at least 90%, at least 95%, at least 97%, or at least 98%, at least 99%, or 100% identical to the sequence selected from SEQ ID NOS: 1-1614 and 3195-3302.

[0365] Methods may comprise removing a mutation (e.g., point mutations, deletions) in a target nucleic acid. Methods may remove or correct a disease-causing mutation in a nucleic acid sequence to produce a corresponding wildtype nucleobase sequence. Methods may correct the sequence of a target nucleic acid comprising a single nucleotide polymorphism (SNP) to a wildtype sequence. Methods may comprise modifying a target nucleic acid comprising a mutation such that expression of the target nucleic acid is reduced or arrested. Methods may generate gene knock-out, gene knock-in, gene editing, gene tagging, or a combination thereof. Methods of the disclosure may be targeted to any locus in a genome of a cell.

[0366] Editing may introduce a mutation (e.g., point mutations, deletions) in a target nucleic acid relative to a corresponding wildtype nucleotide sequence. Editing may remove or correct a disease-causing mutation in a nucleic acid sequence to produce a corresponding wildtype nucleotide sequence. Editing may remove/correct point mutations, deletions, null mutations, or tissue-specific mutations in a target nucleic acid. Editing may be used to generate gene knock-out, gene knock-in, gene editing, gene tagging, or a combination thereof. Methods of the disclosure may be targeted to any locus in a genome of a cell.

[0367] Editing may comprise single stranded cleavage, double stranded cleavage, donor nucleic acid insertion, epigenetic modification (e.g., methylation, demethylation, acetylation, or deacetylation), or a combination thereof. In some embodiments, cleavage (single-stranded or double-stranded) is site-specific, meaning cleavage occurs at a specific site in the target nucleic acid, often within the region of the target nucleic acid that hybridizes with the guide nucleic acid spacer region. In some embodiments, the effector proteins introduce a single-stranded break in a target nucleic acid to produce a cleaved nucleic acid. In some embodiments, the effector protein is capable of introducing a break in a single stranded RNA (ssRNA). The effector protein may be coupled to a guide nucleic acid that targets a particular region of interest in the ssRNA. In some embodiments, the target nucleic acid, and the resulting cleaved nucleic acid is contacted with a nucleic acid for homologous recombination (e.g., homology directed repair (HDR)) or non-homologous end joining (NHEJ). In some embodiments, a double-stranded break in the target nucleic acid may be repaired (e.g., by NHEJ or HDR) without insertion of a donor template, such that the repair results in an indel in the target nucleic acid at or near the site of the double-stranded break. In some embodiments, an indel, sometimes referred to as an insertion-deletion or indel mutation, is a type of genetic mutation that results from the insertion and/or deletion of one or more nucleotide in a target nucleic acid. An indel can vary in length (e.g., 1 to 1,000 nucleotides in length) and be detected using methods well known in the art, including sequencing. If the number of nucleotides in the insertion/deletion is not divisible by three, and it occurs in a protein coding region, it is also a frameshift mutation. Indel percentage is the percentage of sequencing reads that show at least one nucleotide has been mutation that results from the insertion and/or deletion of nucleotides regardless of the size of insertion or deletion, or number of nucleotides mutated. For example, if there is at least one nucleotide deletion detected in a given target nucleic acid, it counts towards the percent indel value. As another example, if one copy of the target nucleic acid has one nucleotide deleted, and another copy of the target nucleic acid has 10 nucleotides deleted, they are counted the same. This number reflects the percentage of target nucleic acids that are modified by a given effector protein.

[0368] In some embodiments, wherein the compositions, systems, and methods of the present disclosure comprise an additional guide nucleic acid or a use thereof, the dual-guided compositions, systems, and methods described herein can modify the target nucleic acid in two locations. In some embodiments, dual-guided editing can comprise cleavage of the target nucleic acid in the two locations targeted by the guide nucleic acids. In certain embodiments, upon removal of the sequence between the guide nucleic acids, the wild-type reading frame is restored. A wild-type reading frame can be a reading frame that produces at least a partially, or fully, functional protein. A non-wild-type reading frame can be a reading frame that produces a non-functional or partially non-functional protein.

[0369] Accordingly, in some embodiments, compositions, systems, and methods described herein can edit 1 to 1,000 nucleotides or any integer in between, in a target nucleic acid. In certain embodiments, 1 to 1,000, 2 to 900, 3 to 800, 4 to 700, 5 to 600, 6 to 500, 7 to 400, 8 to 300, 9 to 200, or 10 to 100 nucleotides, or any integer in between, can be edited by the compositions, systems, and methods described herein. In some embodiments, 1, 2, 3, 4, 5, 6, 7, 8, 9, 10, or more nucleotides can be edited by the compositions, systems, and methods described herein. In some embodiments, 10, 20, 30, 40, 50, 60, 70, 80 90, 100 or more nucleotides, or any integer in between, can be edited by the compositions, systems, and methods described herein. In some embodiments, 100, 200, 300, 400, 500, 600, 700, 800, 900 or more nucleotides, or any integer in between, can be edited by the compositions, systems, and methods described herein.

[0370] In some embodiments, the effector protein is fused to a chromatin-modifying enzyme. In some embodiments, the fusion protein chemically modifies the target nucleic acid, for example by methylating, demethylating, or acetylating the target nucleic acid in a sequence specific or non-specific manner.

[0371] Methods may comprise use of two or more effector proteins. An illustrative method for introducing a break in a target nucleic acid comprises contacting the target nucleic acid with: (a) a first engineered guide nucleic acid comprising a region that binds to a first effector protein, wherein the effector protein comprises at least 75% sequence identity to any one of the sequences selected from SEQ ID NOS: 1-1614 and 3195-3302; and (b) a second engineered guide nucleic acid comprising a region that binds to a second effector protein, wherein the effector protein comprises at least 75% sequence identity to any one of the sequences selected from SEQ ID NOS: 1-1614 and 3195-3302, wherein the first engineered guide nucleic acid comprises an additional region that binds to the target nucleic acid and wherein the second engineered guide nucleic acid comprises an additional region that binds to the target nucleic acid.

[0372] In some embodiments, editing a target nucleic acid comprises genome editing. Genome editing may comprise modifying a genome, chromosome, plasmid, or other genetic material of a cell or organism. In some embodiments, the genome, chromosome, plasmid, or other genetic material of the cell or organism is modified in vivo. In some embodiments, the genome, chromosome, plasmid, or other genetic material of the cell or organism is modified in a cell. In some embodiments, the genome, chromosome, plasmid, or other genetic material of the cell or organism is modified in vitro. For example, a plasmid may be modified in vitro using a composition described herein and introduced into a cell or organism. In some embodiments, modifying a target nucleic acid may comprise deleting a sequence from a target nucleic acid. For example, a mutated sequence or a sequence associated with a disease may be removed from a target nucleic acid. In some embodiments, modifying a target nucleic acid may comprise replacing a sequence in a target nucleic acid with a second sequence. For example, a mutated sequence or a sequence associated with a disease may be replaced with a second sequence lacking the mutation or that is not associated with the disease. In some embodiments, modifying a target nucleic acid may comprise introducing a sequence into a target nucleic acid. For example, a beneficial sequence or a sequence that may reduce or eliminate a disease may be inserted into the target nucleic acid.

[0373] In some embodiments, methods comprise inserting a donor nucleic acid into a cleaved target nucleic acid. The donor nucleic acid may be inserted at a specified (e.g., effector protein targeted) point within the target nucleic acid. In some embodiments, methods comprise contacting a target nucleic acid with an effector protein comprising an amino acid sequence that is at least 65%, at least 70%, at least 75%, at least 80%, at least 85%, at least 90%, at least 95%, at least 97%, at least 98%, at least 99%, or 100% identical to any one of the sequences selected from SEQ ID NOS: 1-1614 and 3195-3302, thereby introducing a single-stranded break in the target nucleic acid; contacting the target nucleic acid with a second effector protein, optionally comprising an amino acid sequence that is at least 65%, at least 70%, at least 75%, at least 80%, at least 85%, at least 90%, at least 95%, at least 97%, at least 98%, or at least 99% identical to any one of the sequences selected from SEQ ID NOS: 1-1614 and 3195-3302, to generate a second cleavage site in the target nucleic acid, ligating the regions flanking the first and second cleavage site, optionally through NHEJ or single-strand annealing, thereby resulting in the excision of a portion of the target nucleic acid between the first and second cleavage sites from the target nucleic acid; and contacting the target nucleic acid with a donor nucleic acid for homologous recombination, optionally via HDR or NHEJ, thereby introducing a new sequence into the target nucleic acid (e.g., at a cleavage site or in between two cleavage sites).

[0374] In some embodiments, methods comprise editing a target nucleic acid with two or more effector proteins. Editing a target nucleic acid may comprise introducing a two or more single-stranded breaks in a target nucleic acid. In some embodiments, a break may be introduced by contacting a target nucleic acid with an effector protein and a guide nucleic acid. The guide nucleic acid may bind to the effector protein and hybridize to a region of the target nucleic acid, thereby recruiting the effector protein to the region of the target nucleic acid. Binding of the effector protein to the guide nucleic acid and the region of the target nucleic acid may activate the effector protein, and the effector protein may introduce a break (e.g., a single stranded break) in the region of the target nucleic acid. In some embodiments, modifying a target nucleic acid may comprise introducing a first break in a first region of the target nucleic acid and a second break in a second region of the target nucleic acid. For example, modifying a target nucleic acid may comprise contacting a target nucleic acid with a first guide nucleic acid that binds to a first effector protein and hybridizes to a first region of the target nucleic acid and a second guide nucleic acid that binds to a second programmable nickase and hybridizes to a second region of the target nucleic acid. The first effector protein may introduce a first break in a first strand at the first region of the target nucleic acid, and the second effector protein may introduce a second break in a second strand at the second region of the target nucleic acid. In some embodiments, a segment of the target nucleic acid between the first break and the second break may be removed, thereby modifying the target nucleic acid. In some embodiments, a segment of the target nucleic acid between the first break and the second break may be replaced (e.g., with donor nucleic acid), thereby modifying the target nucleic acid. In some embodiments, the effector protein comprises an amino acid sequence that is at least 65%, at least 70%, at least 75%, at least 80%, at least 85%, at least 90%, at least 95%, at least 97%, at least 98%, at least 99%, or 100% identical to any one of the sequences selected from SEQ ID NOS: 1-1614 and 3195-3302.

[0375] In some embodiments, editing is achieved by fusing an effector protein to a heterologous sequence. The heterologous sequence may be a suitable fusion partner, e.g., a protein that provides recombinase activity by acting on the target nucleic acid. In some embodiments, the fusion protein comprises an effector protein fused to a heterologous sequence by a linker. The heterologous sequence or fusion partner may be a base editing domain. The base editing domain may be an ADAR1/2 or any functional variant thereof. The heterologous sequence or fusion partner may be fused to the C-terminus, N-terminus, or an internal portion (e.g., a portion other than the N- or C-terminus) of the effector protein. The heterologous sequence or fusion partner may be fused to the effector protein by a linker. A linker may be a peptide linker or a non-peptide linker. In some embodiments, the linker is an XTEN linker. In some embodiments, the linker comprises one or more repeats a tri-peptide GGS. In some embodiments, the linker is from 1 to 100 amino acids in length. In some embodiments, the linker is more 100 amino acids in length. In some embodiments, the linker is from 10 to 27 amino acids in length. A non-peptide linker may be a polyethylene glycol (PEG), polypropylene glycol (PPG), co-poly(ethylene/propylene) glycol, polyoxyethylene (POE), polyurethane, polyphosphazene, polysaccharides, dextran, polyvinyl alcohol, polyvinylpyrrolidones, polyvinyl ethyl ether, polyacrylamide, polyacrylate, polycyanoacrylates, lipid polymers, chitins, hyaluronic acid, heparin, or an alkyl linker.

[0376] Methods, systems and compositions described herein can edit or modify a target nucleic acid wherein such editing or modification can effect one or more indels. In some embodiments, where compositions, systems, and/or methods described herein effect one or more indels, then in certain embodiments, the impact on the transcription and/or translation of the target nucleic acid can be predicted depending on: 1) the amount of indels generated; and 2) the location of the indel on the target nucleic acid. For example, as described herein, in certain embodiments, if the amount of indels is not divisible by three, and the indels occur within or along a protein coding region, then the modification or mutation can be a frameshift mutation.

[0377] In certain embodiments, if the amount of indels is divisible by three, then a frameshift mutation may not be effected, but a splicing disruption mutation and/or sequence skip mutation may be effected, such as an exon skip mutation. In certain embodiments, if the amount of indels is not evenly divisible by three, then a frameshift mutation may be effected.

[0378] Methods, systems and compositions described herein can edit or modify a target nucleic acid wherein such editing or modification can be measured by indel activity. Indel activity measures the amount of change in a target nucleic acid (e.g., nucleotide deletion(s) and/or insertion(s)) compared to a target nucleic acid that has not been contacted by a polypeptide described in compositions, systems, and methods described herein. For example, indel activity can be detected by next generation sequencing of one or more target loci of a target nucleic acid where indel percentage is calculated as the fraction of sequencing reads containing insertions or deletions relative to an unedited reference sequence. In certain embodiments, methods, systems, and compositions comprising an effector protein and guide nucleic acid described herein can exhibit about 0.0001% to about 65% or more indel activity upon contact to a target nucleic acid compared to a target nucleic acid non-contacted with compositions, systems, or by methods described herein. For example, methods, systems, and compositions comprising an effector protein and guide nucleic acid described herein can exhibit about 0.0001%, about 0.001%, about 0.01%, about 0.1%, about 1%, about 5%, about 10%, about 15%, about 20%, about 25%, about 30%, about 35%, about 40%, about 45%, about 50%, about 55%, about 60%, about 65% or more indel activity.

[0379] In some embodiments, editing or modifications of a target nucleic acid as described herein effects one or more mutations comprising splicing disruption mutations, frameshift mutations (e.g., 1+ or 2+ frameshift mutation), sequence deletion, sequence skipping, sequence reframing, sequence knock-in, or any combination thereof.

[0380] A splicing disruption can be a modification that disrupts the splicing of a target nucleic acid or splicing of a sequence that is transcribed from a target nucleic acid relative to a target nucleic acid without the splicing disruption.

[0381] A frameshift mutation can be a modification that alters the reading frame of a target nucleic acid relative to a target nucleic acid without the frameshift mutation. In certain embodiments, a frameshift mutation can be a +2 frameshift mutation wherein a reading frame is modified by 2 bases. In certain embodiments, a frameshift mutation can be a +1 frameshift mutation wherein a reading frame is modified by 1 base. In certain embodiments, a frameshift mutation is a modification that alters the number of bases in a target nucleic acid so that it is not divisible by three. In some embodiments, a frameshift mutation can be a modification that is not a splicing disruption.

[0382] A sequence as described in reference to a sequence deletion, sequence skipping, sequence reframing, and sequence knock-in can be a DNA sequence, a RNA sequence, a modified DNA or RNA sequence, a mutated sequence, a wild-type sequence, a coding sequence, a non-coding sequence, an exonic sequence (exon), an intronic sequence (intron), or any combination thereof. Such a sequence can be a sequence that is associated with a disease as described herein, such as DMD.

[0383] In certain embodiments, sequence deletion is a modification where one or more sequences in a target nucleic acid are deleted relative to a target nucleic acid without the sequence deletion. In certain embodiments, a sequence deletion can result in or effect a splicing disruption or a frameshift mutation. In certain embodiments, a sequence deletion result in or effect a splicing disruption.

[0384] In certain embodiments, sequence skipping is a modification where one or more sequences in a target nucleic acid are skipped upon transcription or translation of the target nucleic acid relative to a target nucleic acid without the sequence skipping. In certain embodiments, sequence skipping can result in or effect a splicing disruption or a frameshift mutation. In certain embodiments, sequence skipping can result in or effect a splicing disruption.

[0385] In certain embodiments, sequence reframing is a modification where one or more bases in a target are modified so that the reading frame of the sequence is reframed relative to a target nucleic acid without the sequence reframing. In certain embodiments, sequence reframing can result in or effect a splicing disruption or a frameshift mutation. In certain embodiments, sequence reframing can result in or effect a frameshift mutation.

[0386] In certain embodiments, sequence knock-in is a modification where one or more sequences is inserted into a target nucleic acid relative to a target nucleic acid without the sequence knock-in. In certain embodiments, sequence knock-in can result in or effect a splicing disruption or a frameshift mutation. In certain embodiments, sequence knock-in can result in or effect a splicing disruption.

[0387] In certain embodiments, editing or modification of a target nucleic acid can be locus specific, wherein compositions, systems, and methods described herein can edit or modify a target nucleic acid at one or more specific loci to effect one or more specific mutations comprising splicing disruption mutations, frameshift mutations, sequence deletion, sequence skipping, sequence reframing, sequence knock-in, or any combination thereof. For example, editing or modification of a specific locus can effect any one of a splicing disruption, frameshift (e.g., 1+ or 2+ frameshift), sequence deletion, sequence skipping, sequence reframing, sequence knock-in, or any combination thereof. In certain embodiments, editing or modification of a target nucleic acid can be locus specific, modification specific, or both. In certain embodiments, editing or modification of a target nucleic acid can be locus specific, modification specific, or both, wherein compositions, systems, and methods described herein comprise an effector protein described herein and a guide nucleic acid described herein.

[0388] Methods of editing a target nucleic acid or modulating the expression of a target nucleic acid may be performed in vivo. Methods of editing a target nucleic acid or modulating the expression of a target nucleic acid may be performed in vitro. For example, a plasmid may be modified in vitro using a composition described herein and introduced into a cell or organism. Methods of editing a target nucleic acid or modulating the expression of a target nucleic acid may be performed ex vivo. For example, methods may comprise obtaining a cell from a subject, modifying a target nucleic acid in the cell with methods described herein, and returning the cell to the subject.

[0389] In some embodiments, the CRISPR-associated transposase (CAST) systems disclosed herein may be used for targeted nucleic acid modification. In some embodiments, the methods of modifying nucleic acids comprise modifying a target nucleic acid in vitro, comprising: bringing the CRISPR-associated transposase (CAST) systems disclosed herein in contact with the target nucleic acid, wherein the donor nucleic acid sequence is integrated into the target nucleic acid.

[0390] In some embodiments, the methods comprise introducing into a cell, any one of the CRISPR-associated transposase (CAST) systems disclosed herein. The disclosure further provides methods of modifying a target nucleic acid in a cell comprising introducing into the cell, any one the CRISPR-associated transposase (CAST) systems disclosed herein, wherein the donor nucleic acid sequence is integrated into the target nucleic acid. For instance, in some embodiments, the donor nucleic acid is inserted into the target nucleic acid, or used to edit the target nucleic acid. In some cases, the donor nucleic acid comprises one or more mutations (e.g. nucleotide substitutions or insertions) to be introduced into the target nucleic acid. The mutations may cause a shift in an open reading frame on the target nucleic acid. In some cases, the donor nucleic acid alters a stop codon in the target nucleic acid. For example, the donor nucleic acid may correct a premature stop codon. The correction may be achieved by deleting the stop codon or introducing one or more mutations to the stop codon.

[0391] In some embodiments, the methods comprise using any one the CRISPR-associated transposase (CAST) systems disclosed herein to insert or restore a functional copy of a gene, or a fragment thereof, or a regulatory sequence or a fragment thereof to correct loss of function mutations, deletions, or translocations associated with disease states or disorders. In some embodiments, the integration of the donor nucleic acid: (i) introduces one or more mutations to the target nucleic acid, (ii) corrects or introduces a premature stop codon in the target nucleic acid, (iii) disrupts a splicing site, (iv) restores or introduces a splicing site, (v) inserts a gene or gene fragment at one or both alleles of a target nucleic acid, or (vi) any combination thereof. The one or more mutations introduced by the donor nucleic acid may be one or more substitutions, deletions, insertions, or a combination thereof. In some embodiments, the one or more mutations cause a shift in an open reading frame on the target nucleic acid.

### Donor Nucleic Acids

[0392] In some embodiments, a donor nucleic acid comprises a nucleic acid that is incorporated into a target nucleic acid or target sequence. In reference to a viral vector, the term donor nucleic acid refers to a sequence of nucleotides that will be or has been introduced into a cell following transfection of the viral vector. The donor nucleic acid may be introduced into the cell by any mechanism of the transfecting viral vector, including, but not limited to, integration into the genome of the cell or introduction of an episomal plasmid or viral genome. As another example, when used in reference to the activity of an effector protein, the term donor nucleic acid refers to a sequence of nucleotides that will be or has been inserted at the site of cleavage by the effector protein (cleaving (hydrolysis of a phosphodiester bond) of a nucleic acid resulting in a nick or double strand break-nuclease activity). As yet another example, when used in reference to homologous recombination, the term donor nucleic acid refers to a sequence of DNA that serves as a template in the process of homologous recombination, which may carry the modification that is to be or has been introduced into the target nucleic acid. By using this donor nucleic acid as a template, the genetic information, including the modification, is copied into the target nucleic acid by way of homologous recombination.

[0393] Donor nucleic acids of any suitable size may be integrated into a target nucleic acid or genome. In some embodiments, the donor polynucleotide integrated into a genome is less than 3, about 3, 3.5, 4, 4.5, 5, 5.5, 6, 6.5, 7, 7.5, 8, 8.5, 9, 9.5, 10, 10.5, 11, 11.5, 12, 12.5, 13, 13.5, 14, 14.5, 15, 16, 17, 18, 19, 20, 25, 30, 35, 40, 45, 50, 100, 150, 200, 250, 300, 350, 400, 450, 500 kilobases in length. In some embodiments, donor nucleic acids are more than 500 kilobases (kb) in length.

[0394] The donor nucleic acid may comprise a sequence that is derived from a plant, bacteria, virus or an animal. The animal may be human. The animal may be a non-human animal, such as, by way of non-limiting example, a mouse, rat, hamster, rabbit, pig, bovine, deer, sheep, goat, chicken, cat, dog, ferret, a bird, non-human primate (e.g., marmoset, rhesus monkey). The non-human animal may be a domesticated mammal or an agricultural mammal.

### Genetically Modified Cells and Organisms

[0395] Methods of editing described herein may be employed to generate a genetically modified cell. The cell may be a eukaryotic cell (e.g., a mammalian cell) or a prokaryotic cell (e.g., an archaeal cell). The cell may be derived from a multicellular organism and cultured as a unicellular entity. The cell may comprise a heritable genetic modification, such that progeny cells derived therefrom comprise the heritable genetic mutation. The cell may be progeny of a genetically modified cell comprising a genetic modification of the genetically modified parent cell. A genetically modified cell may comprise a deletion, insertion, mutation, or non-native sequence relative to a wild-type version of the cell or the organism from which the cell was derived.

[0396] Methods may comprise contacting a cell with a nucleic acid (e.g., a plasmid or mRNA) comprising a nucleotide sequence encoding an effector protein, wherein the effector protein comprises an amino acid sequence that is at least 65%, at least 70%, at least 75%, at least 80%, at least 85%, at least 90%, at least 95%, at least 97%, at least 98%, or at least 99% identical to any one of the sequences selected from SEQ ID NOs: 1-1614 and 3195-3302.

[0397] Methods may comprise contacting cells with a nucleic acid (e.g., a plasmid or RNA) comprising a nucleotide sequence that is a guide nucleic acid (e.g., sgRNA or crRNA), a tracrRNA or any combination thereof or a nucleotide sequence, when transcribed, produces a guide nucleic acid (e.g., sgRNA or crRNA), a tracrRNA or any combination thereof. In some embodiments, the nucleotide sequence of the nucleic acid is at least 65%, at least 70%, at least 75%, at least 80%, at least 85%, at least 90%, at least 92%, at least 95%, at least 97%, at least 98%, at least 99%, or 100% identical to any one of the sequences set forth in Columns B1, B2, and B3 of TABLE 1 and Columns D1 and D2 of TABLE 2, or any combination thereof. Contacting may comprise electroporation, acoustic poration, optoporation, viral vector-based delivery, iTOP, nanoparticle delivery (e.g., lipid or gold nanoparticle delivery), cell-penetrating peptide (CPP) delivery, DNA nanostructure delivery, or any combination thereof.

[0398] Methods may comprise contacting a cell with an effector protein or a multimeric complex thereof, wherein the effector protein comprises an amino acid sequence that is at least 65%, at least 70%, at least 75%, at least 80%, at least 85%, at least 90%, at least 95%, at least 97%, at least 98%, or at least 99% identical to any one of the sequences selected from SEQ ID NOs: 1-1614 and 3195-3302.

[0399] Methods may comprise contacting a cell with an effector protein, or a nucleic acid (e.g., a plasmid or mRNA) encoding the effector protein, and a nucleic acid (e.g., a plasmid or RNA) comprising a nucleotide sequence that is a guide nucleic acid (e.g., sgRNA or crRNA), a tracrRNA or any combination thereof or a nucleotide sequence, when transcribed, produces a guide nucleic acid (e.g., sgRNA or crRNA), a tracrRNA or any combination thereof, wherein the effector protein comprises an amino acid sequence that is at least 65%, at least 70%, at least 75%, at least 80%, at least 85%, at least 90%, at least 95%, at least 97%, at least 98%, or at least 99% identical to any one of the sequences selected from SEQ ID NOs: 1-1614 and 3195-330, and the nucleotide sequence of the nucleic acid is at least 65%, at least 70%, at least 75%, at least 80%, at least 85%, at least 90%, at least 92%, at least 95%, at least 97%, at least 98%, at least 99%, or 100% identical to any one of the sequences set forth in Columns B1, B2, and B3 of TABLE 1 and Columns D1 and D2 of TABLE 2, or any combination thereof. Such methods include contacting a cell with an RNP complex as described herein, including RNP complexes comprising an effector protein and a nucleic acid (e.g., RNA) comprising a nucleotide sequence that is a guide nucleic acid (e.g., sgRNA or crRNA), a tracrRNA or any combination thereof. In some embodiments, for methods that include use of such an RNP complex, the effector protein comprises an amino acid sequence that is at least 65%, at least 70%, at least 75%, at least 80%, at least 85%, at least 90%, at least 95%, at least 97%, at least 98%, or at least 99% identical to any one of the sequences selected from SEQ ID NOs: 1-1614 and 3195-3302, and the nucleotide sequence of the nucleic acid is at least 65%, at least 70%, at least 75%, at least 80%, at least 85%, at least 90%, at least 92%, at least 95%, at least 97%, at least 98%, at least 99%, or 100% identical to any one of the sequences set forth in Columns B1, B2, and B3 of TABLE 1 and Columns D1 and D2 of TABLE 2, or any combination thereof

[0400] Methods of the disclosure may be performed in a subject. Compositions of the disclosure may be administered to a subject. A subject may be a human. A subject may be a mammal (e.g., rat, mouse, cow, dog, pig, sheep, horse). A subject may be a vertebrate or an invertebrate. A subject may be a laboratory animal. A subject may be a patient. A subject may be at risk of developing, suffering from, or displaying symptoms a disease or disorder as set forth in herein. The subject may have a mutation associated with a gene described herein. The subject may display symptoms associated with a mutation of a gene described herein. In some embodiments, a mutation comprises a point mutation or single nucleotide polymorphism (SNP), a chromosomal mutation, a copy number mutation, or any combination thereof. A point mutation optionally comprises a substitution, insertion, or deletion. In some embodiments, a mutation comprises a chromosomal mutation. A chromosomal mutation can comprise an inversion, a deletion, a duplication, or a translocation. In some embodiments, a mutation comprises a copy number variation. A copy number variation can comprise a gene amplification or an expanding trinucleotide repeat. In some embodiments, mutations may be as described herein.

[0401] Methods of the disclosure may be performed in a cell. A cell may be in vitro. A cell may be in vivo. A cell may be ex vivo. A cell may be an isolated cell. A cell may be a cell inside of an organism. A cell may be an organism. A cell may be a cell in a cell culture. A cell may be one of a collection of cells. A cell may be a mammalian cell or derived from a mammalian cell. A cell may be a rodent cell or derived from a rodent cell. A cell may be a human cell or derived from a human cell. A cell may be a eukaryotic cell or derived from a eukaryotic cell. A cell may be a pluripotent stem cell. A cell may be a plant cell or derived from a plant cell. A cell may be an animal cell or derived from an animal cell. A cell may be an invertebrate cell or derived from an invertebrate cell. A cell may be a vertebrate cell or derived from a vertebrate cell.

[0402] A cell may be from a specific organ or tissue. The tissue may be muscle. The muscle may be skeletal muscle. In certain embodiments, skeletal muscles include the following: abductor digiti minimi (foot), abductor digiti minimi (hand), abductor hallucis, abductor pollicis brevis, abductor pollicis longus, adductor brevis, adductor hallucis, adductor longus, adductor magnus, adductor pollicis, anconeus, articularis cubiti, articularis genu, aryepiglotticus, auricularis, biceps brachii, biceps femoris, brachialis, brachioradialis, buccinator, bulbospongiosus, constrictor of pharynx—inferior, constrictor of pharynx—middle, constrictor of pharynx—superior, coracobrachialis, corrugator supercilii, cremaster, cricothyroid, dartos, deep transverse perinei, deltoid, depressor anguli oris, depressor labii inferioris, diaphragm, digastric, digastric (anterior view), erector spinae—spinalis, erector spinae—iliocostalis, erector spinae—longissimus, extensor carpi radialis brevis, extensor carpi radialis longus, extensor carpi ulnaris, extensor digiti minimi (hand), extensor digitorum (hand), extensor digitorum brevis (foot), extensor digitorum longus (foot), extensor hallucis brevis, extensor hallucis longus, extensor indicis, extensor pollicis brevis, extensor pollicis longus, external oblique abdominis, flexor carpi radialis, flexor carpi ulnaris, flexor digiti minimi brevis (foot), flexor digiti minimi brevis (hand), flexor digitorum brevis, flexor digitorum longus (foot), flexor digitorum profundus, flexor digitorum superficialis, flexor hallucis brevis, flexor hallucis longus, flexor pollicis brevis, flexor pollicis longus, frontalis, gastrocnemius, gemellus inferior, gemellus superior, genioglossus, geniohyoid, gluteus maximus, gluteus medius, gluteus minimus, gracilis, hyoglossus, iliacus, inferior oblique, inferior rectus, infraspinatus, intercostals external, intercostals innermost, intercostals internal, internal oblique abdominis, interossei—dorsal of hand, interossei—dorsal of foot, interossei—palmar of hand, interossei—plantar of foot, interspinales, intertransversarii, intrinsic muscles of tongue, ishiocavernosus, lateral cricoarytenoid, lateral pterygoid, lateral rectus, latissimus dorsi, levator anguli oris, levator ani-coccygeus, levator ani—iliococcygeus, levator ani-pubococcygeus, levator ani-puborectalis, levator ani-pubovaginalis, levator labii superioris, levator labii superioris, alaeque nasi, levator palpebrae superioris, levator scapulae, levator veli palatini, levatores costarum, longus capitis, longus colli, lumbricals of foot, lumbricals of hand, masseter, medial pterygoid, medial rectus, mentalis, m. uvulae, mylohyoid, nasalis, oblique arytenoid, obliquus capitis inferior, obliquus capitis superior, obturator externus, obturator internus (A), obturator internus (B), omohyoid, opponens digiti minimi (hand), opponens pollicis, orbicularis oculi, orbicularis oris, palatoglossus, palatopharyngeus, palmaris brevis, palmaris longus, pectineus, pectoralis major, pectoralis minor, peroneus brevis, peroneus longus, peroneus tertius, piriformis (A), piriformis (B), plantaris, platysma, popliteus, posterior cricoarytenoid, procerus, pronator quadratus, pronator teres, psoas major, psoas minor, pyramidalis, quadratus femoris, quadratus lumborum, quadratus plantae, rectus abdominis, rectus capitus anterior, rectus capitus lateralis, rectus capitus posterior major, rectus capitus posterior minor, rectus femoris, rhomboid major, rhomboid minor, risorius, salpingopharyngeus, sartorius, scalenus anterior, scalenus medius, scalenus minimus, scalenus posterior, semimembranosus, semitendinosus, serratus anterior, serratus posterior inferior, serratus posterior superior, soleus, sphincter ani, sphincter urethrae, splenius capitis, splenius cervicis, stapedius, sternocleidomastoid, sternohyoid, sternothyroid, styloglossus, stylohyoid, stylohyoid (anterior view), stylopharyngeus, subclavius, subcostalis, subscapularis, superficial transverse perinei, superior oblique, superior rectus, supinator, supraspinatus, temporalis, temporoparietalis, tensor fasciae lata, tensor tympani, tensor veli palatini, teres major, teres minor, thyro-arytenoid & vocalis, thyro-epiglotticus, thyrohyoid, tibialis anterior, tibialis posterior, transverse arytenoid, transversospinalis—multifidus, transversospinalis—rotatores, transversospinalis—semispinalis, transversus abdominis, transversus thoracis, trapezius, triceps, vastus intermedius, vastus lateralis, vastus medialis, zygomaticus major, or zygomaticus minor. In some embodiments, the cell is a myocyte. In some embodiments, the cell is a muscle cell. In some embodiments, the muscle cell is a skeletal muscle cell. In some embodiments, the skeletal muscle cell is a red (slow) skeletal muscle cell, a white (fast) skeletal muscle cell or an intermediate skeletal muscle cell.

[0403] The tissue may be the subject's blood, bone marrow, or cord blood. The tissue may be heterologous donor blood, cord blood, or bone marrow. The tissue may be allogenic blood, cord blood, or bone marrow. In some embodiments, the cell is a: a stem cell, muscle satellite cell, muscle stem cell, myoblast, muscle progenitor cell, a pluripotent stem cell or a cell derived from a pluripotent stem cell.

### XIII. Methods of Detecting a Target Nucleic Acid

[0404] Provided herein are methods of detecting target nucleic acids. Methods may comprise detecting target nucleic acids with compositions or systems described herein. Methods may comprise detecting a target nucleic acid in a sample, e.g., a cell lysate, a biological fluid, or environmental sample. Methods may comprise detecting a target nucleic acid in a cell. In some instances, methods of detecting a target nucleic acid in a sample or cell comprises contacting the sample or cell with an effector protein or a multimeric complex thereof, a guide nucleic acid, wherein at least a portion of the guide nucleic acid is complementary to at least a portion of the target nucleic acid, and a reporter nucleic acid that is cleaved in the presence of the effector protein, the guide nucleic acid, and the target nucleic acid, and detecting a signal produced by cleavage of the reporter nucleic acid, thereby detecting the target nucleic acid in the sample. In some instances, methods result in trans cleavage of the reporter nucleic acid. In some instances, methods result in cis cleavage of the reporter nucleic acid.

[0405] In some instances, the effector protein comprises an amino acid sequence that is at least is at least 70%, at least 75%, at least 80%, at least 85%, at least 90%, at least 92%, at least 95%, at least 97%, at least 98%, at least 99%, or 100% identical to any one of SEQ ID NOs: 1-1614 and 3195-3302. In some instances, the amino acid sequence of the effector protein is at least 70%, at least 75%, at least 80%, at least 85%, at least 90%, at least 92%, at least 95%, at least 97%, at least 98%, at least 99%, or 100% identical to any one of SEQ ID NOs: 1-1614 and 3195-3302. In some instances, the nucleobase sequence of the guide is at least 70%, at least 75%, at least 80%, at least 85%, at least 90%, at least 92%, at least 95%, at least 97%, at least 98%, at least 99%, or 100% identical to any one of SEQ ID NOs: 1615-3194 and 3303-3406.

[0406] Methods may comprise contacting the sample to a complex comprising a guide nucleic acid comprising a segment that is reverse complementary to a segment of the target nucleic acid and a effector protein that exhibits sequence independent cleavage upon forming a complex comprising the segment of the guide nucleic acid binding to the segment of the target nucleic acid; and assaying for a signal indicating cleavage of at least some protein-nucleic acids of a population of protein-nucleic acids, wherein the signal indicates a presence of the target nucleic acid in the sample and wherein absence of the signal indicates an absence of the target nucleic acid in the sample.

[0407] Methods may comprise contacting the sample comprising the target nucleic acid with a guide nucleic acid targeting a target nucleic acid segment, an effector protein capable of being activated when complexed with the guide nucleic acid and the target nucleic acid segment, a single stranded nucleic acid of a reporter comprising a detection moiety, wherein the nucleic acid of a reporter is capable of being cleaved by the activated effector protein, thereby generating a first detectable signal, cleaving the single stranded nucleic acid of a reporter using the effector protein that cleaves as measured by a change in color, and measuring the first detectable signal on the support medium.

[0408] Methods may comprise contacting the sample or cell with an effector protein or a multimeric complex thereof and a guide nucleic acid at a temperature of at least about 25° C., at least about 30° C., at least about 35° C., at least about 40° C., at least about 50° C., or at least about 65° C. In some instances, the temperature is not greater than 80° C. In some instances, the temperature is about 25° C., about 30° C., about 35° C., about 40° C., about 45° C., about 50° C., about 55° C., about 60° C., about 65° C., or about 70° C. In some instances, the temperature is about 25° C. to about 45° C., about 35° C. to about 55° C., or about 55° C. to about 65° C.

[0409] Methods may comprise cleaving a strand of a single-stranded target nucleic acid with an effector protein or a multimeric complex thereof, as assessed with an in vitro cis-cleavage assay. A cleavage assay can comprise an assay designed to visualize, quantitate or identify cleavage of a nucleic acid. In some embodiments, the cleavage activity may be cis-cleavage activity. In some embodiments, the cleavage activity may be trans-cleavage activity. An example of such an assay (an in vitro cis-cleavage assay). An example of such an assay may follow a procedure comprising: (i) providing equimolar amounts of an effector protein comprising at least 70% sequence identity to any one of the sequences selected from SEQ ID NOs: 1-1614 and 3195-3302 and a guide nucleic acid comprising at least 70% sequence identity to any one of the sequences selected from SEQ ID NOs: 1615-3194 and 3303-3406, under conditions to form a ribonucleoprotein complex; (ii) adding linear dsDNA comprising a nucleic acid sequence targeted by the guide nucleic acid and adjacent to a PAM (iii) incubating the mixture under conditions to enable cleavage of the plasmid; (iv) quenching the reaction with EDTA and a protease; and (v) analyzing the reaction products (e.g., viewing the cleaved and uncleaved linear dsDNA with gel electrophoresis).

[0410] In some cases, there is a threshold of detection for methods of detecting target nucleic acids. In some instances, methods are not capable of detecting target nucleic acids that are present in a sample or solution at a concentration less than or equal to 10 nM. The term “threshold of detection” is used herein to describe the minimal amount of target nucleic acid that must be present in a sample in order for detection to occur. For example, when a threshold of detection is 10 nM, then a signal can be detected when a target nucleic acid is present in the sample at a concentration of 10 nM or more. In some cases, the threshold of detection is less than or equal to 5 nM, 1 nM, 0.5 nM, 0.1 nM, 0.05 nM, 0.01 nM, 0.005 nM, 0.001 nM, 0.0005 nM, 0.0001 nM, 0.00005 nM, 0.00001 nM, 10 pM, 1 pM, 500 fM, 250 fM, 100 fM, 50 fM, 10 fM, 5 fM, 1 fM, 500 attomole (aM), 100 aM, 50 aM, 10 aM, or 1 aM. In some cases, the threshold of detection is in a range of from 1 aM to 1 nM, 1 aM to 500 pM, 1 aM to 200 pM, 1 aM to 100 pM, 1 aM to 10 pM, 1 aM to 1 pM, 1 aM to 500 fM, 1 aM to 100 fM, 1 aM to 1 fM, 1 aM to 500 aM, 1 aM to 100 aM, 1 aM to 50 aM, 1 aM to 10 aM, 10 aM to 1 nM, 10 aM to 500 pM, 10 aM to 200 pM, 10 aM to 100 pM, 10 aM to 10 pM, 10 aM to 1 pM, 10 aM to 500 fM, 10 aM to 100 fM, 10 aM to 1 fM, 10 aM to 500 aM, 10 aM to 100 aM, 10 aM to 50 aM, 100 aM to 1 nM, 100 aM to 500 pM, 100 pM to 200 pM, 100 aM to 100 pM, 100 aM to 10 pM, 100 aM to 1 pM, 100 aM to 500 fM, 100 aM to 100 fM, 100 aM to 1 fM, 100 aM to 500 aM, 500 aM to 1 nM, 500 aM to 500 pM, 500 aM to 200 pM, 500 aM to 100 pM, 500 aM to 10 pM, 500 aM to 1 pM, 500 aM to 500 fM, 500 aM to 100 fM, 500 aM to 1 fM, 1 fM to 1 nM, 1 fM to 500 pM, 1 fM to 200 pM, 1 fM to 100 pM, 1 fM to 10 pM, 1 fM to 1 pM, 10 fM to 1 nM, 10 fM to 500 pM, 10 fM to 200 pM, 10 fM to 100 pM, 10 fM to 10 pM, 10 fM to 1 pM, 500 fM to 1 nM, 500 fM to 500 pM, 500 fM to 200 pM, 500 fM to 100 pM, 500 fM to 10 pM, 500 fM to 1 pM, 800 fM to 1 nM, 800 fM to 500 pM, 800 fM to 200 pM, 800 fM to 100 pM, 800 fM to 10 pM, 800 fM to 1 pM, 1 pM to 1 nM, 1 pM to 500 pM, 1 pM to 200 pM, 1 pM to 100 pM, or 1 pM to 10 pM. In some cases, the threshold of detection in a range of from 800 fM to 100 pM, 1 pM to 10 pM, 10 fM to 500 fM, 10 fM to 50 fM, 50 fM to 100 fM, 100 fM to 250 fM, or 250 fM to 500 fM. In some cases, the threshold of detection is in a range of from 2 aM to 100 pM, from 20 aM to 50 pM, from 50 aM to 20 pM, from 200 aM to 5 pM, or from 500 aM to 2 pM. In some cases, the minimum concentration at which a target nucleic acid is detected in a sample is in a range of from 1 aM to 1 nM, 10 aM to 1 nM, 100 aM to 1 nM, 500 aM to 1 nM, 1 fM to 1 nM, 1 fM to 500 pM, 1 fM to 200 pM, 1 fM to 100 pM, 1 fM to 10 pM, 1 fM to 1 pM, 10 fM to 1 nM, 10 fM to 500 pM, 10 fM to 200 pM, 10 fM to 100 pM, 10 fM to 10 pM, 10 fM to 1 pM, 500 fM to 1 nM, 500 fM to 500 pM, 500 fM to 200 pM, 500 fM to 100 pM, 500 fM to 10 pM, 500 fM to 1 pM, 800 fM to 1 nM, 800 fM to 500 pM, 800 fM to 200 pM, 800 fM to 100 pM, 800 fM to 10 pM, 800 fM to 1 pM, 1 pM to 1 nM, 1 pM to 500 pM, from 1 pM to 200 pM, 1 pM to 100 pM, or 1 pM to 10 pM. In some cases, the minimum concentration at which a target nucleic acid is detected in a sample is in a range of from 2 aM to 100 pM, from 20 aM to 50 pM, from 50 aM to 20 pM, from 200 aM to 5 pM, or from 500 aM to 2 pM. In some cases, the minimum concentration at which a single stranded target nucleic acid can be detected in a sample is in a range of from 1 aM to 100 pM. In some cases, the minimum concentration at which a target nucleic acid can be detected in a sample is in a range of from 1 fM to 100 pM. In some cases, the minimum concentration at which a single stranded target nucleic acid can be detected in a sample is in a range of from 10 fM to 100 pM. In some cases, the minimum concentration at which a single stranded target nucleic acid can be detected in a sample is in a range of from 800 fM to 100 pM. In some cases, the minimum concentration at which a single stranded target nucleic acid can be detected in a sample is in a range of from 1 pM to 10 pM. In some cases, the devices, systems, fluidic devices, kits, and methods described herein detect a target single-stranded nucleic acid in a sample comprising a plurality of nucleic acids such as a plurality of non-target nucleic acids, where the target single-stranded nucleic acid is present at a concentration as low as 1 aM, 10 aM, 100 aM, 500 aM, 1 fM, 10 fM, 500 fM, 800 fM, 1 pM, 10 pM, 100 pM, or 1 pM.

[0411] In some instances, the target nucleic acid is present in a cleavage reaction at a concentration of about 10 nM, about 20 nM, about 30 nM, about 40 nM, about 50 nM, about 60 nM, about 70 nM, about 80 nM, about 90 nM, about 100 nM, about 200 nM, about 300 nM, about 400 nM, about 500 nM, about 600 nM, about 700 nM, about 800 nM, about 900 nM, about 1 μM, about 10 μM, or about 100 μM. In some instances, the target nucleic acid is present in the cleavage reaction at a concentration of from 10 nM to 20 nM, from 20 nM to 30 nM, from 30 nM to 40 nM, from 40 nM to 50 nM, from 50 nM to 60 nM, from 60 nM to 70 nM, from 70 nM to 80 nM, from 80 nM to 90 nM, from 90 nM to 100 nM, from 100 nM to 200 nM, from 200 nM to 300 nM, from 300 nM to 400 nM, from 400 nM to 500 nM, from 500 nM to 600 nM, from 600 nM to 700 nM, from 700 nM to 800 nM, from 800 nM to 900 nM, from 900 nM to 1 μM, from 1 μM to 10 μM, from 10 μM to 100 μM, from 10 nM to 100 nM, from 10 nM to 1 μM, from 10 nM to 10 μM, from 10 nM to 100 μM, from 100 nM to 1 μM, from 100 nM to 10 μM, from 100 nM to 100 μM, or from 1 μM to 100 μM. In some instances, the target nucleic acid is present in the cleavage reaction at a concentration of from 20 nM to 50 μM, from 50 nM to 20 μM, or from 200 nM to 5 μM.

[0412] In some cases, methods detect a target nucleic acid in less than 60 minutes. In some cases, methods detect a target nucleic acid in less than about 120 minutes, less than about 110 minutes, less than about 100 minutes, less than about 90 minutes, less than about 80 minutes, less than about 70 minutes, less than about 60 minutes, less than about 55 minutes, less than about 50 minutes, less than about 45 minutes, less than about 40 minutes, less than about 35 minutes, less than about 30 minutes, less than about 25 minutes, less than about 20 minutes, less than about 15 minutes, less than about 10 minutes, less than about 5 minutes, less than about 4 minutes, less than about 3 minutes, less than about 2 minutes, or less than about 1 minute.

[0413] In some cases, methods require at least about 120 minutes, at least about 110 minutes, at least about 100 minutes, at least about 90 minutes, at least about 80 minutes, at least about 70 minutes, at least about 60 minutes, at least about 55 minutes, at least about 50 minutes, at least about 45 minutes, at least about 40 minutes, at least about 35 minutes, at least about 30 minutes, at least about 25 minutes, at least about 20 minutes, at least about 15 minutes, at least about 10 minutes, or at least about 5 minutes to detect a target nucleic acid. In some cases, the sample is contacted with the reagents for from 5 minutes to 120 minutes, from 5 minutes to 100 minutes, from 10 minutes to 90 minutes, from 15 minutes to 45 minutes, or from 20 minutes to 35 minutes.

[0414] In some cases, methods of detecting are performed in less than 10 hours, less than 9 hours, less than 8 hours, less than 7 hours, less than 6 hours, less than 5 hours, less than 4 hours, less than 3 hours, less than 2 hours, less than 1 hour, less than 50 minutes, less than 45 minutes, less than 40 minutes, less than 35 minutes, less than 30 minutes, less than 25 minutes, less than 20 minutes, less than 15 minutes, less than 10 minutes, less than 9 minutes, less than 8 minutes, less than 7 minutes, less than 6 minutes, or less than 5 minutes. In some cases, methods of detecting are performed in about 5 minutes to about 10 hours, about 10 minutes to about 8 hours, about 15 minutes to about 6 hours, about 20 minutes to about 5 hours, about 30 minutes to about 2 hours, or about 45 minutes to about 1 hour.

[0415] Methods may comprise detecting a detectable signal within 5 minutes of contacting the sample and/or the target nucleic acid with the guide nucleic acid and/or the effector protein. In some cases, detecting occurs within 1, 2, 3, 4, 5, 6, 7, 8, 9, 10, 11, 12, 13, 14, 15, 20, 25, 30, 35, 40, 45, 50, 55, 60, 70, 80, 90, 100, 110, or 120 minutes of contacting the target nucleic acid. In some instances, detecting occurs within 1 to 120, 5 to 100, 10 to 90, 15 to 80, 20 to 60, or 30 to 45 minutes of contacting the target nucleic acid.

### Amplification of a Target Nucleic Acid

[0416] Methods of detecting may comprise amplifying a target nucleic acid for detection using any of the compositions or systems described herein. Amplifying may comprise changing the temperature of the amplification reaction, also known as thermal amplification (e.g., PCR). Amplifying may be performed at essentially one temperature, also known as isothermal amplification. Amplifying may improve at least one of sensitivity, specificity, or accuracy of the detection of the target nucleic acid.

[0417] Amplifying may comprise subjecting a target nucleic acid to an amplification reaction selected from transcription mediated amplification (TMA), helicase dependent amplification (HDA), or circular helicase dependent amplification (cHDA), strand displacement amplification (SDA), recombinase polymerase amplification (RPA), loop mediated amplification (LAMP), exponential amplification reaction (EXPAR), rolling circle amplification (RCA), ligase chain reaction (LCR), simple method amplifying RNA targets (SMART), single primer isothermal amplification (SPIA), multiple displacement amplification (MDA), nucleic acid sequence based amplification (NASBA), hinge-initiated primer-dependent amplification of nucleic acids (HIP), nicking enzyme amplification reaction (NEAR), and improved multiple displacement amplification (IMDA).

[0418] In some instances, amplification of the target nucleic acid comprises modifying the sequence of the target nucleic acid. For example, amplification may be used to insert a PAM sequence into a target nucleic acid that lacks a PAM sequence. In some cases, amplification may be used to increase the homogeneity of a target nucleic acid in a sample. For example, amplification may be used to remove a nucleic acid variation that is not of interest in the target nucleic acid sequence.

[0419] Amplifying may take 1, 2, 3, 4, 5, 6, 7, 8, 9, 10, 11, 12, 13, 14, 15, 16, 17, 18, 19, 20, 25, 30, 40, 50, or 60 minutes. Amplifying may be performed at a temperature of around 20-45° C. Amplifying may be performed at a temperature of less than about 20° C., less than about 25° C., less than about 30° C., 35° C., less than about 37° C., less than about 40° C., or less than about 45° C. The nucleic acid amplification reaction may be performed at a temperature of at least about 20° C., at least about 25° C., at least about 30° C., at least about 35° C., at least about 37° C., at least about 40° C., or at least about 45° C.

### XIV. Pharmaceutical Compositions and Modes of Administration

[0420] Disclosed herein, in some aspects, are pharmaceutical compositions for modifying a target nucleic acid in a cell or a subject, comprising any one of the effector proteins, engineered effector proteins, fusion effector proteins, or guide nucleic acids as described herein and any combination thereof. Also disclosed herein, in some aspects, are pharmaceutical compositions comprising a nucleic acid encoding any one of the effector proteins, engineered effector proteins, fusion effector proteins, or guide nucleic acids as described herein and any combination thereof. In some embodiments, pharmaceutical compositions comprise a plurality of guide nucleic acids. Pharmaceutical compositions may be used to modify a target nucleic acid or the expression thereof in a cell in vitro, in vivo or ex vivo.

[0421] In some embodiments, pharmaceutical compositions comprise one or more nucleic acids encoding an effector protein, fusion effector protein, fusion partner, a guide nucleic acid, or a combination thereof; and a pharmaceutically acceptable carrier or diluent. The effector protein, fusion effector protein, fusion partner protein, or combination thereof may be any one of those described herein. The one or more nucleic acids may comprise a plasmid. The one or more nucleic acids may comprise a nucleic acid expression vector. The one or more nucleic acids may comprise a viral vector. In some embodiments, the viral vector is a lentiviral vector. In some embodiments, the vector is an adeno-associated viral (AAV) vector. In some embodiments, compositions, including pharmaceutical compositions, comprise a viral vector encoding a fusion effector protein and a guide nucleic acid, wherein at least a portion of the guide nucleic acid binds to the effector protein of the fusion effector protein.

[0422] In some embodiments, pharmaceutical compositions comprise a virus comprising a viral vector encoding a fusion effector protein, an effector protein, a fusion partner, a guide nucleic acid, or a combination thereof; and a pharmaceutically acceptable carrier or diluent. The virus may be a lentivirus. The virus may be an adenovirus. The virus may be a non-replicating virus. The virus may be an adeno-associated virus (AAV). The viral vector may be a retroviral vector. Retroviral vectors may include gamma-retroviral vectors such as vectors derived from the Moloney Murine Leukemia Virus (MoMLV, MMLV, MuLV, or MLV) or the Murine Stem cell Virus (MSCV) genome. Retroviral vectors may include lentiviral vectors such as those derived from the human immunodeficiency virus (HIV) genome. In some embodiments, the viral vector is a chimeric viral vector, comprising viral portions from two or more viruses. In some embodiments, the viral vector is a recombinant viral vector.

[0423] In some embodiments, the viral vector is an AAV. The AAV may be any AAV known in the art. In some embodiments, the viral vector corresponds to a virus of a specific serotype. In some examples, the serotype is selected from an AAV1 serotype, an AAV2 serotype, AAV3 serotype, an AAV4 serotype, AAV5 serotype, an AAV6 serotype, AAV7 serotype, an AAV8 serotype, an AAV9 serotype, an AAV10 serotype, an AAV11 serotype, and an AAV12 serotype. In some embodiments the AAV vector is a recombinant vector, a hybrid AAV vector, a chimeric AAV vector, a self-complementary AAV (scAAV) vector, a single-stranded AAV or any combination thereof. scAAV genomes are generally known in the art and contain both DNA strands which can anneal together to form double-stranded DNA.

[0424] In some embodiments, methods of producing delivery vectors herein comprise packaging a nucleic acid encoding an effector protein and a nucleic acid that, when transcribed, produces a guide nucleic acid, or a combination thereof, into an AAV vector. In some embodiments, methods of producing the delivery vector comprises, (a) contacting a cell with at least one nucleic acid that, when transcribed, produces a guide nucleic acid; at least one nucleic acid that encodes: (i) a Replication (Rep) gene; and (ii) a Capsid (Cap) gene that encodes an AAV capsid protein; (b) expressing the AAV capsid protein in the cell; (c) assembling an AAV particle; and (d) packaging a Cas effector encoding nucleic acid into the AAV particle, thereby generating an AAV delivery vector. In some embodiments, promoters, stuffer sequences, and any combination thereof may be packaged in the AAV vector. In some embodiments, the AAV vector comprises a sequence encoding a guide nucleic acid. In some embodiments, the guide nucleic acid comprises a crRNA. In some embodiments, the guide nucleic acid is a crRNA. In some embodiments, the guide nucleic acid comprises a sgRNA. In some embodiments, the guide nucleic acid is a sgRNA. In some examples, the AAV vector can package 1, 2, 3, 4, or 5 nucleotide sequences encoding guide nucleic acids or copies thereof. In some examples, the AAV vector packages 1 or 2 nucleotide sequences encoding guide nucleic acids or copies thereof. In some embodiments, the AAV vector packages a nucleotide sequence encoding a first guide nucleic acid and a nucleotide sequence encoding a second guide nucleic acid, wherein the first guide nucleic acid and the second guide nucleic acid are the same. In some embodiments, the AAV vector packages a nucleotide sequence encoding a first guide nucleic acid and a nucleotide sequence encoding a second guide nucleic acid, wherein the first guide nucleic acid and the second guide nucleic acid are different. In some embodiments, the AAV vector comprises inverted terminal repeats, e.g., a 5′ inverted terminal repeat and a 3′ inverted terminal repeat. In some embodiments, the inverted terminal repeat comprises inverted terminal repeats from AAV. In some embodiments, the inverted terminal repeat comprises inverted terminal repeats of ssAAV vector or scAAV vector. In some embodiments, the AAV vector comprises a mutated inverted terminal repeat that lacks a terminal resolution site.

[0425] In some embodiments, a hybrid AAV vector is produced by transcapsidation, e.g., packaging an inverted terminal repeat (ITR) from a first serotype into a capsid of a second serotype, wherein the first and second serotypes may be not the same. In some examples, the Rep gene and ITR from a first AAV serotype (e.g., AAV2) may be used in a capsid from a second AAV serotype (e.g., AAV9), wherein the first and second AAV serotypes may be not the same. As a non-limiting example, a hybrid AAV serotype comprising the AAV2 ITRs and AAV9 capsid protein may be indicated AAV2/9. In some examples, the hybrid AAV delivery vector comprises an AAV2/1, AAV2/2, AAV 2/4, AAV2/5, AAV2/8, or AAV2/9 vector.

[0426] In some embodiments, the AAV vector may be a chimeric AAV vector. In some embodiments, the chimeric AAV vector comprises an exogenous amino acid or an amino acid substitution, or capsid proteins from two or more serotypes. In some examples, a chimeric AAV vector may be genetically engineered to increase transduction efficiency, selectivity, or a combination thereof.

[0427] In some examples, the delivery vector may be a eukaryotic vector, a prokaryotic vector (e.g., a bacterial vector) a viral vector, or any combination thereof. In some embodiments, the delivery vehicle may be a non-viral vector. In some embodiments, the delivery vehicle may be a plasmid. In some embodiments, the plasmid comprises DNA. In some embodiments, the plasmid comprises RNA. In some examples, the plasmid comprises circular double-stranded DNA. In some examples, the plasmid may be linear. In some examples, the plasmid comprises one or more genes of interest and one or more regulatory elements. In some examples, the plasmid comprises a bacterial backbone containing an origin of replication and an antibiotic resistance gene or other selectable marker for plasmid amplification in bacteria. In some examples, the plasmid may be a minicircle plasmid. In some examples, the plasmid contains one or more genes that provide a selective marker to induce a target cell to retain the plasmid. In some examples, the plasmid may be formulated for delivery through injection by a needle carrying syringe. In some examples, the plasmid may be formulated for delivery via electroporation. In some examples, the plasmids may be engineered through synthetic or other suitable means known in the art. For example, in some embodiments, the genetic elements may be assembled by restriction digest of the desired genetic sequence from a donor plasmid or organism to produce ends of the DNA which may then be readily ligated to another genetic sequence.

[0428] In some embodiments, the vector is a non-viral vector, and a physical method or a chemical method is employed for delivery into the somatic cell. Exemplary physical methods include electroporation, gene gun, sonoporation, magnetofection, or hydrodynamic delivery. Exemplary chemical methods include delivery of the recombinant polynucleotide via liposomes such as, cationic lipids or neutral lipids; dendrimers; nanoparticles; or cell-penetrating peptides.

[0429] In some embodiments, a fusion effector protein as described herein is inserted into a vector. In some embodiments, the vector comprises a nucleotide sequence of one or more promoters, enhancers, ribosome binding sites, RNA splice sites, polyadenylation sites, a replication origin, and/or transcriptional terminator sequences.

[0430] In some embodiments, the AAV vector comprises a self-processing array system for guide nucleic acid. Such a self-processing array system refers to a system for multiplexing, stringing together multiple guide nucleic acids under the control of a single promoter. In general, plasmids and vectors described herein comprise at least one promoter. In some embodiments, the promoters are constitutive promoters. In other embodiments, the promoters are inducible promoters. In additional embodiments, the promoters are prokaryotic promoters (e.g., drive expression of a gene in a prokaryotic cell). In some embodiments, the promoters are eukaryotic promoters, (e.g., drive expression of a gene in a eukaryotic cell). Exemplary promoters include, but are not limited to, CMV, EF1a, SV40, PGK1, Ubc, human beta actin, CAG, TRE, UAS, Ac5, polyhedron, CaMKIIa, GAL1-10, TEF1, GDS, ADH1, CaMV35S, Ubi, H1, U6, CaMV35S, SV40, CMV, 7SK, and HSV TK promoter. In some embodiments, the promoter is CMV. In some embodiments, the promoter is EF1a. In some embodiments, the promoter is U6. In some embodiments, the promote is H1. In some embodiments, the promoter is 7SK. In some embodiments, the promoter is ubiquitin. In some embodiments, vectors are bicistronic or polycistronic vector (e.g., having or involving two or more loci responsible for generating a protein) having an internal ribosome entry site (IRES) is for translation initiation in a cap-independent manner.

[0431] In some embodiments, the AAV vector comprises a promoter for expressing effector proteins. In some embodiments, the promoter for expressing effector protein is a site-specific promoter. In some embodiments, the promoter for expressing effector protein is a muscle-specific promoter. In some embodiments, the muscle-specific promoter comprises Ck8e, SPC5-12, or Desmin promoter sequence. In some embodiments, the promoter for expressing effector protein is a ubiquitous promoter. In some embodiments, the ubiquitous promoter comprises MND or CAG promoter sequence.

[0432] In some embodiments, the AAV vector comprises a stuffer sequence. A stuffer sequence can refer to a non-coding sequence of nucleotides that adjusts the length of the viral genome when inserted into a vector to increase packaging efficiency, increase overall viral titer during production, increase transfection efficacy, increase transfection efficiency, and/or decrease vector toxicity. In some embodiments, the stuffer sequence comprises 5′ untranslated region, 3′ untranslated region or combination thereof. In some embodiments, a stuffer sequence serves no other functional purpose than to increase the length of the viral genome. In some embodiments, a stuffer sequence may increase the length of the viral genome as well as have other functional elements.

[0433] In some embodiments, the 3′-untranslated region comprises a nucleotide sequence of an intron. In some embodiments, the 3′-untranslated region comprises one or more sequence elements, such as an intron sequence or an enhancer sequence. In some embodiments, the 3′-untranslated region comprises an enhancer. In some embodiments, vectors comprise an enhancer. Enhancers are nucleotide sequences that have the effect of enhancing promoter activity. In some embodiments, enhancers augment transcription regardless of the orientation of their sequence. In some embodiments, enhancers activate transcription from a distance of several kilo basepairs. Furthermore, enhancers are located optionally upstream or downstream of a gene region to be transcribed, and/or located within the gene, to activate the transcription. Exemplary enhancers include, but are not limited to, WPRE; CMV enhancers; the R-U5′ segment in LTR of HTLV-I (Mol. Cell. Biol., Vol. 8(1), p. 466-472, 1988); SV40 enhancer; the intron sequence between exons 2 and 3 of rabbit β-globin (Proc. Natl. Acad. Sci. USA., Vol. 78(3), p. 1527-31, 1981); and the genome region of human growth hormone (J Immunol., Vol. 155(3), p. 1286-95, 1995). In some embodiments, the enhancer is WPRE.

[0434] In some embodiments, the AAV vector comprises one or more polyadenylation (poly A) signal sequences. In some embodiments, the polyadenlyation signal sequence comprises hGH poly A signal sequence. In some embodiments, the polyadenlyation signal sequence comprises sv40 poly A signal sequence.

[0435] Pharmaceutical compositions described herein may comprise a salt. In some embodiments, the salt is a sodium salt. In some embodiments, the salt is a potassium salt. In some embodiments, the salt is a magnesium salt. In some embodiments, the salt is NaCl. In some embodiments, the salt is KNO₃. In some embodiments, the salt is Mg²⁺SO₄²⁻.

[0436] Non-limiting examples of pharmaceutically acceptable carriers and diluents suitable for the pharmaceutical compositions disclosed herein include buffers (e.g., neutral buffered saline, phosphate buffered saline); carbohydrates (e.g., glucose, mannose, sucrose, dextran, mannitol); polypeptides or amino acids (e.g., glycine); antioxidants; chelating agents (e.g., EDTA, glutathione); adjuvants (e.g., aluminum hydroxide); surfactants (Polysorbate 80, Polysorbate 20, or Pluronic F68); glycerol; sorbitol; mannitol; polyethyleneglycol; and preservatives.

[0437] In some embodiments, pharmaceutical compositions are in the form of a solution (e.g., a liquid). The solution may be formulated for injection, e.g., intravenous or subcutaneous injection. In some embodiments, the pH of the solution is about 7, about 7.1, about 7.2, about 7.3, about 7.4, about 7.5, about 7.6, about 7.7, about 7.8, about 7.9, about 8, about 8.1, about 8.2, about 8.3, about 8.4, about 8.5, about 8.6, about 8.7, about 8.8, about 8.9, or about 9. In some embodiments, the pH is 7 to 7.5, 7.5 to 8, 8 to 8.5, 8.5 to 9, or 7 to 8.5. In some embodiments, the pH of the solution is less than 7. In some embodiments, the pH is greater than 7.

[0438] In some embodiments, pharmaceutical compositions comprise an: effector protein, fusion effector protein, fusion partner, a guide nucleic acid, or a combination thereof; and a pharmaceutically acceptable carrier or diluent. In some embodiments, pharmaceutical compositions comprise one or more nucleic acids encoding an: effector protein, fusion effector protein, fusion partner, a guide nucleic acid, or a combination thereof; and a pharmaceutically acceptable carrier or diluent. In some embodiments, guide nucleic acid can be a plurality of guide nucleic acids. In some embodiments, the effector protein comprises a sequence that is at least 65%, at least 70%, at least 75%, at least 80%, at least 85%, at least 90%, at least 95%, at least 97%, or at least 98%, at least 99%, or 100% identical to any one of the sequences selected from SEQ ID NOS: 1-1614 and 3195-3302.

### XV. Method of Treating a Disorder

[0439] Described herein are compositions and methods for treating a disease in a subject by modifying a target nucleic acid associated with a gene or expression of a gene related to the disease. In some embodiments, methods comprise administering a composition or cell described herein to a subject. By way of non-limiting example, the disease may be a cancer, an ophthalmological disorder, a neurological disorder, a neurodegenerative disease, a blood disorder, or a metabolic disorder, or a combination thereof. The disease may be an inherited disorder, also referred to as a genetic disorder. The disease may be the result of an infection or associated with an infection.

[0440] The compositions and methods described herein may be used to treat, prevent, or inhibit a disease or syndrome in a subject. In some embodiments, the disease is a liver disease, a lung disease, an eye disease, or a muscle disease. Exemplary diseases and syndromes include, but are not limited to the diseases and syndromes listed in TABLE 5.

TABLE 5
DISEASES AND SYNDROMES
Exemplary Diseases and Syndromes

11-hydroxylase deficiency; 17,20-desmolase deficiency; 17-hydroxylase deficiency; 3-
hydroxyisobutyrate aciduria; 3-hydroxysteroid dehydrogenase deficiency; 46,XY gonadal
dysgenesis; AAA syndrome; ABCA3 deficiency; ABCC8-associated hyperinsulinism;
aceruloplasminemia; acromegaly; achondrogenesis type 2; acral peeling skin syndrome;
acrodermatitis enteropathica; adrenocortical micronodular hyperplasia;
adrenoleukodystrophies; adrenomyeloneuropathies; Aicardi-Goutieres syndrome; Alagille
disease (also called Alagille Syndrome); Alexander Disease, Alpers syndrome; alpha-1
antitrypsin deficiency (AATD); alpha-mannosidosis; Alstrom syndrome; Alzheimer's disease;
amebic dysentery; amelogenesis imperfecta; amish type microcephaly; amyotrophic lateral
sclerosis (ALS); anaplastic large cell lymphoma; anauxetic dysplasia; androgen insensitivity
syndrome; angiopathic thrombosis; antiphospholipid syndrome; Antley-Bixler syndrome;
APECED, Apert syndrome, aplasia of lacrimal and salivary glands, argininemia,
arrhythmogenic right ventricular dysplasia, Arts syndrome, ARVD2, arylsulfatase deficiency
type metachromatic leokodystrophy, ataxia telangiectasia, autoimmune lymphoproliferative
syndrome; autoimmune polyglandular syndrome type 1; autosomal dominant anhidrotic
ectodermal dysplasia; autosomal dominant deafness; autosomal dominant polycystic kidney
disease; autosomal recessive microtia; autosomal recessive renal glucosuria; autosomal
visceral heterotaxy; babesiosis; balantidial dysentery; Bardet-Biedl syndrome; Bartter
syndrome; basal cell nevus syndrome; Batten disease; benign recurrent intrahepatic
cholestasis; beta-mannosidosis; β-thalassemia; Bethlem myopathy; Blackfan-Diamond
anemia; bleeding disorder (coagulation); blepharophimosis; Byler disease; C syndrome;
CADASIL; calcific aortic stenosis; calcification of joints and arteries; carbamyl phosphate
synthetase deficiency; cardiofaciocutaneous syndrome; Carney triad; carnitine
palmitoyltransferase deficiencies; cartilage-hair hypoplasia; cblC type of combined
methylmalonic aciduria; CD18 deficiency; CD3Z-associated primary T-cell
immunodeficiency; CD40L deficiency; CDAGS syndrome; CDG1A; CDG1B; CDG1M;
CDG2C; CEDNIK syndrome; central core disease; centronuclear myopathy; cerebral capillary
malformation; cerebrooculofacioskeletal syndrome type 4; cerebrooculogacioskeletal
syndrome; cerebrotendinous xanthomatosis; Chaga's Disease; Charcot Marie Tooth Disesase;
cherubism; CHILD syndrome; chronic granulomatous disease; chronic recurrent multifocal
osteomyelitis; citrin deficiency; classic hemochromatosis; CNPPB syndrome; cobalamin C
disease; Cockayne syndrome; coenzyme Q10 deficiency; Coffin-Lowry syndrome; Cohen
syndrome; combined deficiency of coagulation factors V; common variable immune
deficiency 3; complement hyperactivation; complete androgen insentivity; cone rod
dystrophies; conformational diseases; congenital bile adid synthesis defect type 1; congenital
bile adid synthesis defect type 2; congenital defect in bile acid synthesis type; congenital
erythropoietic porphyria; congenital generalized osteosclerosis; Cornelia de Lange syndrome;
coronary heart disease; Cousin syndrome; Cowden disease; COX deficiency; Cri du chat
syndrome; Crigler-Najjar disease; Crigler-Najjar syndrome type 1; Crisponi syndrome;
Crouzon syndrome; Currarino syndrome; Curth-Macklin type ichthyosis hystrix; cutis laxa;
cystic fibrosis; cystinosis; d-2-hydroxyglutaric aciduria; DDP syndrome; Dejerine-Sottas
disease; Denys-Drash syndrome; Dercum disease; desmin cardiomyopathy; desmin myopathy;
DGUOK-associated mitochondrial DNA depletion; diabetes Type I; diabetes Type II;
disorders of glutamate metabolism; distal spinal muscular atrophy type 5; DNA repair
diseases; dominant optic atrophy; Doyne honeycomb retinal dystrophy; Dravet Syndrome;
Duchenne muscular dystrophy; dyskeratosis congenita; Ehlers-Danlos syndrome type 4;
Ehlers-Danlos syndromes; Elejalde disease; Ellis-van Creveld disease; Emery-Dreifuss
muscular dystrophies; encephalomyopathic mtDNA depletion syndrome; encephalitis;
enzymatic diseases; EPCAM-associated congenital tufting enteropathy; epidermolysis bullosa
with pyloric atresia; epilepsy; facioscapulohumeral muscular dystrophy; Factor V Leiden
thrombophilia; Faisalabad histiocytosis; familial atypical mycobacteriosis; familial capillary
malformation-arteriovenous; Familial Creutzfeld-Jakob disease; familial esophageal achalasia;
familial glomuvenous malformation; familial hemophagocytic lymphohistiocytosis; familial
mediterranean fever; familial megacalyces; familial schwannomatosis; familial spina bifida;
familial splenic asplenia/hypoplasia; familial thrombotic thrombocytopeniaurpura; Fanconi
disease (Fanconi anemia); Feingold syndrome; FENIB; fibrodysplasia ossificans progressiva;
FKTN; Fragile X syndrome; Francois-Neetens fleck corneal dystrophy; Frasier syndrome;
Friedreich's ataxia; FTDP-17; Fuchs corneal dystrophy; fucosidosis; G6PD deficiency;
galactosialidosis; Galloway syndrome; Gardner syndrome; Gaucher disease; Gitelman
syndrome; GLUT1 deficiency; GM2- Gangliosidoses (e.g., Tay Sachs Disease, Sandhoff
Disease) glycogen storage disease type 1b; glycogen storage disease type 2; glycogen storage
disease type 3; glycogen storage disease type 4; glycogen storage disease type 9a; glycogen
storage diseases; GM1-gangliosidosis; Greenberg syndrome; Greig cephalopolysyndactyly
syndrome; hair genetic diseases; hairy cell leukemia; HANAC syndrome; harlequin type
ichtyosis congenita; HDR syndrome; hearing loss; hemochromatosis type 3; hemochromatosis
type 4; hemolytic anemia; hemolytic uremic syndrome; hemophilia A; hemophilia B;
hereditary angioedema type 3; hereditary angioedemas; hereditary hemorrhagic telangiectasia;
hereditary hypofibrinogenemia; hereditary intraosseous vascular malformation; hereditary
leiomyomatosis and renal cell cancer; hereditary neuralgic amyotrophy; hereditary sensory and
autonomic neuropathy type; Hermansky-Pudlak disease; HHH syndrome; HHT2; hidrotic
ectodermal dysplasia type 1; hidrotic ectodermal dysplasias; histiocytic sarcoma; HNF4A-
associated hyperinsulinism; HNPCC; homozygous familial hypercholesterolemia; human
immunodeficiency with microcephaly; human papilloma virus (HPV) infection; Huntington's
disease; hyper-IgD syndrome; hyperinsulinism-hyperammonemia syndrome;
hypercholesterolemia; hypertrophy of the retinal pigment epithelium; hypochondrogenesis;
hypohidrotic ectodermal dysplasia; ICF syndrome; idiopathic congenital intestinal pseudo-
obstruction; immunodeficiency 13; immunodeficiency 17; immunodeficiency 25;
immunodeficiency with hyper-IgM type 1; immunodeficiency with hyper-IgM type 3;
immunodeficiency with hyper-IgM type 4; immunodeficiency with hyper-IgM type 5;
immunoglobulin alpha deficiency; inborn errors of thyroid metabolism; infantile
myofibromatosis; infantile visceral myopathy; infantile X-linked spinal muscular atrophy;
intrahepatic cholestasis of pregnancy; IPEX syndrome; IRAK4 deficiency; isolated congenital
asplenia; Jeune syndrome; Johanson-Blizzard syndrome; Joubert syndrome; JP-HHT
syndrome; juvenile hemochromatosis; juvenile hyalin fibromatosis; juvenile nephronophthisis;
Kabuki mask syndrome; Kallmann syndromes; Kartagener syndrome; KCNJ11-associated
hyperinsulinism; Kearns-Sayre syndrome; Kostmann disease; Kozlowski type of
spondylometaphyseal dysplasia; Krabbe disease; LADD syndrome; late infantile-onset
neuronal ceroid lipofuscinosis; LCK deficiency; LDHCP syndrome; Leber Congenital
Amaurosis Teyp 10; Legius syndrome; Leigh syndrome; lethal congenital contracture
syndrome 2; lethal congenital contracture syndromes; lethal contractural syndrome type 3;
lethal neonatal CPT deficiency type 2; lethal osteosclerotic bone dysplasia; leukocyte adhesion
deficiency; Li Fraumeni syndrome; LIG4 syndrome; lipodystrophy; lissencephaly type 1;
lissencephaly type 3; Loeys-Dietz syndrome; low phospholipid-associated cholelithiasis;
Lynch Syndrome; lysinuric protein intolerance; a lysosomal storage disease (e.g., Hunter
syndrome, Hurler syndrome); macular dystrophy; Maffucci syndrome; Majeed syndrome;
mannose-binding protein deficiency; mantle cell lymphoma; Marfan disease; Marshall
syndrome; MASA syndrome; mastocytosis; MCAD deficiency; McCune-Albright syndrome;
MCKD2; Meckel syndrome; MECP2 Duplication Syndrome; Meesmann corneal dystrophy;
megacystis-microcolon-intestinal hypoperistalsis; megaloblastic anemia type 1; MEHMO;
MELAS; Melnick-Needles syndrome; MEN2s; meningitis; Menkes disease; metachromatic
leukodystrophies; methymalonic acidemia due to transcobalamin receptor defect;
methylmalonic acidurias; methylvalonic aciduria; microcoria-congenital nephrosis syndrome;
microvillous atrophy; migraine; mitochondrial neurogastrointestinal encephalomyopathy;
monilethrix; monosomy X; mosaic trisomy 9 syndrome; Mowat-Wilson syndrome;
mucolipidosis type 2; mucolipidosis type Ma; mucolipidosis type IV; mucopolysaccharidoses;
mucopolysaccharidosis type 3A; mucopolysaccharidosis type 3C; mucopolysaccharidosis type
4B; multiminicore disease; multiple acyl-CoA dehydrogenation deficiency; multiple cutaneous
and mucosal venous malformations; multiple endocrine neoplasia type 1; multiple sulfatase
deficiency; mycosis fungoides; myotonic dystrophy; NAIC; nail-patella syndrome; nemaline
myopathies; neonatal diabetes mellitus; neonatal surfactant deficiency; nephronophtisis;
Netherton disease; neurofibromatoses; neurofibromatosis type 1; Niemann-Pick disease type
A; Niemann-Pick disease type B; Niemann-Pick disease type C; NKX2E; non-alcoholic fatty
liver disease (NAFLD); non-alcoholic steatohepatitis (NASH); Noonan syndrome; North
American Indian childhood cirrhosis; NROB1 duplication-associated DSD; ocular genetic
diseases; oculo-auricular syndrome; OLEDAID; oligomeganephronia; oligomeganephronic
renal hypolasia; Ollier disease; Opitz-Kaveggia syndrome; orofaciodigital syndrome type 1;
orofaciodigital syndrome type 2; osseous Paget disease; osteogenesis imperfecta;
otopalatodigital syndrome type 2; OXPHOS diseases; palmoplantar hyperkeratosis; panlobar
nephroblastomatosis; Parkes-Weber syndrome; Parkinson's disease; partial deletion of
21q22.2-q22.3; Pearson syndrome; Pelizaeus-Merzbacher disease; Pendred syndrome;
pentalogy of Cantrell; peroxisomal acyl-CoA-oxidase deficiency; Peutz-Jeghers syndrome;
Pfeiffer syndrome; Pierson syndrome; pigmented nodular adrenocortical disease; pipecolic
acidemia; Pitt-Hopkins syndrome; plasmalogens deficiency; platelet glycoprotein IV
deficiency; pleuropulmonary blastoma and cystic nephroma; polycystic kidney disease;
polycystic ovarian disease; polycystic lipomembranous osteodysplasia; Pompe disease,
including infantile onset Pompe disease (IOPD) and late onset Pompe disease (LOPD);
porphyrias; PRKAG2 cardiac syndrome, premature ovarian failure; primary erythermalgia;
primary hemochromatoses; primary hyperoxaluria; progressive familial intrahepatic
cholestasis; propionic acidemia; protein-losing enteropathy; pyruvate decarboxylase
deficiency; RAPADILINO syndrome; renal cystinosis; retinitis pigmentosa; Rett Syndrome;
rhabdoid tumor predisposition syndrome; Rieger syndrome; ring chromosome 4; Roberts
syndrome; Robinow-Sorauf syndrome; Rothmund-Thomson syndrome; severe combined
immunodeficiency disorder (SCID); Saethre-Chotzen syndrome; Sandhoff disease; SC
phocomelia syndrome; SCAS; Schinzel phocomelia syndrome; short rib-polydactyly
syndrome type 1; short rib-polydactyly syndrome type 4; short-rib polydactyly syndrome type
2; short-rib polydactyly syndrome type 3; Shwachman disease; Shwachman-Diamond disease;
sickle cell anemia; Silver-Russell syndrome; Simpson-Golabi-Behmel syndrome; Smith-
Lemli-Opitz syndrome; SPG7-associated hereditary spastic paraplegia; spherocytosis;
spinocerebellar ataxia; split-hand/foot malformation with long bone deficiencies;
spondylocostal dysostosis; sporadic visceral myopathy with inclusion bodies; storage diseases;
Stargardt macular dystrophy; STRA6-associated syndrome; stroke; Tay-Sachs disease;
thanatophoric dysplasia; thyroid metabolism diseases; Tourette syndrome; transthyretin-
associated amyloidosis; trisomy 13; trisomy 22; trisomy 2p syndrome; tuberous sclerosis;
tufting enteropathy; urea cycle diseases; Usher Syndrome; Van Den Ende-Gupta syndrome;
Van der Woude syndrome; variegated mosaic aneuploidy syndrome; VLCAD deficiency; von
Hippel-Lindau disease; von Willebrand disease; Waardenburg syndrome; WAGR syndrome;
Walker-Warburg syndrome; Werner syndrome; Wilson disease; Wiskott-Aldrich Syndrome;
Wolcott-Rallison syndrome; Wolfram syndrome; X-linked agammaglobulinemia; X-linked
chronic idiopathic intestinal pseudo-obstruction; X-linked cleft palate with ankyloglossia; X-
linked dominant chondrodysplasia punctata; X-linked ectodermal dysplasia; X-linked Emery-
Dreifuss muscular dystrophy; X-linked lissencephaly; X-linked lymphoproliferative disease;
X-linked visceral heterotaxy; xanthinuria type 1; xanthinuria type 2; xeroderma pigmentosum;
XPV; and Zellweger disease.

[0441] In some embodiments, compositions and methods modify at least one gene associated with the disease or the expression thereof. In some embodiments, the disease is Alzheimer's disease and the gene is selected from APP, BACE-1, PSD95, MAPT, PSEN1, PSEN2, and APOEE4. In some embodiments, the disease is Parkinson's disease and the gene is selected from SNCA, GDNF, and LRRK2. In some embodiments, the disease comprises Centronuclear myopathy and the gene is DNM2. In some embodiments, the disease is Huntington's disease and the gene is HTT. In some embodiments, the disease is Alpha-1 antitrypsin deficiency (AATD) and the gene is SERPINA1. In some embodiments, the disease is amyotrophic lateral sclerosis (ALS) and the gene is selected from SOD1, FUS, C90RF72, ATXN2, TARDBP, and CHCHD10. In some embodiments, the disease comprises Alexander Disease and the gene is GFAP. In some embodiments, the disease comprises anaplastic large cell lymphoma and the gene is CD30. In some embodiments, the disease comprises Angelman Syndrome and the gene is UBE3A. In some embodiments, the disease comprises calcific aortic stenosis and the gene is Apo(a). In some embodiments, the disease comprises CD3Z-associated primary T-cell immunodeficiency and the gene is CD3Z or CD247. In some embodiments, the disease comprises CD18 deficiency and the gene is ITGB2. In some embodiments, the disease comprises CD40L deficiency and the gene is CD40L. In some embodiments, the disease comprises CNS trauma and the gene is VEGF. In some embodiments, the disease comprises coronary heart disease and the gene is selected from FGA, FGB, and FGG. In some embodiments, the disease comprises MECP2 Duplication syndrome and Rett syndrome and the gene is MECP2. In some embodiments, the disease comprises a bleeding disorder (coagulation) and the gene is FXI. In some embodiments, the disease comprises fragile X syndrome and the gene is FMR1. In some embodiments, the disease comprises Fuchs corneal dystrophy and the gene is selected from ZEB1, SLC4A11, and LOXHD1. In some embodiments, the disease comprises GM2-Gangliosidoses (e.g., Tay Sachs Disease, Sandhoff disease) and the gene is selected from HEXA and HEXB. In some embodiments, the disease comprises Hearing loss disorders and the gene is DFNA36. In some embodiments, the disease is Pompe disease, including infantile onset Pompe disease (IOPD) and late onset Pompe disease (LOPD) and the gene is GAA. In some embodiments, the disease is Retinitis pigmentosa and the gene is selected from PDE6B, RHO, RP1, RP2, RPGR, PRPH2, IMPDH1, PRPF31, CRB1, PRPF8, TULP1, CA4, HPRPF3, ABCA4, EYS, CERKL, FSCN2, TOPORS, SNRNP200, PRCD, NR2E3, MERTK, USH2A, PROM1, KLHL7, CNGB1, TTC8, ARL6, DHDDS, BEST1, LRAT, SPARA7, CRX, CLRN1, RPE65, and WDR19. In some embodiments, the disease comprises Leber Congenital Amaurosis Type 10 and the gene is CEP290. In some embodiments, the disease is cardiovascular disease and/or lipodystrophies and the gene is selected from ABCG5, ABCG8, AGT, ANGPTL3, APOCIII, APOA1, APOL1, ARH, CDKN2B, CFB, CXCL12, FXI, FXII, GATA-4, MIA3, MKL2, MTHFD1L, MYH7, NKX2-5, NOTCH1, PKK, PCSK9, PSRC1, SMAD3, and TTR. In some embodiments, the disease comprises acromegaly and the gene is GHR. In some embodiments, the disease comprises acute myeloid leukemia and the gene is CD22. In some embodiments, the disease is diabetes and the gene is GCGR. In some embodiments, the disease is NAFLD/NASH and the gene is selected from DGAT2 and PNPLA3. In some embodiments, the disease is cancer and the gene is selected from STAT3, YAP1, FOXP3, AR (Prostate cancer), and IRF4 (multiple myeloma). In some embodiments, the disease is cystic fibrosis and the gene is CFTR. In some embodiments, the disease is Duchenne muscular dystrophy and the gene is DMD. In some embodiments, the disease comprises angioedema and the gene is PKK. In some embodiments, the disease comprises thalassemia and the gene is TMPRSS6. In some embodiments, the disease comprises achondroplasia and the gene is FGFR3. In some embodiments, the disease comprises Cri du chat syndrome and the gene is selected from CTNND2. In some embodiments, the disease comprises sickle cell anemia and the gene is Beta globin gene. In some embodiments, the disease comprises Alagille Syndrome and the gene is selected from JAG1 and NOTCH2. In some embodiments, the disease comprises Charcot Marie Tooth disease and the gene is selected from PMP22 and MFN2. In some embodiments, the disease comprises Crouzon syndrome and the gene is selected from FGFR2, FGFR3, and FGFR3. In some embodiments, the disease comprises Dravet Syndrome and the gene is selected from SCN1A and SCN2A. In some embodiments, the disease comprises Emery-Dreifuss syndrome and the gene is selected from EMD, LMNA, SYNE1, SYNE2, FHL1, and TMEM43. In some embodiments, the disease comprises Factor V Leiden thrombophilia and the gene is F5. In some embodiments, the disease comprises Fanconi anemia and the gene is selected from FANCA, FANCB, FANCC, FANCD1, FANCD2, FANCE, FANCF, FANCG, FANCI, FANCJ, FANCL, FANCM, FANCN, FANCP, FANCS, RAD51C, and XPF. In some embodiments, the disease comprises Familial Creutzfeld-Jakob disease and the gene is PRNP. In some embodiments, the disease comprises Familial Mediterranean Fever and the gene is MEFV. In some embodiments, the disease comprises Friedreich's ataxia and the gene is FXN. In some embodiments, the disease comprises Gaucher disease and the gene is GBA. In some embodiments, the disease comprises human papilloma virus (HPV) infection and the gene is HPV E7. In some embodiments, the disease comprises hemochromatosis and the gene is HFE, optionally comprising a C282Y mutation. In some embodiments, the disease comprises Hemophilia A and the gene is FVIII. In some embodiments, the disease comprises histiocytosis and the gene is CD1. In some embodiments, the disease comprises immunodeficiency 17 and the gene is CD3D. In some embodiments, the disease comprises immunodeficiency 13 and the gene is CD4. In some embodiments, the disease comprises Common Variable Immunodeficiency and the gene is selected from CD19 and CD81. In some embodiments, the disease comprises Joubert syndrome and the gene is selected from INPP5E, TMEM216, AHI1, NPHP1, CEP290, TMEM67, RPGRIP1L, ARL13B, CC2D2A, OFD1, TMEM138, TCTN3, ZNF423, and AMRC9. In some embodiments, the disease comprises leukocyte adhesion deficiency and the gene is CD18. In some embodiments, the disease comprises Li-Fraumeni syndrome and the gene is TP53. In some embodiments, the disease comprises lymphoproliferative syndrome and the gene is CD27. In some embodiments, the disease comprises Lynch syndrome and the gene is selected from MSH2, MLH1, MSH6, PMS2, PMS1, TGFBR2, and MLH3. In some embodiments, the disease comprises mantle cell lymphoma and the gene is CD5. In some embodiments, the disease comprises Marfan syndrome and the gene is FBN1. In some embodiments, the disease comprises mastocytosis and the gene is CD2. In some embodiments, the disease comprises methylmalonic acidemia and the gene is selected from MMAA, MMAB, and MUT. In some embodiments, the disease is mycosis fungoides and the gene is CD7. In some embodiments, the disease is myotonic dystrophy and the gene is selected from CNBP and DMPK. In some embodiments, the disease comprises neurofibromatosis and the gene is selected from NF1, and NF2. In some embodiments, the disease comprises osteogenesis imperfecta and the gene is selected from COL1A1, COL1A2, and IFITM5. In some embodiments, the disease is non-small cell lung cancer and the gene is selected from KRAS, EGFR, ALK, METex14, BRAF V600E, ROS1, RET, and NTRK. In some embodiments, the disease comprises Peutz-Jeghers syndrome and the gene is STK11. In some embodiments, the disease comprises polycystic kidney disease and the gene is selected from PKD1 and PKD2. In some embodiments, the disease comprises Severe Combined Immune Deficiency and the gene is selected from IL7R, RAG1, JAK3. In some embodiments, the disease comprises PRKAG2 cardiac syndrome and the gene is PRKAG2. In some embodiments, the disease comprises spinocerebellar ataxia and the gene is selected from ATXN1, ATXN2, ATXN3, PLEKHG4, SPTBN2, CACNA1A, ATXN7, ATXN8OS, ATXN10, TTBK2, PPP2R2B, KCNC3, PRKCG, ITPR1, TBP, KCND3, and FGF14. In some embodiments, the disease comprises Usher Syndrome and the gene is selected from MYO7A, USH1C, CDH23, PCDH15, USH1G, USH2A, GPR98, DFNB31, and CLRN1. In some embodiments, the disease comprises von Willebrand disease and the gene is VWF. In some embodiments, the disease comprises Waardenburg syndrome and the gene is selected from PAX3, MITF, WS2B, WS2C, SNAI2, EDNRB, EDN3, and SOX10. In some embodiments, the disease comprises Wiskott-Aldrich Syndrome and the gene is WAS. In some embodiments, the disease comprises von Hippel-Lindau disease and the gene is VHL. In some embodiments, the disease comprises Wilson disease and the gene is ATP7B. In some embodiments, the disease comprises Zellweger syndrome and the gene is selected from PEX1, PEX2, PEX3, PEX5, PEX6, PEX10, PEX12, PEX13, PEX14, PEX16, PEX19, and PEX26. In some embodiments, the disease comprises infantile myofibromatosis and the gene is CD34. In some embodiments, the disease comprises platelet glycoprotein IV deficiency and the gene is CD36. In some embodiments, the disease comprises immunodeficiency with hyper-IgM type 3 and the gene is CD40. In some embodiments, the disease comprises hemolytic uremic syndrome and the gene is CD46.

[0442] In some embodiments, the disease comprises complement hyperactivation, angiopathic thrombosis, or protein-losing enteropathy and the gene is CD55. In some embodiments, the disease comprises hemolytic anemia and the gene is CD59. In some embodiments, the disease comprises calcification of joints and arteries and the gene is CD73. In some embodiments, the disease comprises immunoglobulin alpha deficiency and the gene is CD79A. In some embodiments, the disease comprises C syndrome and the gene is CD96. In some embodiments, the disease comprises hairy cell leukemia and the gene is CD123. In some embodiments, the disease comprises histiocytic sarcoma and the gene is CD163. In some embodiments, the disease comprises autosomal dominant deafness and the gene is CD164. In some embodiments, the disease comprises immunodeficiency 25 and the gene is CD247. In some embodiments, the disease comprises methymalonic acidemia due to transcobalamin receptor defect and the gene is CD320.

### Cancer

[0443] In some embodiments, the disease is cancer. In some embodiments, the cancer is a solid cancer (i.e., a tumor). In some embodiments, the cancer is selected from a blood cell cancer, a leukemia, and a lymphoma. The cancer can be a leukemia, such as, by way of non-limiting example, acute myeloid (or myelogenous) leukemia (AML), chronic myeloid (or myelogenous) leukemia (CML), acute lymphocytic (or lymphoblastic) leukemia (ALL), and chronic lymphocytic leukemia (CLL). In some embodiments, the cancer is any one of colon cancer, rectal cancer, renal-cell carcinoma, liver cancer, bladder cancer, cancer of the kidney or ureter, lung cancer, non-small cell lung cancer, cancer of the small intestine, esophageal cancer, melanoma, bone cancer, pancreatic cancer, skin cancer, brain cancer (e.g., glioblastoma), cancer of the head or neck, melanoma, uterine cancer, ovarian cancer, breast cancer, testicular cancer, cervical cancer, stomach cancer, Hodgkin's Disease, non-Hodgkin's lymphoma, and thyroid cancer.

[0444] In some embodiments, mutations are associated with cancer or are causative of cancer. The target nucleic acid, in some embodiments, comprises a portion of a gene comprising a mutation associated with a disease, such as cancer, a gene whose overexpression is associated with cancer, a tumor suppressor gene, an oncogene, a checkpoint inhibitor gene, a gene associated with cellular growth, a gene associated with cellular metabolism, a gene associated with cell cycle, or a combination thereof. Non-limiting examples of genes comprising a mutation associated with a disease such as cancer are ABL, ACE, AF4/HRX, AKT-2, ALK, ALK/NPM, AML1, AML1/MTG8, APC, ATM, AXIN2, AXL, BAP1, BARD1, BCL-2, BCL-3, BCL-6, BCR/ABL, BLM, BMPR1A, BRCA1, BRCA2, BRIP1, c-MYC, CASR, CCR5, CDC73, CDH1, CDK4, CDKN1B, CDKN1C, CDKN2A, CEBPA, CHEK2, CREBBP, CTNNA1, DBL, DEK/CAN, DICER1, DIS3L2, E2A/PBX1, EGFR, ENL/HRX, EPCAM, ERG/TLS, ERBB, ERBB-2, ETS-1, EWS/FLI-1, FH, FKRP, FLCN, FMS, FOS, FPS, GATA2, GCG, GLI, GPC3, GPGSP, GREM1, HER2/neu, HOX11, HOXB13, HRAS, HST, IL-3, INT-2, JAK1, JUN, KIT, KS3, K-SAM, LBC, LCK, LMO1, LMO2, L-MYC, LYL-1, LYT-10, LYT-10/Cα1, MAS, MAX, MDM-2, MEN1, MET, MITF, MLH1, MLL, MOS, MSH1, MSH2, MSH3, MSH6, MTG8/AML1, MUTYH, MYB, MYH11/CBFB, NBN, NEU, NF1, NF2, N-MYC, NTHL1, OST, PALB2, PAX-5, PBX1/E2A, PCDC1, PDGFRA, PHOX2B, PIM-1, PMS2, POLD1, POLE, POT1, PPARG, PRAD-1, PRKAR1A, PTCH1, PTEN, RAD50, RAD51C, RAD51D, RAF, RAR/PML, RAS-H, RAS-K, RAS-N, RB1, RECQL4, REL/NRG, RET, RHOM1, RHOM2, ROS, RUNX1, SDHA, SDHAF, SDHAF2, SDHB, SDHC, SDHD, SET/CAN, SIS, SKI, SMAD4, SMARCA4, SMARCB1, SMARCE1, SRC, STK11, SUFU, TAL1, TAL2, TAN-1, TIAM1, TERC, TERT, TIMP3, TMEM127, TNF, TP53, TRAC, TSC1, TSC2, TRK, VHL, WRN, and WT1. Non-limiting examples of oncogenes are KRAS, NRAS, BRAF, MYC, CTNNB1, and EGFR. In some embodiments, the oncogene is a gene that encodes a cyclin dependent kinase (CDK). Non-limiting examples of CDKs are Cdk1, Cdk4, Cdk5, Cdk7, Cdk8, Cdk9, Cdk11 and CDK20. Non-limiting examples of tumor suppressor genes are TP53, RB1, and PTEN.

### Infections

[0445] Described herein are compositions and methods for treating an infection in a subject. Infections may be caused by a pathogen, e.g., bacteria, viruses, fungi, and parasites. Compositions and methods may modify a target nucleic acid associated with the pathogen or parasite causing the infection. In some embodiments, the target nucleic acid may be in the pathogen or parasite itself or in a cell, tissue or organ of the subject that the pathogen or parasite infects. In some embodiments, the methods described herein include treating an infection caused by one or more bacterial pathogens. Non-limiting examples of bacterial pathogens include Acholeplasma laidlawii, Brucella abortus, Chlamydia psittaci, Chlamydia trachomatis, Cryptococcus neoformans, Escherichia coli, Legionella pneumophila, Lyme disease spirochetes, methicillin-resistant Staphylococcus aureus, Mycobacterium leprae, Mycobacterium tuberculosis, Mycoplasma arginini, Mycoplasma arthritidis, Mycoplasma genitalium, Mycoplasma hyorhinis, Mycoplasma orale, Mycoplasma pneumoniae, Mycoplasma salivarium, Neisseria gonorrhoeae, Neisseria meningitidis, Pneumococcus, Pseudomonas aeruginosa, sexually transmitted infection, Streptococcus agalactiae, Streptococcus pyogenes, and Treponema pallidum.

[0446] In some embodiments, methods described herein include treating an infection caused by one or more viral pathogens. Non-limiting examples of viral pathogens include adenovirus, blue tongue virus, chikungunya, coronavirus (e.g., SARS-CoV-2), cytomegalovirus, Dengue virus, Ebola, Epstein-Barr virus, feline leukemia virus, Hemophilus influenzae B, Hepatitis virus A, Hepatitis virus B, Hepatitis virus C, herpes simplex virus I, herpes simplex virus II, human papillomavirus (HPV) including HPV16 and HPV18, human serum parvo-like virus, human T-cell leukemia viruses, immunodeficiency virus (e.g., HIV), influenza virus, lymphocytic choriomeningitis virus, measles virus, mouse mammary tumor virus, mumps virus, murine leukemia virus, polio virus, rabies virus, Reovirus, respiratory syncytial virus (RSV), rubella virus, Sendai virus, simian virus 40, Sindbis virus, varicella-zoster virus, vesicular stomatitis virus, wart virus, West Nile virus, yellow fever virus, or any combination thereof.

[0447] In some embodiments, methods described herein include treating an infection caused by one or more parasites. Non-limiting examples of parasites include helminths, annelids, platyhelminthes, nematodes, and thorny-headed worms. In some embodiments, parasitic pathogens comprise, without limitation, Babesia bovis, Echinococcus granulosus, Eimeria tenella, Leishmania tropica, Mesocestoides corti, Onchocerca volvulus, Plasmodium falciparum, Plasmodium vivax, Schistosoma japonicum, Schistosoma mansoni, Schistosoma spp., Taenia hydatigena, Taenia ovis, Taenia saginata, Theileria parva, Toxoplasma gondii, Toxoplasma spp., Trichinella spiralis, Trichomonas vaginalis, Trypanosoma brucei, Trypanosoma cruzi, Trypanosoma rangeli, Trypanosoma rhodesiense, Balantidium coli, Entamoeba histolytica, Giardia spp., Isospora spp., Trichomonas spp., or any combination thereof.

### XVI. Cells

[0448] Disclosed herein, in some aspects, are cells comprising a target nucleic acid that has been modified with a composition, system or method disclosed herein. Cells described herein may also be referred to as genetically modified cells. Cells may be eukaryotic (e.g., a mammalian cell). Cells may be prokaryotic. Cells may be obtained from a multicellular organism. Cells may be derived from a multicellular organism (e.g., a cell line). Cells may comprise a heritable genetic mutation, such that progeny cells derived therefrom comprise the heritable genetic mutation. In some instances, cells are progeny of a genetically modified cell comprising a genetic modification of the genetically modified parent cell. A genetically modified cell may comprise a deletion, insertion, mutation, or non-native sequence relative to a wild-type version of the cell or the organism from which the cell was derived.

[0449] Non-limiting examples of cells that may be engineered or modified with compositions, systems and methods described herein include immune cells, such as CAR T-cells, B-cells, NK cells, granulocytes, basophils, eosinophils, neutrophils, mast cells, monocytes, macrophages, dendritic cells, antigen-presenting cells (APC), or adaptive cells. In general, CAR T-cell refers to a T cell that has a nucleotide sequence encoding a chimeric antigen receptor (CAR). Non-limiting examples of cells that may be engineered or modified with compositions and methods described herein include plant cells, such as parenchyma, sclerenchyma, collenchyma, xylem, phloem, germline (e.g., pollen). Cells from lycophytes, ferns, gymnosperms, angiosperms, bryophytes, charophytes, chlorophytes, rhodophytes, or glaucophytes. Non-limiting examples of cells that may be engineered or modified with compositions and methods described herein include stem cells, such as human stem cells, animal stem cells, stem cells that are not derived from human embryonic stem cells, embryonic stem cells, mesenchymal stem cells, pluripotent stem cells, induced pluripotent stem cells (iPS), somatic stem cells, adult stem cells, hematopoietic stem cells, tissue-specific stem cells.

[0450] In some instances, cells are in a subject. Compositions of the disclosure may be administered to a subject. A subject may be a human. A subject may be a mammal (e.g., rat, mouse, cow, dog, pig, sheep, horse). A subject may be a vertebrate or an invertebrate. A subject may be a laboratory animal. A subject may be a patient. A subject may be suffering from a disease. A subject may display symptoms of a disease. A subject may not display symptoms of a disease, but still have a disease. A subject may be under medical care of a caregiver (e.g., the subject is hospitalized and is treated by a physician). Methods of the disclosure may be performed in a plant, bacteria, or a fungus.

[0451] Cells may be modified by compositions, systems or methods described herein under various conditions. Cells may be modified in vitro. Cells may be modified in vivo. Cells may be modified ex vivo. A cell may be an isolated cell. A cell may be a cell inside of or on an organism. A cell may be a cell in a cell culture. A cell may be one of a collection of cells. A cell may be a mammalian cell or derived from a mammalian cell. A cell may be a rodent cell or derived from a rodent cell. A cell may be a human cell or derived from a human cell. A cell may be a prokaryotic cell or derived from a prokaryotic cell. A cell may be a bacterial cell or may be derived from a bacterial cell. A cell may be an archaeal cell or derived from an archaeal cell. A cell may be a eukaryotic cell or derived from a eukaryotic cell. A cell may be a pluripotent stem cell. A cell may be a plant cell or derived from a plant cell. A cell may be an animal cell or derived from an animal cell. A cell may be an invertebrate cell or derived from an invertebrate cell. A cell may be a vertebrate cell or derived from a vertebrate cell. A cell may be a microbe cell or derived from a microbe cell. A cell may be a fungi cell or derived from a fungi cell. A cell may be from a specific organ or tissue.

[0452] Cells include cell lines modified by composition, systems or methods disclosed herein. Cell lines may be used to produce a desired protein. In some instances, the cell line is a Chinese hamster ovary cell line (CHO), human embryonic kidney cell line (HEK), cell lines derived from cancer cells, cell lines derived from lymphocytes, and the like. Non-limiting examples of cell lines includes: 132-d5 human fetal fibroblasts, 10.1 mouse fibroblasts, 293-T, 3T3, 3T3 Swiss, 3T3-L1, 721, 9L, A-549, A10, A172, A20, A253, A2780, A2780ADR, A2780cis, A375, A431, ALC, ARH-77, B16, B35, BALB/3T3 mouse embryo fibroblast, BC-3, BCP-1 cells, BEAS-2B, BHK-21, BR 293, BS-C-1 monkey kidney epithelial, Bcl-1, bEnd.3, BxPC3, C3H-10T1/2, C6/36, C8161, CCRF-CEM, CHO, CHO Dhfr −/−, CHO-7, CHO-IR, CHO-K1, CHO-K2, CHO-T, CIR, CML T1, CMT, COR-L23, COR-L23/5010, COR-L23/CPR, COR-L23/R23, COS, COS-1, COS-6, COS-7, COS-M6A, COV-434, CT26, CTLL-2, CV1, CaCo2, Cal-27, Calu1, D17, DH82, DLD2, DU145, DuCaP, EL4, EM2, EM3, EMT6/AR1, EMT6/AR10.0, FM3, H1299, H69, HASMC, HB54, HB55, HB56, HCA2, HEK-293, HEKa, HEKn, HL-60, HMEC, HT-29, HUVEC, HeLa, HeLa B, HeLa T4, HeLa-S3, Hep G2, Hepa1c1c7, Huh1, Huh4, Huh7, IC21, J45.01, J82, JY cells, Jurkat, Jurkat, K562 cells, KCL22, KG1, KYO1, Ku812, LNCap, LRMB, MC-38, MCF-10A, MCF-7, MDA-MB-231, MDA-MB-435, MDA-MB-468, MDCK II, MDCK II, MEF, mIMCD-3C8161, MOLT, MONO-MAC 6, MOR/0.2R, MRC5, MTD-1A, Ma-Mel 1-48, MiaPaCell, MyEnd, NALM-1, NCI-H69/CPR, NCI-H69/LX10, NCI-H69/LX20, NCI-H69/LX4, NHDF, NIH-3T3, NRK, NRK-52E, NW-145, OPCN/OPCT cell lines, P388D1, PC-3, PNT-1A/PNT 2, Panc1, Peer, RIN-5F, RMA/RMAS, RPTE, Rat6, Raw264.7, RenCa, SEM-K2, SK-UT, SKOV3, SW480, SW620, Saos-2 cells, Sf-9, SkBr3, T-47D, T2, T24, T84, TF1, THP1 cell line, TIB55, U373, U87, U937, VCaP, Vero cells, WEHI-231, WM39, WT-49, X63, YAC-1, and YAR.

[0453] Cells include cell lines modified by composition, systems or methods disclosed herein, wherein the cell line is derived from a eukaryote, also referred to as a eukaryotic cell line. In some instances, the eukaryotic cell is a Chinese hamster ovary (CHO) cell. In some instances, the eukaryotic cell is a Human embryonic kidney 293 cells (also referred to as HEK or HEK 293) cell. Non-limiting examples of cell lines that may be used with compositions, systems and methods of the present disclosure include C8161, CCRF-CEM, MOLT, mIMCD-3, NHDF, HeLa-S3, Huh1, Huh4, Huh7, HUVEC, HASMC, HEKn, HEKa, MiaPaCell, Panc1, PC-3, TF1, CTLL-2, CIR, Rat6, CV1, RPTE, A10, T24, J82, A375, ARH-77, Calu1, SW480, SW620, SKOV3, SK-UT, CaCo2, P388D1, SEM-K2, WEHI-231, HB56, TIB55, Jurkat, J45.01, LRMB, Bcl-1, BC-3, IC21, DLD2, Raw264.7, NRK, NRK-52E, MRC5, MEF, Hep G2, HeLa B, HeLa T4, COS, COS-1, COS-6, COS-M6A, BS-C-1 monkey kidney epithelial, BALB/3T3 mouse embryo fibroblast, 3T3 Swiss, 3T3-L1, 132-d5 human fetal fibroblasts; 10.1 mouse fibroblasts, 293-T, 3T3, 721, 9L, A2780, A2780ADR, A2780cis, A172, A20, A253, A431, A-549, ALC, B16, B35, BCP-1 cells, BEAS-2B, bEnd.3, BHK-21, BR 293, BxPC3, C3H-10T1/2, C6/36, Cal-27, CHO, CHO-7, CHO-IR, CHO-K1, CHO-K2, CHO-T, CHO Dhfr −/−, COR-L23, COR-L23/CPR, COR-L23/5010, COR-L23/R23, COS-7, COV-434, CML T1, CMT, CT26, D17, DH82, DU145, DuCaP, EL4, EM2, EM3, EMT6/AR1, EMT6/AR10.0, FM3, H1299, H69, HB54, HB55, HCA2, HEK-293, HeLa, Hepa1c1c7, HL-60, HMEC, HT-29, Jurkat, JY cells, K562 cells, Ku812, KCL22, KG1, KYO1, LNCap, Ma-Mel 1-48, MC-38, MCF-7, MCF-10A, MDA-MB-231, MDA-MB-468, MDA-MB-435, MDCK II, MDCK II, MOR/0.2R, MONO-MAC 6, MTD-1A, MyEnd, NCI-H69/CPR, NCI-H69/LX10, NCI-H69/LX20, NCI-H69/LX4, NIH-3T3, NALM-1, NW-145, OPCN/OPCT cell lines, Peer, PNT-1A/PNT 2, RenCa, RIN-5F, RMA/RMAS, Saos-2 cells, Sf-9, SkBr3, T2, T-47D, T84, THP1 cell line, U373, U87, U937, VCaP, Vero cells, WM39, WT-49, X63, YAC-1, and YAR.

[0454] Non-limiting examples of cells that may be used with the disclosure include immune cells, such as T-cells, B-cells, NK cells, granulocytes, basophils, eosinophils, neutrophils, mast cells, monocytes, macrophages, dendritic cells, antigen-presenting cells (APC), and adaptive cells. Non-limiting examples of cells that may be used with this disclosure also include plant cells, such as Parenchyma, sclerenchyma, collenchyma, xylem, phloem, germline (e.g., pollen). Cells from lycophytes, ferns, gymnosperms, angiosperms, bryophytes, charophytes, chlorophytes, rhodophytes, or glaucophytes. Non-limiting examples of cells that may be used with this disclosure also include stem cells, such as human stem cells, animal stem cells, stem cells that are not derived from human embryonic stem cells, embryonic stem cells, mesenchymal stem cells, pluripotent stem cells, induced pluripotent stem cells (iPS), somatic stem cells, adult stem cells, hematopoietic stem cells, tissue-specific stem cells.

### XVII. Agricultural Engineering

[0455] Compositions and methods of the disclosure may be used for agricultural engineering. For example, compositions and methods of the disclosure may be used to confer desired traits on a plant. A plant may be engineered for the desired physiological and agronomic characteristic using the present disclosure. In some instances, the target nucleic acid sequence comprises a nucleic acid sequence of a plant. In some instances, the target nucleic acid sequence comprises a genomic nucleic acid sequence of a plant cell. In some instances, the target nucleic acid sequence comprises a nucleic acid sequence of an organelle of a plant cell. In some instances, the target nucleic acid sequence comprises a nucleic acid sequence of a chloroplast of a plant cell.

[0456] The plant may be a dicotyledonous plant. Non-limiting examples of orders of dicotyledonous plants include Magniolales, Illiciales, Laurales, Piperales, Aristochiales, Nymphaeales, Ranunculales, Papeverales, Sarraceniaceae, Trochodendrales, Hamamelidales, Eucomiales, Leitneriales, Myricales, Fagales, Casuarinales, Caryophyllales, Batales, Polygonales, Plumbaginales, Dilleniales, Theales, Malvales, Urticales, Lecythidales, Violales, Salicales, Capparales, Ericales, Diapensales, Ebenales, Primulales, Rosales, Fabales, Podostemales, Haloragales, Myrtales, Cornales, Proteales, San tales, Rafflesiales, Celastrales, Euphorbiales, Rhamnales, Sapindales, Juglandales, Geraniales, Polygalales, Umbellales, Gentianales, Polemoniales, Lamiales, Plantaginales, Scrophulariales, Campanulales, Rubiales, Dipsacales, and Asterales.

[0457] The plant may be a monocotyledonous plant. Non-limiting examples of orders of monocotyledonous plants include Alismatales, Hydrocharitales, Najadales, Triuridales, Commelinales, Eriocaulales, Restionales, Poales, Juncales, Cyperales, Typhales, Bromeliales, Zingiberales, Arecales, Cyclanthales, Pandanales, Arales, Lilliales, and Orchid ales. A plant may belong to the order, for example, Gymnospermae, Pinales, Ginkgoales, Cycadales, Araucariales, Cupressales and Gnetales.

[0458] Non-limiting examples of plants include plant crops, fruits, vegetables, grains, soy bean, corn, maize, wheat, seeds, tomatoes, rice, cassava, sugarcane, pumpkin, hay, potatoes, cotton, cannabis, tobacco, flowering plants, conifers, gymnosperms, ferns, clubmosses, hornworts, liverworts, mosses, wheat, maize, rice, millet, barley, tomato, apple, pear, strawberry, orange, acacia, carrot, potato, sugar beets, yam, lettuce, spinach, sunflower, rape seed, Arabidopsis, alfalfa, amaranth, apple, apricot, artichoke, ash tree, asparagus, avocado, banana, barley, beans, beet, birch, beech, blackberry, blueberry, broccoli, Brussel's sprouts, cabbage, canola, cantaloupe, carrot, cassava, cauliflower, cedar, a cereal, celery, chestnut, cherry, Chinese cabbage, citrus, clementine, clover, coffee, corn, cotton, cowpea, cucumber, cypress, eggplant, elm, endive, eucalyptus, fennel, figs, fir, geranium, grape, grapefruit, groundnuts, ground cherry, gum hemlock, hickory, kale, kiwifruit, kohlrabi, larch, lettuce, leek, lemon, lime, locust, pine, maidenhair, maize, mango, maple, melon, millet, mushroom, mustard, nuts, oak, oats, oil palm, okra, onion, orange, an ornamental plant or flower or tree, papaya, palm, parsley, parsnip, pea, peach, peanut, pear, peat, pepper, persimmon, pigeon pea, pine, pineapple, plantain, plum, pomegranate, potato, pumpkin, radicchio, radish, rapeseed, raspberry, rice, rye, sorghum, safflower, sallow, soybean, spinach, spruce, squash, strawberry, sugar beet, sugarcane, sunflower, sweet potato, sweet corn, tangerine, tea, tobacco, tomato, trees, triticale, turf grasses, turnips, vine, walnut, watercress, watermelon, wheat, yams, yew, and zucchini. A plant may include algae.

### EXAMPLES

[0459] The following examples are included for illustrative purposes only and are not intended to limit the scope of the invention.

### Example 1: PAM Screening for Effector Proteins

[0460] Effector proteins described herein, including effector proteins comprising an amino acid sequences selected from SEQ ID NOS: 1-1614 and 3195-3302, are screened by in vitro enrichment (IVE) for PAM recognition. Briefly, effector proteins are complexed with guide RNAs for about 15 minutes at about 37° C. The complexes are added to an IVE reaction mix. PAM screening reactions use about 10 μl of RNP in 100 μl reactions with about 1,000 ng of a 5′ PAM library in 1x Cutsmart buffer and are carried out for about 15 minutes at about 25° C., or about 45 minutes at about 37° C., or about 15 minutes at about 45° C. Reactions are terminated with proteinase K and EDTA for about 30 minutes at about 37° C. Next generation sequencing is performed on cut sequences to identify enriched PAMs.

### Example 2: DETECTR Activity of Effector Proteins

[0461] Effector proteins are tested for trans cleavage. Briefly, partially purified (e.g., nickel-NTA purified) effector proteins are incubated with crRNA and tracrRNA (or an sgRNA) in a trans cleavage buffer (e.g., 20 mM Tricine, 15 mM MgCl2, 0.2 mg/ml BSA, 1 mM TCEP (pH 9 at 37° C.)) at room temperature for about 20 minutes, followed by addition of target nucleic acid at a final concentration of 10 nM to produce effector-protein guide complexes. Trans cleavage activity is detected by fluorescence signal upon cleavage of a fluorophore-quencher reporter in a DETECTR reaction. Dilutions of the effector-protein guide complexes are performed, and the assay repeated at 1%, 0.1% or 0.01% of the original protein concentration. The dilution that provided the highest signal ratio is listed.

### Example 3: Effector Proteins Edit Genomic DNA in Mammalian Cells

[0462] Effector proteins are tested for their ability to produce indels in a mammalian cell line (e.g., HEK293T cells). Briefly, a plasmid encoding the effector proteins and a guide RNA are delivered by lipofection to the mammalian cells. This is performed with a variety of guide RNAs targeting several loci adjacent to biochemically determined PAM sequences. Indels in the loci are detected by next generation sequencing of PCR amplicons at the targeted loci and indel percentage is calculated as the fraction of sequencing reads containing insertions or deletions relative to an unedited reference sequence. Sequencing libraries with less than 20% of reads aligning to the reference sequence are excluded from the analysis for quality control purposes. “No plasmid” and Cas9 are included as negative and positive controls, respectively.

[0463] While preferred embodiments of the present invention have been shown and described herein, it will be obvious to those skilled in the art that such embodiments are provided by way of example only. Numerous variations, changes, and substitutions will now occur to those skilled in the art without departing from the invention. It should be understood that various alternatives to the embodiments of the invention described herein may be employed in practicing the invention. It is intended that the following claims define the scope of the invention and that methods and structures within the scope of these claims and their equivalents be covered thereby.

1-103. (canceled)

104. A composition comprising an effector protein and an engineered guide nucleic acid, wherein the effector protein comprises an amino acid sequence that is at least 90% identical to any one of SEQ ID NOs: 1-1614 and 3195-3302.

105. The composition of claim 104, wherein the amino acid sequence of the effector protein is at least 90% identical to a sequence selected from Column A1 of TABLE 1; and at least a portion of the engineered guide nucleic acid comprises a nucleobase sequence that is at least 90% identical to a sequence selected from Column B1 of TABLE 1, wherein the sequence from Column A1 and the sequence from Column B1 are in the same row of TABLE 1.

106. The composition of claim 104, wherein the amino acid sequence of the effector protein is at least 90% identical to a sequence selected from Column A2 of TABLE 1; and at least a portion of the engineered guide nucleic acid comprises a nucleobase sequence that is at least 90% identical to a sequence selected from Column B2 of TABLE 1, wherein the sequence from Column A2 and the sequence from Column B2 are in the same row of TABLE 1.

107. The composition of claim 104, wherein the amino acid sequence of the effector protein is at least 90% identical to a sequence selected from Column A3 of TABLE 1; and at least a portion of the engineered guide nucleic acid comprises a nucleobase sequence that is at least 90% identical to a sequence selected from Column B3 of TABLE 1, wherein the sequence from Column A3 and the sequence from Column B3 are in the same row of TABLE 1.

108. The composition of claim 104, wherein the amino acid sequence of the effector protein is at least 50%, at least 55%, at least 60%, at least 65%, at least 70%, at least 75%, at least 80%, at least 85%, at least 90%, at least 95%, at least 97%, at least 98%, at least 99% or 100% identical to a sequence selected from Column C1 of TABLE 2; and at least a portion of the engineered guide nucleic acid comprises a nucleobase sequence that is at least 90% identical to a sequence selected from Column D1 of TABLE 2, wherein the sequence from Column C1 and the sequence from Column D1 are in the same row of TABLE 2.

109. The composition of claim 104, wherein the amino acid sequence of the effector protein is at least 90% identical to a sequence selected from Column C2 of TABLE 2; and at least a portion of the engineered guide nucleic acid comprises a nucleobase sequence that is at least 90% identical to a sequence selected from Column D2 of TABLE 2, wherein the sequence from Column C2 and the sequence from Column D2 are in the same row of TABLE 2.

110. The composition of claim 104, wherein the effector protein comprises a nuclear localization signal.

111. The composition of claim 104, comprising a donor nucleic acid.

112. The composition of claim 104, comprising a fusion partner protein.

113. The composition of claim 112, wherein the fusion partner protein is directly fused to the N terminus or C terminus of the effector protein.

114. The composition of claim 112, wherein the fusion partner protein comprises a polypeptide selected from a deaminase, a transcriptional activator, a transcriptional repressor, or a functional domain thereof.

115. The composition of claim 104, wherein the effector protein is a catalytically inactive nuclease.

116. A nucleic acid expression vector encoding the effector protein and the engineered guide nucleic acid of claim 104, optionally wherein the nucleic acid expression vector is an adeno-associated viral vector.

117. A pharmaceutical composition, comprising the composition of claim 104, and a pharmaceutically acceptable excipient.

118. A system, comprising the composition of claim 104, and at least one detection reagent for detecting a target nucleic acid.

119. A method of modifying a target nucleic acid in a sample, comprising:
contacting the sample with the composition of claim 104, thereby generating a modification of the target nucleic acid; and
optionally detecting the modification.

120. A method of detecting a target nucleic acid in a sample, comprising:
contacting the sample with the composition of claim 104, and a reporter nucleic acid comprising a detectable moiety that produces a detectable signal in the presence of the target nucleic acid and the composition or system; and
detecting the detectable signal.

121. A method of modifying a target nucleic acid, comprising: contacting the target nucleic acid with the composition of claim 104, thereby modifying the target nucleic acid.

122. A cell comprising the composition of claim 104.

123. A method of treating a disease comprising administering to a subject in need thereof the composition of claim 104.

The application's sequence listing, which the Patent Office published only in electronic form, follows.

SEQUENCE LISTING (3414 sequences)

SEQ ID NO: 1 - protein, 704 aa, unidentified
  REGION 1..704: note = Cas Enzyme sequence
SKAFQKEYWKIILKQEKTSKMFSDQEFFIEWKKYCNKKYSDLSTQEKKYKDALVQWIDFCKHFLSKYPKTKLFEYSFKKTEDYRSIDEFYLDVDICSYKLKIDTKINKSVLDQWVDTGKFYLFEIKNQDSNDKKKENHKNNLHTIYWNAVFQEINNRPKLNGEAKIFYRKAIPAEKLEKVGGRKGKDGKDVIKNFRFSKEKFIFHVPITLNFCLDNPYINDIVNDNLPYKLNTYFLGIDRGEKHLAYYCLIDQNGKIAAQDTLNIPFTNKDGKPRSIKKDKYVYDKKTDKWTLKEVDCWDYNDLLDARASNRDMARKNWQTIGTIKELKAGYISQVVRKVANLATDKIHPTFVVLEDLNTGFKRGRQKIEKTVYQKLEVALAKKLNFLVDKNAKLGEIGSVTNALQLTPPVNNYGDIENRKQVGIMLYTRANYTSQTDPITGWRKTIYLKTGSEGYIKDQIIGNEEKRIKPAFTDIRFDGKDYYFKYETGGVKPKKWSLYSGKDGKSLDRFRGEREENEWQIKKIDVVEILNGIFTSLSFNKNKSLLDQIKAGTEPVKINKHTAWESLRFTIELIQQIRNTGLPEDERDNDFIQSPVRKNEKHFDSREYWDKEQKVEKADMPSSGDANGAFNIARKGLLMNEHIKTWIENGKPKYDAKTSDLNLFISDSEWDLYLADEEVWRKKLPQFASRKAMEENKKIKPHN

SEQ ID NO: 2 - protein, 705 aa, unidentified
  REGION 1..705: note = Cas Enzyme sequence
AGWDKNKEADNSAVILRRDGKYYLGLMKKGHTHLFTETYQSQVLGDGNQGYFEKMVYKLLPGANKMLPKVFFSASNIEYYAPSEKVLEIRNQSSHTKNGEPQKGFYKKDFNLKDCHILIDFFKESIAKHPDWKHFHFNFSDTKTYNDISEFYKQVSDGGYTVSFDKISQSYIEQQNAEGNLYLFEIYNQDFAIGKTGKKNLHTMYWEGLFSVENTNGFPLKLNGEAEIFYRPKSIEAEREKRCKSKRDIIKNKRYTEDKIFFHCPITLNRGKGEAKYFNQEINDVLANNENINIIGVDRGEKHLAYYSVINQKQEILESGSLNSVGGKNLNGEIVSVDYAEKLERKANEREQARRDWQSVEGIKDLKKGYVSQVVRKLADLAIQYNAIIVLEDLNMRFKQIRGGIEKSIYQKLEKALIDKLSFLVEKGEIDPKKAGHLLNAYQLTAPFESFQKMGKQTGILFYTQASYTSKIDPLSGWRPNLYLKHSNAKKDQAIISQFSSILYNTEKNRFEFTYDVKKFQTLKEWPKNTVWTICSSVERFRWNRTLNQHKGGYDHYTDMTEQFDILFKSYKIDIRSDIRVQIMNLEAKGNEKFFADFIFFFNLVCQIRNTDPLKEKDDPLGDFILSPVAPFFDSRKAEDFGKNLPKNGDDNGAYNIARKGIIILDKISAFKEKEGSCKDLKWGDLYVSQSEWDTFAQMRRETKK

SEQ ID NO: 3 - protein, 705 aa, unidentified
  REGION 1..705: note = Cas Enzyme sequence
MRKFNEFVGLYPISKTLRFELKPIGKTLEHIQRNKLLEYDAVRADDYVKVKKIIDTYHKYLIDEALSGFTFETEADGRRNNSLSEYYLYYNLRKRNEQEQKTFKTIQNNLRKQIVDKLTQSEMYKRIDKKELITTDLPDFLTNESEKELVEKFKNFTTYFTEFHKNRKNMYSKEEKSTAIAFRLINENLPKFVDNIAAFEKVASSPLAEKINALYEDFKEYLNVEKISSVFRLEYYNELLTQKQIDLYNAIVGGRTEEDNRTQIKGLNQYINEYNQQQTDRSNRLPKLKPLYKQILSDSESVSWLPPKFDSDKELLTKIKECYDALSEKEKVFDKLESILKSLSTYDLSKIYISNDSQLSYISQKMFGRWDIIGKAIREDCAKRNPQKNRESLEKFAERIDKKLKAIDSISIGDVDECLAQLGEPYVKRVEDYFAAMGASEIGEEQIGQEFFKKNIEEAYESVKELLNNADNITDNNLMQDKGNVEKIKNLLDAIKDLQRFIKPLLGKGDEADKDGVFYGEFTSLWTKLDTVTPLYNMVRNYLTSKPYSTKKIKLNFENSSLMKGWDLNKEPDNTTVIFRKDGLYYLGIMSKRYNRIFVDREDLPHEGECYDKMEYKLLPGANKMLPHVFLSKKGIQRFRPSGELLGKYERGTHTKGVDFDLGDCRALIDFFKKSIERHDDWKKFDFKFSDTSTYQDISEFYREV

SEQ ID NO: 4 - protein, 706 aa, unidentified
  REGION 1..706: note = Cas Enzyme sequence
  VARIANT 675..688: note = X can be any amino acid
MQEHKKISHLTHRNSVQKTIRMQLNPVGKTMDYFQAKQILENDEKLKEDYQKIKEIADRFYRNLNEDVLSKTGLDKLKDYAEIYYHCNTDADRKRLNKCASELRKEIVKNFKNRDEYNKLFDKRMIEIVLPKHLKNEDEKEVVASFKNFTTYFTGFFTNRKNMYSDGEESTAIAYRCINENLPKHLDNVKAFEKAISKLSKNAIDDLDATYSGLCGTNLYDVFTVDYFNFLLPQSGITEYNKIIGGYTTSDGTKVKGINEYINLYNQQVSKRDKIPNLQILYKQILSESEKVSFIPPKFEDDNELLSAVSEFYANDETFDGMPLKKAIDETKLLFGNLDNSSLNGIYIQNDRSVTNLSNSMFGSWSVIEDLWNKNYDSVNSNSRIKDIQKREDKRKKAYKEEKKLSLSFLQVLISNSENDEIREKSIVDYYKTSLMQLTDNLSDKYKEAAPLFNESYANEKGLKNDDKSISLIKNFLDAIKEIEKFIKPLSETNITGEKNDLFYSQFTPLLDNISRIDILYDKVRNYVTQKPFSTDKIKLNFGNYQLLNGWDKDKEREYGAVLLCRDEKYYLAIIDKSNNRILENIDFQDCDESDCYEKIIYKLLPTPNKMLPKVFFAKKHKKLLSPSDEILKIYKNGTFKKGDKFSLDDCHKLIDFYKESFKKYPKWLIYNFKXXXXXXXXXXXXXXISANFIMMLLYRDIIFQK

SEQ ID NO: 5 - protein, 710 aa, unidentified
  REGION 1..710: note = Cas Enzyme sequence
VPEPARRQKYERGLSTIRWILTFSPRLQQKGPWLEYAAAQNLSAKSPHFAENRGRGWLAQHLLGRLDGLRILSVDLGQRYAAACAVWEAMSGDQVRATCASAGAPEPDKSALSIRVSVGGRRTILRRVGEDAWARLDRCFVIRLAGEDVPARKASPAEIQAVQTLCRELGYSDASRAAAAVDKLMSYALRVLRLGLQRHARRAMVVFGLAAKEKVVLGNQLRALSEDERIDSIGTALADWWTFAVSSRWPDPHAAALWDEHIADRAAGIELPPDLESFSFRERLLVREKLLKDVRPIAQALRPEEVEQLTEIWRLQWLGEEARWCKRLRWIKDWLLPRGSGAQCNSIRRVGGLSLRRLNNLRALYRLEKSFAGRLRVGVGGHRCESQVPSEEFGRKTLTALERLRENRVKQTASRIVAAALGLGKDLKRGHGERLAPCHAVVIENLTNYRPDEVRSRRENRQLMDWCAAKVKKYLNESCDLHGILLREVQAAYTSRQDSLTGAPGVRCADVPIRDFMACGGYWERELRRADKANSSGRSDARSRYLIALRDRISAAIPYPAAAATKGAVRIPVDGGPVFVSADPQSPAAHGTQADMNAAANIGLRALLDPDWAGRWWYVPCNASTGVPVADGLKGSALIQPNLTLFSSHNGAEKKPKRQVVNLWRDVSARPLNVGIWRTYAQYRASVMERVTAILLTGLQTLGDDVDLPF

SEQ ID NO: 6 - protein, 712 aa, unidentified
  REGION 1..712: note = Cas Enzyme sequence
DILQHVKKLYDSVRNWLNTKIYENNSYPVFLNEYTLLKKKDSHAYIKRNGKYYFILYKDIKEKDIINHKGDSAIFYHVDKQDPNHFAANLERWFIFSMKANKAKGRNKPTKAKFVRDHSEFLDDWEIVKSGKYKNTRNKKARIHAISYFQRCLQVEYKEYNWQFRPAEEYESFDDFIDSHKDNLFKIEEYEIDWAHVLQLADEGKIYLFKLYNKDYAKNKVVGSKPNLHTLYWEMMFSRQNLVHYNITLEEPKIFRREKASTPQGVLDMRNIPRRFAKDHLELHIPLHMNVNAHVACDLNQAVLEAIRDGKINHIIGIDRGERNLLYYSVLRLSDGKIIKKGQHSLNITSNNVDYHAKLSEKEKELHDEEKDWKARTGIRKLKEGYLSQAINQLTSLIIKYHAVIVLEDLPDDFISKRQKINKQIYQIFEKKLVDKLSYLVDKDANEGQTGNIHSALQLAKQEFDKEEPNKIRQNGFLFLVPPDYTSAIDPVTGFCNLFDKDCVRNVCSLLSNFESISYDQQHDWFEFTWDYSCLINYTRLTQCDTSLRWTACSNGSRIEWTGSEKMQTRKCETVNLTDSFKTLFDKYNIQYQKGEDIREAICSIRDTDYKKELKRLFFLMLSLRNTVNDGEKQQDSIISPVRDGEGKFYDSREYEEKDDPELPTCGDANGAYNIARKGILTIQKLGSGNDEALSLNEWVNSTREGNIHLRL

SEQ ID NO: 7 - protein, 715 aa, unidentified
  REGION 1..715: note = Cas Enzyme sequence
MSSEAIQEACRLANHQLPAPADLYLHLKRTVQKNLIDGEKTVEESTVYRRIGADRLPDGTAHPAPWARLDRQFLIKLQGEEKVREASNEEVWQVHLMESALGLSFPLIDRLVYAGWGGTEKQAARLEALREKGWKPTGTPADQDEEGGGYKPSLAVDELMFSAVRTLRLALKYHGDRARIAFALTADYKPMPGDTRYYFSEAKDRSSGADAAEREAKHKDYLLDMLLLWHDLAFSRKWRDEEAKELWNLHIAALPGYQAPAAPIQEEAGQGRKKAREEARAKMTPAAEALLADGTLREKLHGLWKERWEKDDAQWKKHLRWMKDGILPRGGRAATPSIRYVGGLSLTRLATLTEFRRKVQVGFYTRLFPSGEKREIKEAFGQTALDALERLREQRVKQLASRIAEAALGAGRVSRTALKQDPKRPEARVDAACHAVIIENLEHYRPEETRTRRENRGLMNWASSKVKKYLSEACQLHGLFLREVPAGYTSRQDSRTGAPGMRCQDVTVKTFLNSPFWQKQCVQAQKNKSTARDRFLCALKEAVAQGGMEEEKKMGPIRVPVPGGEVFVSADAASPAAKGLQADLNAAANIGLRALLDPDWPGKWWYVPCDRKTAYPAKEKVEGSAAVDVKQALPFVLPEEKENKGKTKGGKKGKGEVMNLWRDVSAEPLMTGQWLDYTAYRKEVENRVIQVLTAQLKARNPLRFGNLGDEEEIPY

SEQ ID NO: 8 - protein, 716 aa, unidentified
  REGION 1..716: note = Cas Enzyme sequence
LKDDNKVVWETEDFIKTVKDYHSTLSKLGRLAPSARYTFPDKISSPRWLMYEYRGGGNLKNYEVTCENNILKLNLPLLKKNADEKFDENPYSFDLAKSEQFKVIEADGKNVKFKSGDEEFIGKFGGADLLVKLDGTGKTVKFAYFKIAMEVDKKLPYDDFEKVSSKIMHYFSNAYGETKADRHLDEISLAIQARHPIRVMSVDLGQQSFGACSVFQLAPKSDENKGKFVLPVVLPKLSDVDPEWVAVHKRSFLDKLPGEDVSDKVIESRKKAMDEVKSLKREVNILRDVLKIINQSNLAKKQKLIEQSKKYYENEIYKAKLEELSKLTTADEISIKAQEFFSEYEQILADKIKAWRNETRGRNKRNYYGGKSMWMIEYLTEVRVLLLRWSTHPRRAGKVVRQNKEKFGTVCKKLLTHINNLKDDRAKTGADLLIQSARGFVYDEKTHSWVQKFEPCNVIAFEDLRRYDFNSGKTKQENSRLMKWAHRNIIDKIKGQAALYGISIYDSTDPAYTSKFYAKTNAPGIRCRPLKNEDFTDSVLSEYLKNRIEDFYNKDEIQKLKVGDVIPMEGGKLFATIDSGKLKIVHADLNASWNLQRRFWNRHSDLLNFTTKLSGNKIQIKNDDDGKRWSGKLKLNGFKNCGLIKTDSGDYKITDNKTDTVEKSNDSKYAPNLFRDASGEFFKNQADIFIDKAKFENIVSTKIVEKLKEKSVVTRN

SEQ ID NO: 9 - protein, 717 aa, unidentified
  REGION 1..717: note = Cas Enzyme sequence
TQYGGYLFRKKNSIGEYDYYLGVSANTKLFRKVEGASGQYERLDYYQPKSQTVYGNSYVGKDGYESDKQTLMHSIISYVGTTNDMNVKQQVESKDTPSSMITVIKDASPLLYQGLLDDPYFSDVNRRVTNNFHQTILSMTRIPRSKDYQGAKFTLFTEPQQVIEDICKEKVFGYFAVDDQEIADAMADTSKPFLLFKISNKDLSFAEKFEKGMRHSRGTDNLHTMYFKALMNGEQSVLDIGSGEVFFRRASIKANITHPARIAIKNKNNANEKKESCFDYDLIKDKRYTVDKFGFHLSIIQNYQSPNRYDVNALTREYIRNNPDVHFIGIDRGERHLLYVSVINSRGQIVEQFSMNKIENEYNQTDYHQLLEQRSDIRQKERQSWRTIEGIKELKQGYLSQVVHRIATLMVKYKAVVVLEDLNMGFKRGRQMVESSVYQQFEKALIDKLNYLVDKQVDANEPGGLLRGLQLTNKFTSFREMGKQNGFLFYIPAWNTSKMDPVTGFVDLLHPRYENVDKARAFFCKFKSIQYNDEKGWYEFRLDYNDFNAKAEGTKTLWSVCSNGTRIETFRNVEKNSSWDNREVCLTEEFDKLFADYHISRTGNLKEQIAQQTEKSFFERLTHLLNLTLQMRNSMTGTTIDYLVSPVADEDGVFYDSRTCSKELPENADANGAYNIARKGLWVACQIREAQDANKVKLNISNKQWLLFAQTKPYLSD

SEQ ID NO: 10 - protein, 718 aa, unidentified
  REGION 1..718: note = Cas Enzyme sequence
MEYKYLPNTSRMIPKVTTQRKDVISHFKHSDDDYLLSNQKSFNKPLKISKEIFELNNRIYSRSDLSESVIRDKGNGNDEKKYVKLFQKDYYAKCGGGHDVYQQALWKWIDFCKEFLSCYMSCEYFDFSSLIQTADYDSVEIFYADVDKACYVKKFVQINAQQLNRLVSEGKAYLFKIYNKDFSERKIKITDGKDNLETIMLKSLFSKDNIESKVIQLNGGAELFFRKASVDRVNDEKRSKNIDIVTHKRYTEDKYFFHFPITINFGEKVSGQQFRDNVFKKIKQDDLNIIGIDRGEKHLLYYSVVSPRGELLERGSLNQIESGGEVQEKEISEQFDDHGALKSVELVETGNEVKYVDYHVLLDYYEKKRNLARRDWQTIGKIKDLKSGYLSQVIHKICQLILKYDAIVVMEDLNVEFKAKRAAKVEKSVYKNFELALARKLNHLILKDKSINDIGGTLKAYQLTPVIPANDVGKFDKASQWGIMFYVRANYTSITDPLTGWRQHKYISNSDNIGKIQEFFNPDSGVQINYDTEKQCYRFSYGQQFDDNTIKQWDLFAYEGLERFYWDNKNRSVKKYSLYTEFEHIFSDLDKSKNINHQIEGMTGFGWKSLVFFWNLLNQIRNTDRLKQGDENDFLQSPAWSDRQECFYDSRKALAGLPTNGDANGAFNISRKGLILLDRIKRCPDLSRFGNNNNGRNPENGYFISDVEWDKFVQSANE

SEQ ID NO: 11 - protein, 720 aa, unidentified
  REGION 1..720: note = Cas Enzyme sequence
MRLEDKTRRAKYVKSIQLEMVPQGKTMETIKNNGYIEDDMQRAEAIKNLYPAIDKYFVSRTEEGLQFLENFDYERYGKDKTGKARLKEDVIKHLEKAFHVKAGSGSFSNAKLIFEAIPSYLEKAGDTENAAELRSFKGCLALFSKYLITRATAVFSTTPERVVENMDTYMGNISELRRFLESGYAEQLSGEFRENGEIFSSPEGYGFAVTTSGIKAYNLMISGVVSEKKVEEKGVNMLISEANNEIKSTNTDERLFQKMKQLYKHALVPADKAFTVDVLKSDKDLRVLLQKDLEETGTMLQEIREDIFDYEASGMMKEAFIEGGKLHYLSNYVFYNHNKIPVIVHDQEREAIEKEYEGKINVRKEREKEKRLSRVALDADKKVYSIAKLQELMDKSGEEKVPISQKMMLVITSLCDKAMKAGDDLVANKIFEADTPLLGNPDAKIVIKGYFDAVTEVSRILRTLVYAKQHEATSYVNEKAAEYVADLKKNTNAHNKIRNYLTKKTEVAPKGIKMIFGQPSRLESSYYNSLVNNGAFMNKQNAILNMDGMYYLFMLTKGVPKIIFSEPASPEDTIRVLDVQATASNGALTGLPRSVFNEKGTKNFFETTDENVYIRQNGVKHPVTITREAYNIYKSGTFKTEYLNSHKGDPEAEKIFRRSKNIIIKTYKKMAEELICWSNFNFDGIKEADEYRDMKEYLDDVQARLTSMQWIEISREQIDA

SEQ ID NO: 12 - protein, 721 aa, unidentified
  REGION 1..721: note = Cas Enzyme sequence
MADDLSTQRAYTLRLQGTDPEDQSWRDALWMTHEAVNAGGRAFGDWLLTLRGGIAHELADTPVKGKKDITDELRKNRRILLALSWLSVESRRGAPDKFIVAGGEEPAGSRNEKVLQALKEILKRRGLSAEESESWMSDCRASLSAAIRDDAVWVNRSAAFDDAQVRIGASLTREDIWDMLDPFFGSREAYLTPAKKKKEDEDSSEGTGEEKAKDLVQKAGQWLSSRFGTGKGANFAAMAEVYSKISEWAGTAQEGVSGKEGIKNLADALAAFSPVSQNLEGVLKLISGPGYKSATRNLLGELDSLPVVSRDHLSALHEKAAEDTVKCKESTGTKGRRPYADAILNDVEKRCGFTYLTDSDNRSVSILDTSEFPSDYKWGTARHSEFAVILDHAARRISVAHSWIKLAEAERDRCEEDAAKVYDLPDKVKEWLDTFCSNRSDISGAQGEGYRIRRKAIEGWKEVVASWGRSSCITAEDRVAAARALQDDPEIDKFGDIQLFEILAQDEALCVWHKDGDVAKSPDAQMLIDYVLASDAESKKRRFKVPAYRHPDALLHPIFCDFGNSRWDITYDIHGARGKKKAKRGSKKEEAMPRGVAMKLWTGSDVLSVSLRWQSKKLAADLALDQEAEEVTDTAAVSRADRLGRAAAGIDRGAGVTIAGLFEEAHWNGRLQAPRQQLEAIAAVRDNQKLSSEERERRIAFMKDRIRWLVTFSAKLRPQGP

SEQ ID NO: 13 - protein, 723 aa, unidentified
  REGION 1..723: note = Cas Enzyme sequence
MTTKNVSTTKNEADEQKKGPFDQFTNLYELSKTLKFELQPVPETLELLDNGEGKNLIQLDKEIDLLYETSMKPLFDNLHEKFINDSLSLVNIDVRKLEDLRVLLIEAEELRRQIKEARKNKQDSDLLEKQLKELEGEYKSGEKKGRIPDLQKDLRGDIVMSYKTTAKNWTQELNGKETELPKKKGKRKIEIKKTGSEILGEENVLAILAYYNPDKVDIIKKFTGFFTYFSGFNQNRQNYYSTDALATSVAHRVINKNLLIFLENIKDYKKFKGQLPSLVEYDDYFKLKNFNKFLSQIGIEEYNEKIGMIKSIVNLEHNQKQVDGKFQLKGLKTFDKQIGCKTKKQRDGGCGDGAPKFLEKVGLGFQVTKDNDGQYLIWECLGYVKDTLEADLVNLRENYQKFFSSWQDYDLDKIFFRKEALNTISSRWFGGENWFIIAQALTLSGVGKIDRRDNEYKIPPFVSLQELRNAFDHLEKGIDFDLNKRKRSTADAVTEVNKTYTYSAENLFKERYKEQGLFMGTLFETMLAVWQSEVDYKFSQIFDGFEVRRQDKNNEEKIGKVESFLRGFERYRNEKFDKNVKDKLDRSIHVEIVKNLIEEGYLRLLQLTKCHSLEKKGEIDPRPVEDKFYTTLNEFWTDNIIVLYDKALQSTLTKKPYSEDKIKLNFENATLANGFDINKEADNAAVILTNEKCFYLAIMGKGNNYCFNKEKNQALYENIEGDW

SEQ ID NO: 14 - protein, 723 aa, unidentified
  REGION 1..723: note = Cas Enzyme sequence
NLNYNTLTEIIPLYNKVRNYLTKKPFSTEKFKLNFDCPTLLSGWDLNKEEANLGTLFEKDGNYYLGIINKDNRKIFSSYKNNSDNNSYKKIEYKLLPGPNKMLPKVFFSTSRIEEFNPSDELLSKYNKGCHKKGSDFDLSFCHELIDFFKSSIQKHEDWSKFNFNFSKTSTYEDISQFYKEVEHQGYKITYTDISSEYIDKLVDEGKLYLFQIYNKDFSKYSKGKPNLHTLYWKAIFDEDNLKDVVYKLNGGAEIFYRKKSIEGKVTHPKNQPIDNKNPNNPKKQSTFEYDLIKDKRYSLDKFMFHVPITLNFKAIGENKLNDRIKSEIKKFDDVHIIGIDRGERHLLYITVINSKGEIVEQCSLNKIGIKHETDYHELLDRKEKERDNARKSWGTIENIKELKEGYMSQVVHKIVELMFKYNAIVVLEDLNSGFKNSRKKVEKSVYDKFETMLVNKLEYLVNKDVQGKFEQGGVLNAYQLAKRDIEGRQNGVIFYIPAWCTSKIDPITGFVNLFDTKKINTEFVEKFDNIRFNEKENYFEFDFDYTNISDKSCGKRKSWTICSYGERIRTFRNPHKNSEWDNETVKLTYEFKNLFDRYGIDYKNIKEEIISKSNSQFFNAVKEKDGFYGFGMLFKLLVQLRNSITCDMEDYILSPVKNKQGYFYDSRNCSDKLPKDADANGAYNIARKGLILVQRIKESTKDKIDYSIKNEDWLNFVQEKDK

SEQ ID NO: 15 - protein, 724 aa, unidentified
  REGION 1..724: note = Cas Enzyme sequence
NYAANQGRKSRARLQLARLPGLRVLSLDLGHRYAAACAVWETITSKEMMAACLESGHARPTSDTLYLHLRRSTNRIQKRGRNKGKPVEATTVYRRIGPDELPDGSVHPAPWARLERQFLIKLQGEDRDARRARQSEIDAVNALRDFLGMPRLTETPRIDDLQRDAARLARLGLRRLGDMARIAFAMTATQKPISGGREVELSPEQRIDYLQESLLLWRELAGSNQYVDSWASQAWRDWVAEKFGGPTTVKTAEEARGWSRTKKKDASRELQELKPVAEWLADPCSMDAVELHGLWAAEYAAREQQWRKHLRSLRRMILPRKKDCPRGFKDARGVGGLSVKRLKTIRDLYQVLKAFHMRPEPDNLRKNIPSLGDESLANFGRRILNQLERLREQRIKQLASRVVEAALGAGRMKKPPGRERKRPKQRLDRACHAVVVENLEHYRPEDSRLRRENRQLMDWAARNVRKYIMEGCELHGLHFVEVSPNYTSRQNSRTGAPGIRCEEVSRAVFVEAARRVQNTDPVGAAAGKSTGEMRFEREVNRCSRELRFAKDQNGDPSARDLVMTALADAVASIPASRSTICVPRRGGELFVSLAADNGSIGALQADLNAAANIGLRALTDPDWMGAWWFVLVNLANGQPNKEKVQGCPLWNNRSIWEIPEATDSKPSSKRGAKRTKTDVYAWNPIFATISPSNEWLATKSYWNEVECQIADRLRLKQIEAENPF

SEQ ID NO: 16 - protein, 727 aa, unidentified
  REGION 1..727: note = Cas Enzyme sequence
MKQKKTQNPFNQFIGLYPLSKTLRFELRPYNEKTKNNIISAGILAEDNHRAESYKKVKKIIDEYHKAFIERVLKDLVLEEKPLQAFYECYKKSSKEEALQEIGNNLRTQISNAFEKDPKYSTLTSKDLINKELPSIVTTEEERTLLEEFHGFSTYFVGFHQNRENMYSDEEKATSIAYRLINENLPKFIDNIRSFQKIADSPIADKLESIYDEYAKEGYMNVNTLNEMFEISFYNRVLTQTQIDLYNAIIGGKTEKDGHKTQGINEYINLYNQRGEVQKKDRLPLLKPLFKQILSDREHISWFEEGFADDQAMLNAIKDFYLELTETGPTTTESILDRTKSLLRTIADYDLTKIYLGYNSLSKISQQIFGEWDRIQRALEAEYDQREKTKTYEEKEKHFKSLKSVSIGFIDDCLKAFETDKQLSLSIKEYIAQLGKKNDDPDLIDRITASYKAVKAILTTEWPKERNIAQEKDIVALIKDLLDRIKDLQSFIKPLLGSGKESDKDNLFYGELASIWETINTVTPLYDKVRNRMTRKPYSTQKFKVNFRNSQLLKGWDLNKEKDYMGIILRKKDLYFLAIMNKKNTKVFSSKVPSQGECFEKMIYKQFDATKQVPKCSTELKRVKEAIEIDDKPYYELFDKQKFSKPLTITREIWQLNNLVWDKKTNSFVRRKKDETRPKKFQQEYLDITEDREGYCEALRKWIDFVKDFLASYKSTSIYNIKYKGLF

SEQ ID NO: 17 - protein, 728 aa, unidentified
  REGION 1..728: note = Cas Enzyme sequence
RPENHHVWEKDADVVSLVTHYNTLQRIFERTRSEAIMTLPDSLEHPRSVQWEPAGGSNLKNYRLTVEDNTIYASLPVLQAQGEVFAESTLKIKLAPSEQFKSMVIDTNGKQTHLTFSSQTGELFTGILNSADLLFDCDFFRHHNMEAVISGTIGPAYLKVVIDITPKYPAGWDRKRPHSLMHFTTARGNEKYAANVTPGLRVLSVDMGLGTFAACSVFELRDSEPNKKLAFPVCHGLWAVHERSFLLTMPGEVPDKRSEEWRRGRSDELRKLRSMLSHYKQYYPLKAAADPDQRLSIIDSLLGGVEDRPELAFSREILSSLKAHAGLSAPEWEQRVAGAIKHFRENFGIFVKNWRSANKPRTPGKMMGKSMWAIDYLTRVRSFLVSWSLSGMESNEIRRLDRARMGVYAGGLLRHLDGIKNDRLKTGADLIIQAARGAFGKGNPSFSPCHAVLFEDLSRYRMKTDRPRRENSQLMRWAHRSIPSEVKMQGEIYGIHTCETEPAFSSRYHAATQVPGIRCHTLTKEDMGNIELRKIIETENPEIQWGRLRPGSIVPISGGDLFVCLNASHGLITIHADINAAQNLQRRFWTRHAEAYRIPCRRLLINGEERWVPKSMGKRIMGSLKGYGWLVPTDHQSGSCRWENITRKEWLKLGGSVKETDGESTDDLNLEDVEEWLLEDSGEVVVFFRDPSSVLFPKDLWYPSKAFWGSVKRRTVSKLLECLTFQID

SEQ ID NO: 18 - protein, 730 aa, unidentified
  REGION 1..730: note = Cas Enzyme sequence
ERDEEFYGSFMPIVDALQPINELFDSVRNWLTKKAYSNDSYPAYLGIATILDNWSKKAVYLKKDGKYYFCLSSINNGNRAISDENFHNAITQSCSNNSPKDAIIYIAYKQPANQIRKNLPRFFICPGKDGMNSFVKKHPELLTEWEQLKGDRYKSPNMKNKAISYFQKCLQLHDNYKKYLFHFQPASRYDDYNSFVESLEHENLFFFEEKPICWNELLKLVDDGKVYLFQLYNKDYADNRPGNSTPNLHTLYWEAVFSQQNRLSYDFKLEEPKLYFREKADVVQRTGDIHSVPLRYQTPKMHLHIPILMNANAQNTVDVNQLVLEQIQAGTFSHIIGIDRGERNLLYYSVMDMNGNIVEQESLNVINDVDYHKLLMEKEADLDDEQRKWKARSGIRKLKEGYLSHALHKLTNLIRKYNAILVVEDLDKAFKHSRQKINMQIYQLFEKMLIEKLSFWVDKKVSDGNHVDSTFCALQLATPGLKQEEKRVRQNGILFFVPPEYTSAIDPVTGFCNLFDRERVKGFKGIKEMFAHFQRITYNVDKDWFEFEWDYQDVLQYTRLKESANPQPWVVCSMGERIEWTGSERYRNQKCESVDLTTEFKTLFEKYNIHYVNGEDFKDAIASINKKEDIIELKRLFFLTVSLRNKPNKDTDYILSPVRDASGEFFDSRHVNPGALAKLPVDGDANGAYNIGRKGLLSINKLKKGFNEPLSLEEWVKSVRLEICQTTNQT

SEQ ID NO: 19 - protein, 732 aa, unidentified
  REGION 1..732: note = Cas Enzyme sequence
YHCRLFRKNDSIFLGIVGDAENNLIDSSYELMDYYQIKGQTIFGSTYAGLFNENKYTQDRQEKSNKELLNNIDKIIDEKLIAAFPKAETYIKKIKKDRTSGLFDFEITREQIDSLFASKEGTTYDEYRKADKKKIVLEILRNNFSDTFNFNEEADYLVNRIGELFGKTPKRKDFKGVDKMVYELTKLEPFFYKTSFNAVKQNSNDTKIKALFQIYSKDFSPDKNPNSKKNLHTLYFEELFSKENEENPIFKLSGGAEVFFRKKIDDYKIDQWEKKSLKNPKTDKLPNKKRRFTENQILFHLPIALNNINDGGSVNRKVHEYIQENEEVKIIGIDRGEKELAYYCLLDQSRAIVDGPKTLNIVGSNILKNKEGVEKKQSVNYRDKLDIKEKERMMARRSWTKIEGMKDLKAGYISNVVNEIARMMVDNNAFVCFEELNHGFKKDRSIRIEKGVYQRLENALVDKLSYLVLKKTLEGVRNALQLTPKNKAIKYWGNQMGAIFYTDAKFTSKTCPHCGFRRRGVEPMKKAKEIKEKFAKDQLKIFFEKSKDRFRIEYFWKVEAFDFSCENLYGKGKMEVIYSDVERNSSNNGSLKDIFKDYLQEDIELFSLVQNDAKFRYVDFGKVFNSLVWLRHTVERDSEMFDCISCPKCHFSTMSLKARKIKDGDANGAYNIARRGLMIYEKIRSEQLKKKMNTKDGIASKDLKINLKEWDEETYKQWDKMDWEVSGNIRGL

SEQ ID NO: 20 - protein, 734 aa, unidentified
  REGION 1..734: note = Cas Enzyme sequence
MAKNTLFSQFTGLYPVSKTLRFELKPMGKTLEKIKETGIIENDKRRHNDYFGAKKIIDKYHKYFIDAALSKFPRIDWNPLKEAIERFLDRSDASKKKLEKIQTEFRKKIAKALTTHDHYKELTASTPKDLFLKVFPDHFGKQPAIDTFDGFSSYFTGFQENRQNIYSDEAISTAIPYRLVHDNFPKFLSNIEVYKTLKDNAPSVLSDAENELKDFLNGKSLANIFELNAYNDVLTQSGIDFFNQVIGGISGEGGEKKTRGINEFSNLYRQQHPEFAQKRLATKMIPLYKQILSDRETKSFILESYSTDSQVQESVKEFFESQILNCDIAGRKVNVLKELSSLIKRITEFDLGSIYVNQEELSNISLELFKSWNTINAVLFKNAENRIRSAEKAANKKKIDAWMKSNEFSIATLNLAIAESDSEEISRVKIESYWNDFEAKVQSILCGDNRRNLDEFLSATFNENNALREDSEVIGKLKAFLDALIEIMHSIKPLISDAENRDLSFYNELTPLYDQLSLVVPLYNKIRNYATQKLTESEKFKLNFDCPTLADGWDQNKEKDNKSILLRKDGLYYLGVMNTNDMPKIEEINALGNEDCYEKMIYKQFDCLKQIPKCTTQTKAAKAHFEAGKTEDFVIKDKSFNGPFVISEYIWKLNNYVWNGEKFVLKFGDADKRPKQFQMGYYKETNDLLGYKKALADWIDFCKKFVKTYISASGYNYDFLDSDKYNSLDEFFSY

SEQ ID NO: 21 - protein, 734 aa, unidentified
  REGION 1..734: note = Cas Enzyme sequence
IIALYNQTRNYLTQKPYSLEKFKLNFENATLLDGWDRNKETSNTSILLRKNGNYYLGIMNKRHNRVFEALPQILKTNNSYEKIVYKLLPGANKMLPKVFLSTKGKATFQPSQEILDNYKSETHKKGDNFNLDHCHKLIDYFKDSINKHSDWKNFNFNFSETSSYEDISGFYREVEAQGYKIIFDLISEQYIDELINEGKLYLFQIYNKDFSPHSKGTPNMHTMYWKALFSEENLANVVYKLNGQAEIFYRKKSITADKTIKHLANQPINNKNINNAKKQSTFAYDLIKDKRFTMDKFQFHVPITLNFKAQGRDDINLEVKEYLKSNPHTHVIGIDRGERHLLYVSVVNPQGEIIKQFSLNEIINEYKGNTYKVDYHNLLNNKEGDRKKARENWGVVENIKELKEGYLSQVIHKICQLVIEYQAIIVMEDLNSGFKNSRIKVEKQVYQKFEKMLIDKLQYLAFKNPQENQPSIYGALQLASKFESFQKLGTQSGFIFYVPAWNTSKIDPATGFVDLLKPKYETVAKAQEFIHKFDDIKYNQSKDWFEFNFNYSKFTEKADGTRLNWTICTTNINRYSWNRKLNNGKGGQQLFEITKCLKALFDNYKINYQSGENLVVQIATQSEKDFYVCLLKYLSITLNLRHNNGKSGIDEEDYIASPIADNAGAFFDSRNEVIKGKNEIGDWLSKLPVDADANGAYHIAKKGLWVLHQLEKADNLRKVKLAITNKEWLEFTQN

SEQ ID NO: 22 - protein, 735 aa, unidentified
  REGION 1..735: note = Cas Enzyme sequence
KVRNYMTQKLYKTDKIKINFSNSHFLSGWAQTYSTKGALIVKKENNYYLVIVDKKLSNDDIVFLGTNTQLSPAERIVYDFQKPDNKNTPRLFIRSKGTSYAPAVKEYDLPISDIIEIYDNEYFKTEYRKINPKGYKEALIKLIDYFKLGFSRHESYRCFNFKWKESEQYGDISEFYNDVVKSCYQLKSESINFDSLLQLVDEGKLYLFQLYNKDFSEHSKGTPNLHTLYFKMLFDERNLENVVFKLNGEAEMFYREASISKDDMIVHPKNQPIKNKNEQNSRKQSIFEYDIVKDRRYTVDQFMLHIPITLNFTANGGTNINNEVRKALKDCDKNYVIGIDRGERNLLYICVVDSEGRIIEQYSLNEIINEYNGNTYSTDYHALLDKKEKERLESRKAWKTVENIKELKEGYISQVVHKICELVEKYDAVIVMEDLNFGFKQGRSGKFEKSVYQKFEKMLIDKLNYFADKKKSPEEIGSVLNAYQLTNAFESFEKMGKQNGFIFYVPAYLTSKIDPTTGFADLLHPSSKQSKESMRDFVGRFDSITFNKTENYFEFELDYNKFPICNTDYRKKWTVCTYGSRIKTFRNPEKNSEWDNKTVELTPAFMALFEKYSIDVNGDIKAQIMSVDKKDFFVELIGLLRLTLQMRNSETGKVDRDYLISPVKNSEGVFYNSDDYKGIENASLPKDADANGAYNIARKGLWIIEQIKACENDAELNKIRLAISNAEWLEYAQKK

SEQ ID NO: 23 - protein, 738 aa, unidentified
  REGION 1..738: note = Cas Enzyme sequence
HYCGWSKNYDSYGALIFEKNEKYYLGIINGTKFTKDEIEQLYLDIRNNNISLRLVYNYQKPDFKNFPKLFIRSSGSNFAPAVKKYNLPIDSVLNIYDKGLFKTSNKSSQNYHESLKKIIDYFKLGISQHESYKGFSFKWQETSEYDNISDFYKDATRSCYKVTWENINFSKLYELIESGRLYLFQIYNKDFELDENIAPKGYNFKDKNGRRNLHSIYWKALFSNTNFKKTILKLNGGAELFYRKLTKNLTKDPIITVKNQIKIIKKNNNIFHKKRFTQNKIYFHCPVSINFTENDWKINTKICNTIRNNSKVKIIGIDRGEKNLAYYSVIDHQGNILETDSFNEVQEREDREPTDYQKKLDQIQKERDWQRKSWQEISSIKEMKKGYISQVVHQICKLIRKYEAIVVFEDLNIGFKRGRFAIEKQIYQNLELALAKKLNYMVFKDAKEEETGHFLQAYQLTPPVINFQDIGKQCGIIFYVPASYTSAICPACGFRKNISTFVEKIEKNIDLINKFNIVYDPDKDRFCFRYKRSDFIKSEKEKEDDSKVKLYSNTKLPDDFTFYSNVERFKYIRDQNNRGGKVELKYPNDSLKKLFHENGINFQNFSNISQLIKTRNFENENFYKPFIYIISLILQLRNTTIEINQNENNEKYRDFISCPHCYFHSENNLITLTKRYKGKKPFEFNGDANGAYNIARKGILILQKINKAKRLEEIEYGGLTVTQQEYDKYLALVSSKKA

SEQ ID NO: 24 - protein, 739 aa, unidentified
  REGION 1..739: note = Cas Enzyme sequence
MTKKPFSQDKWTLNFENPTLANGWDKNKETDNTAIILRQDGRYYLGVMEKKNNTIFKKVPQSTSGYEKMVYKLFPDPAKMMPKVCFSTKGRDFFKPSREITRIYENEKFKQGDTFSIVSMQKLIDFYKMALTSYEGWAMYDFGNVKDAKQYTTNIGEFYNDVARSGYRIDFENASEQYIDKMNNEGKLYLFEIHNKDWNLKEGKQKVGSKNTHTLYFEQVFSAENAENNFIVKLNGEAELFFRPATDESKLGKRLDRNGKMVVKNKRYAKDKMFFHLPVTLNRAAPEARKFNQSINELLASNPDINVMGIDRGEKHLAYLSVINQKGEILEVKSLNKINGIEYALLLEERARNRENARRDWKSIEQIKDLKKGYISNVVREIADLIIKYNAIVVFEDLNMRFKQVRGGIEKSVYQQLEKALIDKLNYLVDKKEIDPQRAGHVLRAYQLTAPFESFKTMGKQTGVLFYTQAEYTSQTDPVSGFRKNVYISNSATVEKIKNSIRKLDAIGWDDDLQSYYIDYNPVNFVEAKFRDNTVSKDWRIYAHIPRIKREKRGGHWETVSANPNQELAKLLELWEFDHPKGDLKEQIFQMAAEKRLEGTKEFDGKSRNFWQSFVFLFNLMLQVRNSTATQYKRDESGNIVETIEGVDFISSPVAPFFTTEGGKYTEGFVNLAGMESIFIGDDEEKEKFKAEFNGDANGAYNIARKGLMLLSSLAKSPEKPDLFITREAWDRFVQKAVR

SEQ ID NO: 25 - protein, 741 aa, unidentified
  REGION 1..741: note = Cas Enzyme sequence
PKPDEKFDSAVALMPDRLDDGSIRHLLNFPVSLDSSWLHEALGKSANWKGQFNGIKDKNLHLHWPGTAKDATKKNPWWECKAIITEGFTVLSNDLGQRSAGAWALLKVTCWKPETKRPFRSIGHDGKREWFAEVLKSGMYRLPGEDQQVQKNGAWAPEKSGKTGRMAGDDEYTAAFSLAKKLLGAETDEAVGSWLGPKGERSFPELNDQLIKIANRRFTRLSTYHRWSCFRPENLDEPIRKAKVIDGQIVELEAYQDKEVVAWKELLKAGDITGFRDQAGMAFENLRSDLEGHLINLANLTVPLRQKLWTWQQRPGDSKYGDLLMVDFEDSHPKVRGQRGLSMPRLEQLDGLRRLFLRFNRSLDREKYTPAKFGRADEGRTSGEPCQALLDKIDRMKEQRVNQTAHLILAQALGVRLRPHQFSDADRRTRDIHGEYEKINGREPVDFIVIEDLSRYLSSQGRSPSENSRLMKWAHRAVRDKLKMLAEEPFGIPVVETVPAYSSRFHAHPENGQPGSRLHELHELATYQIQSLENLAAKSDFKDRHRASAAAELLEQFKAIHPENERRKDFNRNRAKGVPALPLFTLYYPQAGGPLFLAVRDGNPVQADLNAAINLGFRAIAAPECIQVHRRVRAAKEKDIYRPKLGNAREKAAYTKDDSILLDGPLSKKFGASSSPNFFLEPDGLTQVEGDPLFDRATLKGQSLVSGVALWSTVNAAIYLRCAELNRYRLKIWKLEDDIPM

SEQ ID NO: 26 - protein, 744 aa, unidentified
  REGION 1..744: note = Cas Enzyme sequence
LSDTDKIKLNFDNGQLLGGWDESQEKNKLGVVLRKDNLYYLVILNKKYNKVFDEKENPEAYKIGGDYYEKMVYKCLADIKRQIPRIAFAQKNRSLFGWNKEIQKIKEDYKLFQENKKNNKDLWGKSFNKNKETKLIKYYQNALEKGGYKDTFGLCWKEPSKYKGIGEFNDDIDRQAYSLRFVPIDTDYIRKGVDNGKFYLFEITNKDIRKNNKKTKDNLHTMYFEQLFSKENLKDIVLKLSGGAEIFRRERVKNLPKRKDNNNKEVIEHKRYAEDKLLFHLPIVLNMRTKGMKAGSFNSEIRKKLNKALRKRKDKINVIGIDRGEKHLAYYSIINHKGEILAQESLNKINGTDYQEKLHEREKERLKNRQSWEPITKIKDLKRGYISGVIHKLSRLVIDHNAILVLEDLNMRFKQTRSRIEKSIYQQLEKALIDKFGYVVFKDNNLRDPGGVLNGYQLSAPFESFQKMKKQTGIIFYTQADYTSTTDPLTGFRKNVYVKNSAPIGEFGAKKKSLTIKKWIELLKELSWDKEKKSYIFKYDVKDFYDKAKSKVWKIYADIPRIRRFKENGYWKCDSVNPNEMLKKLFQLWNFDETKGNILKEIKEKDNRGELKGKKDFDGKKRTFYHSLVYIFNLILQIRNSFSKKNKLNKEGKIEEAGEDIDFIASPVYPFFTTKSKYSSMNFSHFNDKIKNNKTRIMKDFNGDANGAYNIARKGIMLLNRIKENPERPNLYITKEEWDEFSQR

SEQ ID NO: 27 - protein, 744 aa, unidentified
  REGION 1..744: note = Cas Enzyme sequence
LDLLVPLYNKVRNYATQKPYSIEKFKLNFENSKLLGGWPRDREIATSSIIFKDNKYFYLGILDKDSKKFFKNLPEPKDSSDILSKMLYLQVADSSKDVQNLMIIDGKTVKKNGGKEKGGDFIGQNLILEKLKDTYLPKEINEIRKSKSYSKQSNNFKKEDLNAFIDYYKQRAIEYFDDYVFNLKDSSEYRDFSEFTDHINEQAYQINFVEISKSFVDELVEQGKIYLFKIHNKDFSENSKGKPNLHTKYWKALFDEKNLANVFYKLNGQAEIFYRRKSIQEDKMVIHKANQSIQNKNPDAQKKESVFEYDIIKDKRYTVDKFQFHVPITFNFKARGGDYINNDVLSYLKNNPDVNIIGIDRGERHLVYLSLIDQKGNILHQESFNIISDSNHKTSYHDLLDKKEKERANARENWGVIENIKELKEGYISQVIHKIAKMMVEHNAIVVMEDLNFGFKRGRFKVEKQIYQKLEKKLIDKLNYLVFKDKKADEVGGLYNALQLTNKFESFQKLGKQSGFLFYVPAWNTSKIDPATGFVNLFDAKYESIEKTREFFNKFSDIRFNSAKNYFEFKVDQYSKFNPKAEGTRQDWVICSYGDRIITFRNSEKNNNWDNKELILSDEFISLFKKYEIDYKSDNLKELIISQADKSFFEGLLRIFKLTLQMRNSKTNSDIDYLISPVCNKKGEFYDSRKADKSLPQDADANGAYHIAKKGWLILEKINKFQEKDKKKPDLAISNKEWLQFVQK

SEQ ID NO: 28 - protein, 744 aa, unidentified
  REGION 1..744: note = Cas Enzyme sequence
FWSPRLLRDGLRSKNEKLDKDELDQTWMPPVLRAFVNARKWPCDKQTFAGASVRLAPRCKENIQLVFEPELRTGVLSAKWKETFPFSPAKNKDSELVGLFWPRTKEDKVSWFDKGEMRCLGVDLGLTNSAAWQILQAANKDTTANTTRLRHRLNPDSENPAWFAHSIANGIVRVAGEDRWGWRKFAPDEKAKLRAEMKKTAKKRNAFCRKFYALNREIEFETATHAFLPELSGSGGRNATADETNEAEALFTIFKAKGFDITDRQPNWKKILSFPEQNDELLWGLKRVRAQLFRLNRWSEQLGNASDSKSHQLAVEIIGSLRGDDPMLELAALTSDPQKLKKHIGELAGEYLDCFKSMLPRIADRILPWRRGHWSWKPCENDWHRMELDTSKPRPEALLAGQRGISLTRINQLKDLRQLAQSLNHLCRRKQIERGEIVPEPFEDCRQAMEDAREDRAKQIAHEIFAVALGVELAPPPADKQERKQTESLHGVYRCLERGPVNFIALENLTEYKTSAKQGRRENRQLTSWSHRRVHKILGELCELVGLPIVLVDPKFTSRFSAKDHSAGFRAEEVRKDDPRRSFWQRKAKEDPGCWQFEFLSWLDMIPDGKSLLLPKKGGEFFVSLGKDNSLYQADLNAAYRIALRALAHQKRAELLGQAWIEKKPYLVDTASVFSDSVMRDGCSFKTIPSSERLWEDVNDDLASQRCREINLARFAGWKITLPKQTLPKAPPPDEEDDVPMQFT

SEQ ID NO: 29 - protein, 746 aa, unidentified
  REGION 1..746: note = Cas Enzyme sequence
FQKEDKYYLGILNPKNKPDFDNLTSENQEIGYQKMVYKQFPDFSKMMPKCTTQLKEVKQHFENEDSDYVLLNKNFIKPLTITREIYDLNNVLFDGKKKFQIDYLRKTKDEEGYYSALHTWINFAKDFVASYKSTAIYDTSTILPTEQYEKLNEFYGALDNLFYQIKFENIPENIINAYVEEGKLFLFQIYNKDFAAGATGAPNLHTIYWKAVFDPENMKDVVVKLNGQAELFYRPKSNMDVVRHKVGEKLVNRTLKDGTILTDELHNEIYLHANGKLKKELTEEAKKILVNELAVVYDVHHEIVKDRRFTTDKFFFHVPLTLNYKCDKNPVKFNAEVQEYLKENPDTYVIGIDRGERNLIYAVVIDPEGKIVEQKSFNIINGFDYHGKLDQREKERVKARQAWAAVGKIKELKQGYLSLVVHEISRMMIKYQAVVVLENLNVGFKRVRSGIAEKAVYQQFEKMLINKLNYLMFKDVNGTESGSVLNAYQLTDRFESFTKMGLQTGFLFYIPAAFTSKIDPATGFVDPFRWGIIKTLSDKKNFLSGFDSLQYNSANGNFTLHFDTKKNKDFQKKLEGFMPDWDIVIEANKKKTKNGRTYIAGKRIDFVRDSNGQGHYEDYLPCDALAEVLRQNDITYENGEDVLPLVLKKDDSKLLHSVFKVIRLALQIRNSNAETGEDYISSPVEDVSGICFDSRTGNVELPKDADANGAYHIALKGLLVLERLRSNEKLAISNSEWLKYIQEKRA

SEQ ID NO: 30 - protein, 747 aa, unidentified
  REGION 1..747: note = Cas Enzyme sequence
QAKLILSRLPGLRILSVDLGHRFAAACAVWETMSSEAIQEACRLANHQLPAPADLYLHLKRTVQKNLIDGEKTVEESTVYRRIGADRLPDGTAHPAPWARLDRQFLIKLQGEEKVREASNEEVWQVHLMESALGLSFPLIDRLVYAGWGGTEKQAARLEALREKGWKPTGTPADQDEEGGGYKPSLAVDELMFSAVRTLRLALKYHGDRARIAFALTADYKPMPGDTRYYFSEAKDRSSGADAAEREAKHKDYLLDMLLLWHDLAFSRKWRDEEAKELWNLHIAALPGYQAPAAPIQEEAGQGRKKAREEARAKMTPAAEALLADGTLREKLHGLWKERWEKDDAQWKKHLRWMKDGILPRGGRAATPSIRYVGGLSLTRLATLTEFRRKVQVGFYTRLFPSGEKREIKEAFGQTALDALERLREQRVKQLASRIAEAALGAGRVSRTALKQDPKRPEARVDAACHAVIIENLEHYRPEETRTRRENRGLMNWASSKVKKYLSEACQLHGLFLREVPAGYTSGQDSRTGAPGMRCQDVTVKTFLNSPFWQKQCVQAQKNKSTARDRFLCALKEAVAQGGMEEEKKMGPIRVPVPGGEVFVSADAASPAAKGLQADLNAAANIGLRALLDPDWPGKWWYVPCDRKTAYPAKEKVEGSAAVDVKQALPFVLPEEKENKGKTKGGKKGKGEVMNLWRDVSAEPLMTGQWLDYTAYRKEVENRVIQVLTAQLKARNPLRFGNLGDEEEIPY

SEQ ID NO: 31 - protein, 752 aa, unidentified
  REGION 1..752: note = Cas Enzyme sequence
LTKKDFLGRLLFPSLNGEEEQKNILSKRKTDGAEKIKLNFDISHDHKWNSLAFLFKKDGKFYIGITKKGNGIKFHEGRKEENEFEKLEYKQLKFKTLVGKGYVRDFKEKYSAQNDQVAILNAKILIKKQFQSDYPLLKRVLEKKYPSKKEFGKHVIELLDASYSAEFIPIKEDILKLGENGDIYLFEINNKDFRTKGSPNLHTQYFKLLFEQPAPASLKLNSEIELFFRPKKDDLPIRTKNGRELTFVDKRDGNKEKKVLQNRRYGKDKYFLHLSIIQNFGKEKIKNNEISIRGFGKKFNAGFNSKILKNNFNIIGIDRGEKHLAYYSVIDQSGKIKDSGSFNKIDVLDKNGKLVKTVDYLKLLEKKAGNRDTARKNWQTIENIKELKNGYISQVVRKICDLILKYNAVVIFEDLSGGFKRSRMKIEKQIYQKLELALVKKLNYLVNKNAKEGERGHYLNAYQLTPPVTTYGNVGKQTGMVFYTQASYTSKTCPVCGYRKNISYAFYFENEKKAIKIISRLDKLKYNAGKNCFELEYSLDKFIKENGKNNKIIKNKENELYHNTQKKNQFTVFSKDIIRYKWHDRQTERAKNLSDGEEFLADEIERKTARGVVKKYDITKCLASLFRKNNIEYKDGDLRSKISSNLNSGFYKNLFYLIGLMLDTRSSISGEEIDIIQCPECGFHSDNDFESHKYNGDANGAYNIARKGIMILEKIKQFAQNNNGSVDKISYGDLAVNIEEWDKYSQIVGKRN

SEQ ID NO: 32 - protein, 753 aa, unidentified
  REGION 1..753: note = Cas Enzyme sequence
MMQALLGKTAAIPKQKDLKEAAVQLMPDFDETGTRRILLNFPLALDSAHIQGHLKKAELWNKQFQSWKNGDQLPFLRWPSEFDGKESHHWWEETKSFRVLAADLGTHHAASVALIEATQVKHPDSRFIGETSNQSWFARFLTGKVLRLPGEDVQVFRKASPLDGDKQGTTFREELYGAKGRMSSETECRHTIELLNALDQSSLLFDANSTETLKRQFSFPEQNDKILVALRRTQNWIATCVSWHWKLTQPDSDAQREVAISQIAEQDRKPEWKALATTRGESIGLLRDLLRDHITHQRQLVMTRLLETTQRILPLKGRTWTWQVHPEKPDCHLLSCTTKSNTSAKTLLTGQRGLSIARIEQLSELRRRWQSLNQALRRELGQRPLSAAEMRNDPIPDPCPDILRKLENLREQRVNQTAHLIIAQALGLKLKMPELSQDVRRKVDMHGEYEVGRIPADMIVLEDLSRYLSDQGRAKSENTRLMKWCHRAITEKVKLLAEPFGIPVLETPAAYSSRFCSLTGMAGFRATEVSWKDRHKFRWKALLKEEEESRAKAKVPSAMAQYAAGLFKDLRKIAESPMPTRTLLAPQTGGPIFVTAKPVAHPAPAKTRRSGTGAAVLPMQADINAAINLALRAIAHPACADLHHRLRTERKVAAKTKQEIYSTREIRRFSTEPATVEVKQGHSLPKERNSNLFFDPYNVAAFGRSRLSCDKANEYPYAAGPGLWKVVNNPEFQWCRCLEINRQRLTENEDIPW

SEQ ID NO: 33 - protein, 753 aa, unidentified
  REGION 1..753: note = Cas Enzyme sequence
MKKIDCFINQYSLNKTLRFKLIPYGSTLDNFKARNILEQDRELAESYSVVKAYIDDYHKAFIDKVLCSINYLDISNYSQLYYKSNKSDTEKKRLSEEAEKLRKTVAFALKSQPENKQLFRKELIQKLLPEFLDKDEEREIVRKFYNFTTYFTPFHKNRENMYTHEEKATGIAYRCVNDNLPKFLDNITVYKRLSQIFSSEELVNYNAQCYAFTGMNMDELFSEKSFAFVLGQSGISRYNEVIGAYTNSDGSKVQGLNEYINLHNQKVDRAARLPKFKELYKQILSDRETISFIPEKFGTDDEVLSAISQFYTEIFAPSAESLETLFSNTGSYEHSGIFLENAAAVSSLSQKISGSWHTVKDAWTFGYDAAFSGKKIKDMGAYEEKRDKEWKKTAYFSFAHLDELLGAEGGTVGAYYKDTVAAMLSGVKNSFELCSGLFASNYADKPKRLAKNQADIALIKNLLDSQKEVERLIKPLMGGSGEDGADKLFYSELDACTGFFRELDLLYDKTRNYITQKPYSNNKIKLNFENYQLLDGWDRNKEEHNRTVILRRGENYYLGIMDKNSKRMFANYPTENSDGWEKMEYKQMSNPLTDIPKALFPKKSKSPFPAPDEIVKIKENKTYMGENFSEEDCRKLIEYYQNALQSLERWSMFDFSFKKADEYKNSIEFFDDVKKQSYKLMFKPISAEYIEQSVEEGRLYLFQIYITRTFLPAARVHPICTLCISECSLMKEILKMWYISSTAALKCSTASTA

SEQ ID NO: 34 - protein, 754 aa, unidentified
  REGION 1..754: note = Cas Enzyme sequence
NKSFQDLDNKFSEFEIKKQTKFQNLDKKERVFFIKEFCDAFLAIERMVKYHKVDENNDTDDNFYETIDLYLQETELRKYYDAFRNYLTKKPFDENKIKLNFENGSLLGGWSDGQERNKGAVILKNGDKFYLGILKDRGFFRTDKENKLYVEDSNWKRLILTNLKFQTLAGKGFLGKYGKSYGEIGKVDPLKAVSLLQEFIQKNYLTKYPKLRVISEKEYNNKKEFDKEIKEALEQSFDMHFNSINFDVLKDGVKNEKLYLFEIVNKDLVGKERKGNNNIHTLYWLEMFLDGNLQSPKLALNGGGEIFFRQGQRDKLITKIVNEKEVLDAKRYADDKFFLHVPITINYGKPKNIKFKELINNFVKENIDNVSILGIDRGEKHLLYYSLVNNNGEIIKQGSFNKIKCGNKIVDYNELLSKRAKEMMEARQSWETIGKIKDLKEGYLSQVIHEIYKLVIENNAIVVLEDLNTEFKAKRTAKVEKSVYKKFELALVKKLNHLILKEKEANELGGSLNAYQLAPYIKPGDVGKFEKAKQWGIMFYVRPDYTSQTDPVTGWRKTIYISNAETIINIKKKWKDANIKIYFDSDKKCFKFSYDKWELCAYPNLERLYWNRSEKNVDGKFGNMKKYSLHKEFECIFEGMDKSKNISDQMFDKEDFNWKSFIFYWNLLNQIRNSDKSKNENESDFIQSPIWSEKINDFFDSRKKYQIDLPENGDANGAYNIARKGIMIVDRINENPQKPDLFIKNTDWDNFSQK

SEQ ID NO: 35 - protein, 754 aa, unidentified
  REGION 1..754: note = Cas Enzyme sequence
IKKDLEKTIKPLLGTGKEENKDDVFYGKFTNLYEMISEIDRLYDKVRNYVTQKPYSKDKIKLNFENPQHLGGWDKNKERDYRSVLLKKEDKYYLAIMDKSNNKAFIDFPDDGECYEKIEYKLLPGPNKMLPKVFFASSNIEYFAPSKKILEIRSRESFKKGDMFNLKDCHEFIDFFKESIKKHEDWSQFGFEFSPTEKYNDISEFYNEVKIQGYSLKYKNVSKKYIDELIECGQLYLFQIYNKDFSVYAKGNPNLHTMYFKMLFDERNLANVVYQLNGGAEMFYRKASIKDSEKIVHHANQPIKNKNADNVKKESVFEYDIIKDKRFTKRQFSIHIPITLNFKAKGQNFINNDVRMALKKADENYVIGIDRGERNLLYICVINSKGEIVEQKSLNEIIGDNGYRVDYHKLLDKKEAERDEARKSWGTIENIKELKEGYLSQIVHEISKLVIKYDAVIAIEDLNSGFKKGRFKVEKQVYQKFENMLCTKLNYLVDKNADANECGGLLKAYQLTNKEDGANRGRQNGIIFSVPAWLTSKIDPVTGFADLLRPKYKSVSESVEFISKIDNIRYNSKEDYFEFDIDYSKFPNSTASYKKKWTVCTYGERIINVRNKEKNNMWDNKTIVLTDEFKKLFADFGVDVSKNIKESVLAIDSKDFYYRFINLLANTLQLRNSEVGNVDVDYLISPVKGVDGSFYDSRLVKEKTLPENADANGAYNIARKALWAIDVLKQTKDEELKNANLSIKNAEWLEYVQK

SEQ ID NO: 36 - protein, 761 aa, unidentified
  REGION 1..761: note = Cas Enzyme sequence
MQLKDIFGIFDVAEDGSKDEIFYDVYEEINARFGGLSKLYDKVRNYLTQKNYLQDKIKLNFGNYQLFGGWDLNKEEAYRTVMLRKGDRYYVGIIDAGSKDIFENIPTYEDGPYYEKMIYKLLPGQNKTLPRIIFAQSNRSLFQPPKEITDKYDLGTHLSGPNFNLKDCHALIDYFKSCLKKYESWKCYDFHFSDTSTYKNISDFYKEVSEQGYKVRFIPIAESYINDCIEQGKLMLFQVYNKDFSEYSKGKKNLHTLYFTQLFSKENLADPIFLLNGGAEMFYRFANPKLDPNKVTHSKNIPVKNKNPLNAKKESVFAYDLIKDKRYTKAQFSFHVPIKINAFDGDSGNNKVGNKVRTALRKCDDNYVIGIDRGERNLLYICVIDGKGKIVEQFSANIVEDDSHQEIKTNYHTLLDAREKEREDARKSWKSINGIADLKNGYLSQVIHKICLLVEKYDAVIAMEDLNSGFKHTRAHVEKSVYQQFEKALTEKLNFLTFKDKKIEEAGGLRHAYQLTDKIESYKDMKEQNGIIFYIPAWNTSKIDPSTGFVDLLKPKYSNAGSAVEFFGKFNYIGYDRSKDMFAFTFDHADFGKTIDYKNKWTVYSYGDRIETFRTEANKFDCRTVRPTDLFKQAFTDAGIAYADGHNLVEEICAIGDAKTYVALYKALKFTLQMRNSNSKTGEDYIISPVLNKEGEFFDSRKYSGRDSSMPVDADANGAYHIAKKCLWAIDKIKSATEGEYLKTSISIKNQEWLQYMQSDR

SEQ ID NO: 37 - protein, 761 aa, unidentified
  REGION 1..761: note = Cas Enzyme sequence
LRRICLTDQQRRPEEHGDAALFDWLGDPDRWALWDGREAPDPEDRGARGWDRVSTRADYSRRMRDLRGIGFAYPDPLAHPLGVKYADGGGTNALPWRGLRVDGTPRITMAFLHADADGGRCDMRDATLPCGMNRRLSTASDGTVLFEGQRAAMQQATLHLDRPILDRALHNAPAGVRALLDPKGAGPEAIEGIVRYLLPRYRDRLGRRPVHLHLALALPVPPRTSKDFLPLTKQHVVFNPKKGDVPFLPRHVLPKTLDVLAAAGLRILGVNLGMRVAAGTQAIRLGRADEIGPLPRRPILGRTDLAAILERRRAIRLDGEDGGRPDPYVVAGRELLSFARRMLARQSAVAKAIRDGSTQTDDDLLPEAPDGGEIAARLSEAPARAADPVRSAIAAVALARGTVGSALTAESLMALLRAYDALAVALHRLIRWYFAFPGSAGDDDERKPGRRGPSTARIVLLEARVAYERKHATRARPDLHPRRLSEGQRFMPDLQDRISRIKRDRCRKIADKIVKEALGGERDARDAPCHVIAMEDMNAYKAWAGRSRRENRRLMEWCHREILTLVVRKAQLHGITVAAVPSGHVSQFDGIDGSPGLRVERLTAAVAASRAWALVCEDRPELRAAQPGDLVPRDDGMEFVSLRGHEQADINAGGNVAFRFVSPPSALGPFRLGLTRQPDGTWAARSAGTLKGTRFKRQDDEATFVPIDGSSGSDFGSGRHTATIFRDPSGRVRGGAWTAAKAFWDEVRAKIVPMLLSERAA

SEQ ID NO: 38 - protein, 763 aa, unidentified
  REGION 1..763: note = Cas Enzyme sequence
DRFAGYFQDFFVNRRVFADTVRGSCAYRIVEDNFPRHFENCRKYQIIRRDNPELILELKRSMEGYLETDPDVLFSIGHFGKLLRQKDIDAYNRVVGSVFRSESDNCRGFNPILNEFHQKNPDSPKMLMQKLQKQILSEPDSGSFRLRNYENEGQMFEDLQNLWTGIETNRLLEIPASVLEEGEFDRTGVFISKAGVNTLSSWMFSDWERIGGLLQIFKFNEMGDSASKSRKKIDKWLDSDSFSLDVLDRAVANETDIGIVPFLNRRLIDAAEQAREAYLGLEGCASMRKGQYQGRVKTFVDSLLRYRDVLKLFSYDPDLPLDRRFYDTFQFVYEEMASAYRTYNRCRSFITKKEYNTEKFKMNFDCPHLADGWDLNKESSYNSFLFRRDGLYYLGIRNPAWKYEDFSVKADPECDDFYEKAVYKQLQDPVKMLPKVFFSKKGLDKYKPSERILKGYESGLHKQGDSFDLGFCHDLIDFYKNAISQNRDWDFFDFRFRETSEYCSISEFYQDVESQGYRMRFVRIPAPTIDEMVNEGRLLLFQMYNKDYSRDKTPGGKPNLHTMYWEAAMSEDNLRDVRIKINGYAELFWRDASIKDGTVHRKGSVLVNRIGKDGKPIPSDAYYDLCRYCNGIRDDPGAGKGYEDQIVCKNSRYDIEKDRRYCHDRMFLHIPLTFNFKSDGKTDVNRKVLEWIRENEDIKFLGIDRGERNLIYLSLVDSDGRILWQRSMNTIVQKDGRGNTRALDYHEKLAVREEERRNAQQSW

SEQ ID NO: 39 - protein, 763 aa, unidentified
  REGION 1..763: note = Cas Enzyme sequence
LDAIKSLQHYVKPLLGDGTESEKDEKFYGEFVALWEDLDKITPLYNMVRNYMTRKPYSTEKIKLNFENSTLMDGWDLNKEQANTTVILRKDGLYYLAIMNKKHNRVFDVKNMPESGDCYEKMEYKLLPGANKMLPKVFFSKSRINEFAPSEQLMANYRNETHKKGASFNIHDCHALIDYFKSSINKHEDWSRFGFHFSDTNTYEDLSGFYREVEQQGYKISFRNVSVDYIHSLVEEGKIYLFQIYNKDFSPYSKGTPNLHTLYWNMMFDERNLADVVYKLNGQAEVFFRKSSITCERPTHPANQAIDNKNTLNMKKQSVFTYDLIKDRRYTVDKFQFHVPITMNFKSTGNDNINQSVNEYIQKCDDLHIIGIDRGERHLLYLTVIDMKGQIKEQYSLNEIVNTYKGNEYRTNYHELLSKREDERMKARQSWQTIENIKELKEGYLSQVIHKISELMVKYNAIVVLEDLNMGFMRGRQKVEASVYQKFEKMLIDKLNYLADKKKNPEEEGGILNAYQLTNKFTSFQKMGKQSGFLFYTQAWNTSKIDPVTGFVNLFDTRYETREKTKVFFCKFDFIRYNRDKDWFEFAFDYNKFTTKAEGTRTQWTLCTCGNRMETFRDEKQNSQWTSQECDLTDKFKEFFAKYGIDIHTNLKEAIAQQDSADFFKGLLYLLKLTLQMRNSKTGTDIDYMQSPVADANGNFYNSELCDNSLPKNADANGAYNIARKGLWIVRQIKASDDLRNLRLAISNKEWLQFAQNKPYLND

SEQ ID NO: 40 - protein, 764 aa, unidentified
  REGION 1..764: note = Cas Enzyme sequence
KWKLNFQNPTLAAGWDKNQESDNSAVILRKDGRYYLGLMRKGHTHLFVEKYQSQVSEDSSQGQYEKMVYKYIKDIVTGIPKSSTQMKEVVEHFKESSDDYILEKGPSIGKFVTPLIITEEVFNLNNKIFLKTNLNRAVLRGEILKKEEKNHIKLFQKDFVKLGGDPTLYKKSLLIWIDFCKKFLESYPSCTFFDYSRLKESIQYESLDEFYEEINSLSYVISFDKISQEYIEKQNAEGNLYLFEIYNQDFAIGKTGKKNLHTMYWEGLFSVENTNGFPLKLNGEAEIFYRPKSIEAEREKRCKSKRDIIKNKRYTEDKIFFHCPITLNRGKGEAKYFNQEINDVLANNENINIIGVDRGEKHLAYYSVINQKQEILESGSLNSVGGKNLNGEIVSVDYAEKLERKANEREQARRDWQSVEGIKDLKKGYVSQVVRKLADLAIQYNAIIVLEDLNMRFKQIRGGIEKSIYQKLEKALIDKLSFLVEKGEIDPKKAGHLLNAYQLTAPFESFQKMGKQTGILFYTQASYTSKIDPLSGWRPNLYLKHSNAKKDQAIISQFSSILYNTEKNRFEFTYDVKKFQTLKEWPKNTVWTICSSVERFRWNRTLNQHKGGYDHYTDMTEQFDILFKSYKIDIRSDIRVQIMNLEAKGNEKFFADFIFFFNLVCQIRNTDPLKEKDDPLGDFILSPVAPFFDSRKAEDFGKNLPKNGDDNGAYNIARKGIIILDKISAFKEKEGSCKDLKWGDLYVSQSEWDTFAQMRRETKK

SEQ ID NO: 41 - protein, 764 aa, unidentified
  REGION 1..764: note = Cas Enzyme sequence
MKEQFINRYPLTKTLRFSLIPVGETENNFNKNLLLKKDKQRAENYEKVKGYINRFHKEYIESVLSKARIEKVNEYANLYWKSNKDDSDIKAMESLEIDMRKQISKQLTSTEIYKKRLFGKELICEDLPSFLTDKDERETVECFRSFTTYFNGFHTNRKNMYSSDEKSTAIAYRCINDNLPRFLDNVKSFQKVFDNLSDETITKLNTDLYNIFGRNIEDIFSVDYFEFVLAQSGIDVYNSMIGGYTCSDKKKIQGLNECINLYNQQVAKNEKSKRLPLMKPLYKQILSEKDSVSFIPKEKFNSDNEVLHAIEDYYTGHIGDFDLLTELLQSLNTYNANGIFVKSGVAIADISNGAFNSWNVLRSAWNEKYEALHPVTSKTKIDKYIEKRDKVYKAIKSFSLFELQSLGNENGNEITDWYISSINECNSKIKEAYLQAQELLKSDYEKSYNKRLYKNEKATESVKNLLDAIKEFQKLIKPLNGTGKEENKDELFYGKFTSHYDSIADIDRLYDKVRNYITQKPYSKDKIKLNFDNPTFLKGWALGNEFANSAQLLRDGDNYYLAIMDKELKNNIPKKYNSPTNEEDMLQKIIYQQAANPANDIPNLLVIDGVTVKKNGRKEKTGIHAGENIILENLRNTYLPDNINRIRKEKTFSTSSENFSKDDLCEYIQYYICRVQEYYSSYNFAFKNASEYKNFPEFSDDVNSQAYQISYDNISKKQIMELVENGYIYLFQIYNKDFSKYSKGTPNLHTLYFKCFLTRETYQM

SEQ ID NO: 42 - protein, 768 aa, unidentified
  REGION 1..768: note = Cas Enzyme sequence
LYDILDDVVPLYNQVRNYITSKPSEEKKLKLMFDSPTLAEGWSTTKEKDYKCLLFEREGLYYLGIINSSSKESKKIDFSKLSCGEDKCSYKKMVYRQIQSAANYFSIKQIKPQNPPSYILKWLSSGFDKKTLSRQQLTKLISYVIDDFIPNYKMLNDENGSPYYSFSFKEASQYESWKEFTDHIDSMCLYSIGFENIPVQIIDSLVERGVLYLFKLNNKDFSRSSVGRENLHTIYWRMVFAEDNLNDVVFKLNGGAELFYRRASIKNPYIHKLGKKLVNRIDRDGKRIPDVAFGQLVKFADGEIAIDELSGVAKDLYSAGKVVMKDVKHEIIKDRRFAEDKFFFHVPITINAKANKKASRFNDFVNDAVRNFEDVNIIGIDRGERHLLYVTVIDSKGKILEQRSFNTIDIDRYDGKRIDVDYHAKLDQMEKDRDKARKSWSEIGKIKDLKSGYLSMVVHEIAKLMVKYNAIVVLEDLNGGFKRGRSAIEKQVYQKFEKAMIDKLNYLVFKDSEPLSLGGALRGYQLADKFESFEKLGKQTGFIYYVPAAYTSKIDPTTGFTNIFDFKKCTSAEGIKRFFNLFDSIKYSETDKAFIFAFDYNKFDTRFPSWNSKWEVYSASRRLAYSKDQKVDVEINPTNAIIEALTKRCVAIKDGFDLGLYMKELDATRENAGLFKSVFYAFERTLQMRNSSAKTGEDYIESPVKNSSGGFFDSRKCVNELPENADANGAYHIALKGLLMVNELKTNETPKLTIKNEDWLEFVQRRHV

SEQ ID NO: 43 - protein, 770 aa, unidentified
  REGION 1..770: note = Cas Enzyme sequence
MVLGKKNDRAELRQALWTTHREVNHAVAKIEKMLLLCRGREYQTISLDGEEVEVTRIDVEKQAIQMAREAQELNHMGGAGRDEDVLKALRQFYEMVVPSCRLDKKGDPEKGNAQASNTWVGPLMDRESRGGMSVYDKVLDPPPHWIEMMTTSVGDWENHSLVWLETDQAKTLQSMTGSPPAWVRRLRSKRPWQEAFVKDQEKKREEMEKGNALLVKSMKELGLLPLINPSIRERLDPEGQGVKPWDRLAMRLAVAHLISWESWNHNTIKEHDQAKQKYDQLCEKYESHGEQFQKLREYEQERHRELKQVAFADDDRPFKIGVRAIRSWDLVREEWIKGGVNYEARKDVLKRLQTKLRSKSSGDPHLFLWLADNGRENLWMEADILTPLVKLNVASRILEKRKPYSLMTFAHARIHPRWAMFEAPGGSNLRNYKIEKLGSNLSVRMQLLQETGNGGLSEKEFSIRLGPSDQLSSLELLGDGKETQLRFRSAHQDFEGVPGGAEILFDRHYMEHPERTDDSIAKGTLGPVWLKLTLDVKSQAPSEWLDDNGRIATPVEVHHFNTALSNKSKHSDKLKPGLRVLSVDLGIRSFAPCSVFELVKGKPDDGLCFPTEDGRATDDPEKLWARHERSFKICLPGERPSKKEKISRKTAMNEIRSIKRDIWRLKDVLRLGIIKQDQEIGRSINDIIESFVEDQPSTSVFNRDILNEVNDPKFRSTPDLWQQHCQEIHDRAEKLVSRRFSEWRSRTRPKSASWEDWSKRRSYHGGKSIW

SEQ ID NO: 44 - protein, 772 aa, unidentified
  REGION 1..772: note = Cas Enzyme sequence
IPSGVDQGLVVVSTDVRTGKSKSSSAPPLPPGSRLWPADAVHGDPPLRILSVDLGHRHSAYAVWELGLQQKSWRAGVLKGSTQTPVYADCTGTGLLCLPGDGEDTPAEEESLRLRSRQIRRRLNLQNSILRVSRLLSLDKFEKTIFEQSDVRDRPNKKGLRIRRRCRTEKTPLSEAEVRKNCDKAAEILIRWADTDAMAKSLAATGNADISFWKYMAVKNPPLSAVVDVAPSTIVPDDGPDRETLKKKRQEEEEKFASSIYENRVKLAGALCSGYDADHRRPATGGLWHDLDRTLIREISYGDRGQKGNPRKLNNEGILRLLRRPPRARPDWREFHRTLNDANRIPKGRTLRGGLSMGRLNFLKEVGDFVKKWSCRPRWPGDRRHIPPGQLFDRQDAEHLEHLRDDRIKRLAHLIVAQALGFEPDIRRGLWKYVDGSTGEILWQHPETRRFFAEGAAGELREVSRPAEIDDDAAARPHTVSAPAHIVVFENLIRYRFQSDRPKTENAGLMQWAHRQIVHFTKQVASLYGLKVAMVYAAFSSKFCSRCGSPGARVSRFDPAWRNQEWFKRRTSNPRSKVDHSLKRASEDPTADETRPWVLIEGGKEFVCANAKCSAHDEPLNADENAAANIGLRFLRGVEDFRTKVNPAGALKGKLRFETGIHSFRPPVSGSPFWSPMAEPAQKKKIGAAAPGADVDEAGDADESGVVVLFRDPSGAFRNKQYWYEGKIFWSNVMMAVEAKIAGASVGAKPVAASWGQAQPQSGPGLAKPGGD

SEQ ID NO: 45 - protein, 773 aa, unidentified
  REGION 1..773: note = Cas Enzyme sequence
DGRSVKCNDPDKATIQRLLDGLINIRRTLKNFDVVDEIVDKDDAFYGEFFKLYNCLSDINNLYNKVRNYVTGKQYLDDTILLNFGCASDFLGGWSNSIADKKRGIFLKKNDDIFLCVLNNNRKWIQDLPTSETDDTYSLMYIQTIGPVEKQIPRLLHVNKDNFDKNTIADIVCNYDVWSVYNFDREVLSNLDSYEELKDYIESAGTIRKYIKIDSSFIDSLVEDGDMFMFRLYCKDFSPYSKGTPNLHTMYVKEMFSDENIQNEIFGLGGKAQLRFRFSSLRKEDTPVHEANKPIKNKNPLNDKKYSCFNYDIVKDRRYLKNKIEFHLPIKINSKKGNAPKKVKDFNYDFNLNLRDAAKDNNINIIGIDRGEKNLIYVCVMDMHGNIIEQRSYNIIETVDKNNNIHRTDYNYLLTEQDKANCEAKKSWGTIHSSDKIKNGYISQVVHEIVLLQDKYNAVIGLEKLNGDFIRKRQKIEKSIYAKFENALIDKLSYCVDKKKEYDENGGLRKGYQLTIPFNKEDMDKIYQAGAIFFVNPGYTSKIDPTTGFVNLLNTKYKNINTSKEFISKLNRFWFDTKTKMYAFDLDYNNYTGRAGNSRAKWIVYTNGDRISYSKDHNNHTVKTVINLTEAFDSLFLKYGITKNAADMRGLILETKSATFYEEFMKLMYLTVSLRISDPSLGIDKIVSPVMNDDGSFFETNMDGNNIPSDGDANGAFNIGRKTIIAINKILECDERELKDIKLAISNEEWFLYANSNPLRTSGVNDLIETIGA

SEQ ID NO: 46 - protein, 773 aa, unidentified
  REGION 1..773: note = Cas Enzyme sequence
MILMEIAGTEQTRLRGRFGDPAVFEWLAASPNQHVWRSDPDTVSILASLNGMEALVARSKATAAMTFPDPVAHPRAVQWASVGDGNLRAWRISVNERGECFARLRLLAPRDGDDRLLDQERTLKLAHSKQFTAPVFSMRARKAFVAFKAAGVDSLSGVIGSADLLFDRHHLEARTVEALAAGDIGPVSLKLSLDLDPIPRAGWSGDAAKFAWHFRRAAGKKSGHESRVSPGNRVLSVDLGMGTFAACSVFSLSDSLPVSGHIALPIAVGERSFWAVHERSFHLTLQDESADDEGLLWRREQDERLRRLWRALSRYRGMRQLARLAEDERGLVLTDRRARLVDGDPFPFEADLLAELQTKVGLPDPIWSGCVEAALVEFEIKMGSLIKAWRRKGRARASDRHSGSSMWAIQHLWDIRRFLLGWSLMGRRGGGVRRQDSAARGEYASQLLGHIDALKENRLKAGADMIVQAARGYQRDRAGRWRHAHPACDVVLFEDLSRYRTMADRPRRENSRLMLWAHRAMPAEVAMQGELYGLATAKTGAAFSSRYHARTMAPGIRCHAVTRRDFGNAYFRERLVADGIAISKLHPGDLVTWDGGETLVCPRAGGGVSRIDADINAAQNLQRRFWTHHGEAFRIACVADEIAGQQVFVPRGLGPRLLGAMGGHGVLAPLGGSSPACAWRAMKRGELRKLALPEIEEVDGDTGGNAEDEELSGLAEEALRLSGRIEVFFRDPSGVVFPSDRWYPQRVFWSGVRTRVIEGLAETRSAATVARPV

SEQ ID NO: 47 - protein, 774 aa, unidentified
  REGION 1..774: note = Cas Enzyme sequence
MVGNKISNSFDSFTGINALSKTLRNELIPSDYTKRHIAESDFIAADTNKNEDQYVAKEMMDDYYRDFISKVLDNLHDIEWKNLFELMHKAKIDKSDATSKELIKIQDMLRKKIGKKFSQDPEYKVMLSAGMITKILPKYILEKYENDREDRLEAIKRFYGFTVYFKEFWASRQNVFSDKAIASSISYRIIHENAKIYMDNLDAYNRIKQIACEEIEKIEEEAYVFLQGDQLDVVYTEEAYGRFISQSGIDLYNNICGVINAHMNLYCQSKKCSRSKFKMQKLHKQILCKAETGFEIPLGFQDDVQVINAINSFNALIKEKNIISRLRTIGKSISLYDVNKIYISSKAFENVSVYIDHKWDVIASSLYKYFSEIVKGNKDNREEKIQKEIKKVKSCSLGDLQRLVNSYYKIDSTCLEHEVTEFVTKIIDEIDNFQITDFKFNDKISLIQNEQIVMDIKTYLDKYMSIYHWMKSFVIDELVDKDMEFYSELDELNEDMSEIVNLYNKVRNYVTQKPYSQEKIKLNFGSPTLADGWSKSKEFDNNAIILIRDEKIYLAIFNPRNKPAKTVISGHDVCNSETDYKKMNYYLLPGASKTLPHVFIKSRLWNESHGIPDEILRGYELGKHLKSSVNFDVEFCWKLIDYYKECISCYPNYKAYNFKFADTESYNDISEFYREVECQGYKIDWTYISSEDVEQLDRDGQIYLFQIYNKDFAPNSKGMDNLHTKYLKNIFSEDNLKNIVIKLNGEAELFYRKSSVKKKVEHKKGTILVNKTYK

SEQ ID NO: 48 - protein, 775 aa, unidentified
  REGION 1..775: note = Cas Enzyme sequence
KQMNFAQFNYSASEPRAETSLRWPSDIQFAKEAGMPRKSEPVPWHEKLNDFRCAATDLGQRDAGAFARVLVRSNGDFGKRPSRVVGATGSKQWRAVLERSGLFRLPGEDAQVWREKSQLDENDPDDSGKPFDFREELWGERGRPARGWEADDTAGLMRALEAFEMDAEGKEKLTLLPDDWRDALSFPEQNDKLLVAMRRYQSRAARLHRWCWFLKGDDKQQDTAREEIRDCDDTRVVTPELKTLVEKRDPRARAALESQLTRCLKVAPDLLVRIANRILPLRGRSWRWEKHPAATDENALHHLTQKGPSLDSKDKPVWLRGQRGLSLERIEQIEGLRKRLQSFNQAERRHFAYEKARRVDWTDEQARKWILSEFPDPCPDLLDKLDNLKEQRVNQTAHLILAEALGLQLAPPPADKKALRQEKDQHGVYEKILDKNGQWIGPVDFIVIEDLKAYRTSQGRGRRENWRLMRWCIGHMRDKLKQLCEVFGLPVLETPPADSSKFCSRSGVPGFRAEEVTSGFTKREWAWLAGKKDEQGKPKPEAQRLLDLDRELTEAQAELERDWKEKKQLQPCPKRTLLVSTRGGPMFVPVVGEVAGADLPPAVVQADINAAINLALRAIADPRLWAIHPRLRSQREGGDKPAKGKKAKAKQDAATPTPEARLLTREKRKYGEAGKPLVIQRSADAKPDDTRQPNYFADFAGLKSIAETLAKKNRELTWLTKDWTSAEISGESGVPPLVHGKSFWGCVKAAQWERVRAINEARLAEWKGKLNRMPD

SEQ ID NO: 49 - protein, 777 aa, unidentified
  REGION 1..777: note = Cas Enzyme sequence
PSSKEKFRLNFDKPTLADGWSESKVPDNFSVLLRKDDLFYLGILKDRKAYRVLSYENCDETAKNIKGYYERMIYHFSPDAYRMIPKCSTARKDVKKHFGEQGETTGYTLYPGASNFVKPFTIPYEIYRLQTELVNDKKRYQADYLKQTEDEEGYRQAVTAWIDFCKSYLESYEGTSTFDYSHLLKSEDYEDVNQFYADVDRASYSIYFEKVSVDLIHTMVDRGDLYLFQLYNKDFSPHSTGKPNLHTMYWRALFSNDNLQNNTIKLNGQAELFYRPKQVEQPTVHLQGSYLLNRFDKHGDVIPAGLYCEIYNHINERHPEGYTLSEEATQGLLDGRFVYREAPFELVKDKRYTEDQLFLHVPLEFNWTASANVPFENLANEYIKKDSDLHIIGIDRGERNLLYYSVINLQGDIVKQGSLNTLIQQTTLKGETVERQIPYQSMLKQREDERAEARQNWQSIDRIKDLKEGYLSHVIYKLSRLIIKYHAIVVMENLNVGFKRGRFKVERQVYQKFEVALINKLNALSFKEYEPNELGGVMRPWQLARRVVSPEDTRSQNGIVFYVPASYTSIVDPVTGFANLFYLNRIRNKDLNSFYGHFQEIRYDHEFDRFIFRFNYADFGVFCRIKNVPSRTWNLVSGERKAFNPKRRMIEKRDTTDEIKKALEAHGIAYQNEQNLLPLLLENENLLARIHRSFRLVLQLRNSDSDRDDIVSPALDKENNTFDSGQQPYESSLPINADANGAYNIARKGLLLVDKVKNDKRAVLSNREWFEYLMAEE

SEQ ID NO: 50 - protein, 779 aa, unidentified
  REGION 1..779: note = Cas Enzyme sequence
LLDAVKSAQRFFRLLCGSGNEPDKDHSFYDEYTPAFEALENSINPLYNKVRSFVTKKDFSTDKFKLNFDSSSFLSGWATKSEYEKSSAFIFIRDNQYYLGINRCLSKEDIAYLEDSTSSSDAKRAVYLFQKVDAKNIPRIFIRSKGSNLAPAVNEFQLPIETILDIYDNKFFTTSYQKKDRTKWKESLTKLIDYYKLGFSQHKSYADFDLKWKASSEYNDINDFLADVQKSCYRIEFININWDKLIEFTEDGKFYLFRIANKDLSGNSTGLPNLHTIYWKMLFDESNLKDIVYKMSGNAEVFMRYNSLKNPIVHKAGVEIKNKCPFTEKKTSIFDYDIIKDRRYTKDQLELHVPILMNFKSPSAAKGNVFNKECLEYIKNNGIKHIIGIDRGERNLLYMVITDLDGNIVEQKSLNQIASNPKLPLFRQDYNKLLKTKADANAQARRDWETINTVKEIKFGFLSQIVHEIAMSIIKYDAIVVLENLNRGFMQKRGLENNVYQKFEQMLLDKLSYYVDKTKHPEEAGGALHAYQLSDTYANFNSLSKNAMVRQSGFVFYIPAWLTSKIDPVTGFASFLKFHRDDSMATIKSTISKFDCFKYDKECDMFHIRIDYNKFSTSCSGGQRKWDLFTFGDRILAERNTMQNSRYVYQTVNLTSEFKNLFATKDIDFSGNLKDSICKIEDVGFFRKLSQLLSLTLQLRNSNAETGEDFLISPVADKDGNFFDSRNCPDSLPKDADANGAYNIARKGLMLVEQLKRCKDVSKFKPAIKNEDWLDYVQR

SEQ ID NO: 51 - protein, 780 aa, unidentified
  REGION 1..780: note = Cas Enzyme sequence
VLSVDLGHRYAAACAVWEALGTAEFKREVAGRAVAAGGAGKHDLVLHTRHTDQRTGKERTAIYRRIGPDTLADGSAHPAPWARLDRQFLIKLQGEEQPARAAASKPEHGINEVSLVAELATTLGLIRDEDAGVGRGVDELMRRAMRIATLGLKRHGRRAKIAYALHPECPGIPGMGGSLNPIHRGDEHHVRFLTNALADWHALATDADWDGSAARALWNKHIEALPGGFEVHVPATPDPSSESPMRQQRRKAADELREQRIKPIAEHLARSPASTTKAMHLEWAAQWAGDDGEQRTRDDFEHTLLRDGTGSVVGSRTSPKKGKETGGGWHARLRLLTDWIMGRHLPGAESDRWSRKVGGLSLTRIATMRSLYQLHKAFDMRPRPQRVQGAPKFGESNTGIAQGVLNAMERMREQRVKQIASRIAAAALGLGGHWKTVERRDARGLVLLGDDGKPRMKSVWVEEPSPRYAACHAVVIESLRNYRPDELQTRRENRALMNWSSGKVRKYLEEACQLHGLHLREVMPNYTSRQCSRTGLPGMRCEDVPVDPATGAVKAYWWGKALAGAQKKREDGSKDAEAHFLVELAEHLTSLKKEGKRLPPTVRVPRKGGDLFVAAPPRSGEPAAERRATQADLNAAANIGLRALLDPDFAGRWWYVPCIEDKGAGTAVPRADKVRGSACFGPDPAKPERFGSLAPPRAADEAATPVRRGKLRGQRSEASGMDTTNFWTDPSASALRPASTGFWLATPAYWLWVRKRVVNGPLRVWNGLAAGPLDPDAHAW

SEQ ID NO: 52 - protein, 781 aa, unidentified
  REGION 1..781: note = Cas Enzyme sequence
MDIMHFVKPLSLKDTDKEKDEIFYSLFTPLYDQLTQTISLYNKVRNYLTQKPYNTEKIKLNFENPNLLGGWPVDREIATSGDIFENNCRYYLGILDKKDKRYFKNLPLPKDKNDVFLKMNYLQAADPSKDVQNLMVINGKTVKKNGRKEKEGEFAGENLKLEKLKNEYLPEDINIIRKARSYSKQSSTFSKNDLIKYIDFYKQRTIEYFKAYNFIFKKSSEYTDFGEFTEHINQQAYQIKFTEISKSFIDSVVSEGKLYLFWIYNKDFSPYSKGKPNLHTLYWKMLFDEQNLKDVVYKLNGEAEVFYRKKSILEKNNVIHKANENLTNKNPDNPKAISKFNYDIVKDKRYTLDKFQFHVPVTMNFKADGIFNMNQKVNTFLKDKLDVNIIGIDRGERHLLYYTLINQKGEILKQDTLNIIANEKQKVDYHTLLDKKEGDRAAARKEWGVIETIKELKEGYLSQVIHKLTDLMIANNAIIVMEDLNSGFKRGRQKVEKQVYQKFEKKLIDKLNYYVDKRKPAKEPGGLLNALQLTEAYDDFMKYNKKQCGFLFYVPAYYTSKICPATGFADLLYPHYETVDKSQKFFRKFESICYNRQMNYFEFRIKDYDAFNPKAEDTKQDWTICTCGLRLETYRNPEKNSNWDTREVNLTQELQNIFQKQGIQFNEGKCIKEDICQQSDSQFFKGLIKLLKLTLQIRNSRVNSDEDWIISPVINRDQIFDSRKADKSMPQNADANGAYHIALKGLWCLQQIRETDDLKKVKLAISNKEWLQFVQDRPFAK

SEQ ID NO: 53 - protein, 781 aa, unidentified
  REGION 1..781: note = Cas Enzyme sequence
LRPQGPWHSYAPTQGLQSDPKYWPHSEINKKRKGQAKLILSRLPGLRILSVDLGHRFAAACAVWETMSSEAIQEACRLANHQLPAPADLYLHLKRTVQKNLIDGEKTVEESTVYRRIGADRLPDGTAHPAPWARLDRQFLIKLQGEEKVREASNEEVWQVHLMESALGLSFPLIDRLVYAGWGGTEKQAARLEALREKGWKPTGTPADQDEEGGGYKPSLAVDELMFSAVRTLRLALKYHGDRARIAFALTADYKPMPGDTRYYFSEAKDRSSGADAAEREAKHKDYLLDMLLLWHDLAFSRKWRDEEAKELWNLHIAALPGYQAPAAPIQEEAGQGRKKAREEARAKMTPAAEALLADGTLREKLHGLWKERWEKDDAQWKKHLRWMKDGILPRGGRAATPSIRYVGGLSLTRLATLTEFRRKVQVGFYTRLFPSGEKREIKEAFGQTALDALERLREQRVKQLASRIAEAALGAGRVSRTALKQDPKRPEARVDAACHAVIIENLEHYRPEETRTRRENRGLMNWASSKVKKYLSEACQLHGLFLREVPAGYTSRQDSRTGAPGMRCQDVTVKTFLNSPFWQKQCVQAQKNKSTARDRFLCALKEAVAQGGMEEEKKMGPIRVPVPGGEVFVSADAASPAAKGLQADLNAAANIGLRALLDPDWPGKWWYVPCDRKTAYPAKEKVEGSAAVDVKQALPFVLPEEKENKGKTKGGKKGKGEVMNLWRDVSAEPLMTGQWLDYTAYRKEVENRVIQVLTAQLKARNPLRFGNLGDEEEIPY

SEQ ID NO: 54 - protein, 783 aa, unidentified
  REGION 1..783: note = Cas Enzyme sequence
MHKCNVLVVSEEYDLDKDFYNNFFPLFTELENIVFVYNRVRNFLTKKPSDVKKFKLNFGVPTLCDGWDLNKEKDNKAILLFKDNRSYLGIMNPEDYPKIKESNDSGDGYFSKMVYKLLPGPNKMLPKVFFSKKGRETFSPSDRIIDIYESGAFKKGSSNFSIVCLHELIDFYKDAINRHEDWSKYNFKFSPTDSYKDIGAFYNEISKQAYKIRFTNISEQEINQLVDKGQLYLFQLYNKDYASGAHGRKNLHTLYWENLFKEENLNNLVLKLNGQAELFYRPQSINEPVAHKVGSIMLNRRDKSGMPIPETVYRSLYLYFNGKKKEEELDSVEKSYIDNVIVKKVTHEIVKDKRFTKPEFFFHVPITFNSNADGNEFINENVIEYITDNPDVNIIGIDRGERHLIYLTLINQQGEILKQKTFNTVGTYNYHAKLEQREQERQEARKSWQSIGKIKDLKEGFLSAVIHEIALMMAEYNAIVVLEDLNFGFKRGRFKVERQVYQKFEKMLIDKLNYLAFKDRKSDETGGILRGYQFAQKFVSFQRLGKQSGFLFYVPAAYTSKIDPVTGFVNHFNFNDITNAEKRKQFFCKMERIEMKNDNIEFEFDYRKFKTYQTDFQNVWTASTFGKRIVMKTDESGRKQMADYYPTNEILAAFKKYGYELTNGTDIKSLLQDIEADQKSASLFSNLFYAFQKTLQMRNSNHATEEDYILSPIAKHGYHFCSTEEANKGKDEFGNWLSKLPVDADANGAYHIALKGLYLLKNPQTKKIEHEKWFKFMVEKPYK

SEQ ID NO: 55 - protein, 784 aa, unidentified
  REGION 1..784: note = Cas Enzyme sequence
  VARIANT 381: note = X can be any amino acid
  VARIANT 547: note = X can be any amino acid
  VARIANT 609: note = X can be any amino acid
  VARIANT 648: note = X can be any amino acid
LQNKETELRKNIVTLFNKMAKTWSQKETFKGLKNNNIEILFEEAVFKSVLKVLYGDEDESFLRDKVSGEFLLDKDGNKISVFDSWKGFTGYFTKFNETRKNFYKDDGTATAHATRIIDQNLKRFCENIIIFESIKGKLDLSEVENVFDISLVDIFSVTNYGDCFLQAGIDSYNTVLGGETLPNGEKKKGLNELINLYKQQTREKLPFFKSLDKQILSEKDKFTDEIEDAGALKEVLTVFLKNVDVKIQKFSLLITDVLNNPDAYDLSQIYLAKEALNTISRRWLVSFSTFEDALYTVLKNAKIISSSAKKTEGGYSFPEFIPLSYLKEALEKMVEDKIWKEQFYVTVEGLKNNGVIIGNKPVWQQFWEIYRFEFEQLKSRXEIDSQIGTTHPAGYSVSKTALETILKDFKEDDVAPKLAIKNLADDVLHIYQLAKYFAIEKKIEKKRRWEGDNFELDVFYTNPDFGYFETFYKNAYEDIVQVYNKLRNYLTKKPYSQEKWKLNFDNPTLAAGWDKNKEADNSAVLLKKDGKYYLGLMEKSHNRIFDXKHEALFLDNNQSENYEKVVYKFFPDQAKMFPKVCFSVKGLDFFKPSEEIYKIYKNAEFKKGXTFSIKSMQSLIKFYIDCLQKYDGWKGYNFKHIKSSNQYXNNIGDFFRDVAEDGYKITYQDVSDSYIKEKNNNGELYLFQIKNQDWNLDKAINGIKKTTTKNLHTLYFEALFSKENAEQNFPIKLNGQAEIFYRPKTSQGKLGTKLVNNKEVVNHKRYSEDKIFFHVPLTLNRTKK

SEQ ID NO: 56 - protein, 784 aa, unidentified
  REGION 1..784: note = Cas Enzyme sequence
KSYNKRLSKNGKATELVKNLLDAIKDFQHLVKSLNGTGKEENKDELFYGKLTSYYDSIADIDRLYDKVRNYITQKPYSKDKIKLNFDNPQLLGGWDKNKESDYRTVLLRKDDFYYLAVMDKSHSKAFVDTPNITSEDEDYYEKMEYKLLPGPNKMLPKVFFAAKNIDTFQPSDRILDIRKRESFKKGATFNKSECHEFIDYFKNSIEKHDDWSQFGFEFTPTENYNDISEFYREISDQGYSVSFNKISKSYVDELADNGYIYLFQIYNKDFSKYSKGTPNLHTLYFKMLFDERNLSNVVYKLNGEAEMFYREASINDKEKITHQANQPIKNKNPDNEKKESTFEYDIIKDKRFTKRQFSLHVPITINFKAHGQEFLNYDVRKAVKYKDDNYVIGIDRGERNLIYISVIDSNGKIVEQMSLNEIISDNGHRVDYQKLLNTKEKERDKARKNWTSVENIKELKEGYISQVVHKICELVVKYDAVIAMEDLNFGFKRGRFPVEKQVYQKFENMLISKLNLLIDKKADPTEDGELLRAYQLTNKFDGVNKGKQNGIIFYVPAWDTSKIDPVTGFVNLLKPKYTSVSEAKKLFETIDDIKYNANTDMFEFCIDYGKFPRCNSDYKKTWTVCTNSSRILTCRNKEKNNMWDNKQIVLTDEFKSLFGEFGIDYKGNLKTSILSISNADFYRRLIKLLSLTLQMRNSITGSTLPEDDYLISPVANDRGEFYDSRNYKGTNAALPCDADANGAYNIARKALWAINVLKSTPDDMLNKANLSITNVEWLEYTQK

SEQ ID NO: 57 - protein, 787 aa, unidentified
  REGION 1..787: note = Cas Enzyme sequence
KNGEIILASQNSKNDWRGLAYPFWHSSNEEGRKGMAKHNLSRLAGLRVLSVDLGHRYAAACAVWEAISTDKVRKACRAAGHEPPKASDLYLHLKQKVKKVEKGGQTEVNKTTIYRRIGADKLPNGMPHSAPWARLDRQFLIRLQGEEQGVREASNKEIWEVHQLEAEIGRTAPIIDQLVKGGWGESEKQKKRLKVLRTLGWKPINKDVGDVSSPSLSIDEMMFFAVRTMRLGLKRHADRARIAFAMTAAYNTMPGGRRYYFNEPKELSANDNKAERDNKRVEFIQDALMLWHSLAFSNGWQDDAASQLWDGLIAKLPGYKIPEEIGEEDSGAERRKKMKENRKNLYDVAVALAKDAKLRKALHEAWKKRWEGDDKQWQKRLRWFKDWILPRGKAAQDSAIRKVGGLSLTRLATLTEFRRKVQVGFFTRLKPDGTSEKNKERFGQRTLDALENMREQRVKQLASRIAESALGIGRMKRFRGEKDVKRPRERVDEPCHAIVIENLTQYRPKETRTRRENCLLMTWSSSKVKKYLTESCQLHGIHLREVSASYTSLQDSRTGSPGIRCQDLSVKEFMRSKYWRKQVEQAEKKPAEGKGDSRMRFLCELNKRWKDKRGEWEKAGVIRIPLKGGEIFVSAESKSPAAMGLQADLNAAANIGLRALTDPDWPGKWWYVPCDRASFKPVREKVDGSAAVNPDKQLRQPAHVHSSDIDKIITKRGRKNVGKANGIVNLWRDISSSSLECVKSGEWKEIAAYQNDVQCRVIRNIKEKKKGRDKQPQKGSKEADIPF

SEQ ID NO: 58 - protein, 788 aa, unidentified
  REGION 1..788: note = Cas Enzyme sequence
MNYNETIEYLFKAAPLFQNVGGAAYKEGLSNTHLLDNYFNHPHTKFKTIHVAGTNGKGSCAHTLATILQHKGLRVGLYTSPHLIDFRERIRVNGEMIPKDEVVNFVAEHRHFFEPLHPSFFELTTALAFKYFAEAKVDVAVIEVGLGGRLDCTNIITPVLSIITNISLDHTQFLGDTLAKIANEKAGIIKANVPVIIGEANAETRPVFEAQAKSVGAPITFAEDEMEVIDSYVNAKDSRHYCTRHYGNFDGELMGEAELFYRGVGIKNPVVHSVGSKVVNRTTKDGKTIPEAIHDEIYKYVNRKIPELSQETKKLYENGLVVVKTIQKNHELIKDKHYTQEKFLFHVPITINYKASGNSYINENVRQFLKNNPDVNIIGLDRGERHLIYMSLIDQKGNIIQQKTFNTVERKKNGATVSVDYHEKLDQKEKERDAARKNWQTIGKIAELKEGYLSAVIHELVTLMIEHNAIIVMEDLNSGFKRGRFHVEKQVYQKFEHMLIDKLNYLVFKDIGLKESGGVLNGYQLAGIFESFQKLGKQSGFLFYVPAGYTSKIDPATGFANLLDMTNLTNVQKKRDFFAKFDSICFDEEKQMFAFTFDYKNFNRKDAQEMSRTKWTVYSNGKRIQFCGKGKASKHIENLTEEFKTLFREFDYQNGNNMLDSILEVGAALKAGEKPAKEIADFWDKLLVLFKLVLQIRNSDAKTGDDYIISPVMSEDGIFFDSREQEKLGNNAKLPKDADANGAYHIALKGLYLLKVFDKTPEDQLKKVDMKISNADWFRFAQEKEYSK

SEQ ID NO: 59 - protein, 789 aa, unidentified
  REGION 1..789: note = Cas Enzyme sequence
MATISIKLKAVLDKTTKDKIKNAHILFNNNVRVFEEFLLLAQGKDYYYEDVNGVEQYKTEAEAIEQLETFIKNKNTNANLECCKQALMKLSGVIGEKGSQAAGMMAKLYNKDSSAGTNNNAKIIDPEPDWVKYYDLEAHAFTEDKYRNAANRWIKSKEGEQAIAPVISGSGRPSAFKKAYIEGKEWYEKFIKDQNTYRKDRQDGLANILGVLEREKLLPVINIDKGISEFPVWVKLYLKTALENYSSYLACDYETRKAYEKACEVYEEQKQKIEKSYAEEFRLVSDYLDNNYIEGKHTQYLTERMTRGLSDIFKGWKTCKTEEDRIKVLNSWQSDSAQKNKIGDVNFFRWMAQDVNFKTIDESDIKALLIYYSALRNKEQKRRCASYTVADPVLSKRYLFSEAPKGSNYRKYAIESREGKLFIQIPVLIKDQTGKIKEETLEFNLASNVQFQPPYKESGEQLSDVQFVEEKKEVKVCFSTGRKIWDESINKVVHENYQAKLGGADLRVETNGLGRIADVFVSITLSVDDKCTEDFKVISNNVQRCFGTAYTGTVSKYAGALDGKTLTALSIDLGLKQFGAVTVGSSVYDKTKLLQDFTIERRFMLSLPGEKCSATVTSLRQNAEIEIRSLRTGINYLSMLKRIFNIDNMEGRQKLLRQNLEYTKDLDKRAILETCLNKDSIPAMNQILSGEYSTCIRDLNEKMKEFRASDHTQKNSRNYRPGKSFWAIGYLESIRKLLMAWNSLSYRIEDENKTQSKKYGIIATRLLNHINHLKDDRIKTAADMLVQAA

SEQ ID NO: 60 - protein, 790 aa, unidentified
  REGION 1..790: note = Cas Enzyme sequence
DSIMEFLHRCEVLVVSVDNDLDNDFYNKFLPLYAELENVILLYNRVRNFITKKPSDIKKIKLNFDRPTLGDGWGLANEKKNKAILLFKDGLSYLGIMNVKGTLNFADARTDGEPTYKKMVCKNLSKPFMDFPHTFFSQKGKDTFLPSDNVLAIYTSGSFKKDSPSYTAENLYELINFYKEAINKHEEWREFGFVFSPTESYTDIGAFYNEVAKQAYKISFVEVSEQKVNDWVEKGELYLFKLHNKDYAEGAHGRKNLHTLYWENLFSSENLSNFVLKLNGQAELFYRPQSIKKSVVHKIGSKMVNRRDISGMPIPESVYRNLYLYFNGKKQEAELTEVEKSYLNQVVVKEVSHDITKDRRYTQPEFFFHVPISFNQNADGNEFINTKVLDYINNNPDVNIIGIDRGERHLIYLTLINQRGDILKQKTFNMVANFNYHAKLEQREQERDQARKSWKSVGKIKELKEGFLSAVIHEIAKMMIDNNAIVVLEDLNFGFKRGRFKVERQVYQKFEKMLIDKLNYLAFKDCRVMDDGGILRGYQLSQKFTSFQKLGKQSGFLFYIPAAYTSKIDPTSGFVNLFNFNDITNVEKRKDFFMRMNRIEMKSGEVEFEFDYRKFKTFQTDYQNVWTINTYGKRIVMQLDEMGHKKMEDFYPTCHIINAFKKKGITISDGIDIKAILSAIEANAANASFYSALFYAFQKTLQMRNSNAITEEDYILSPVAVDGRHFFSIDEANKGRDASGNWISNLPVDADANGAYHIALKGLYLLMNPLTKKIENKKWFQFMIEKPYRS

SEQ ID NO: 61 - protein, 791 aa, unidentified
  REGION 1..791: note = Cas Enzyme sequence
DLFIWLAQDGHEGLWKDDDALTPLVKLNVSQRLLEKRKAYSLMTFADARNHPRWAMFEAPGGSNLRNYELNTDNKGLCLVLPLLQDVENDGLAEKGFTIRLAPSGQLSNVEIMKNDKKVALKYRSAHQDFKGALGGAEVLFDRHYLEHTGRSDMAIEYGEVGPVWFKLTLDVQSKAPNDWLDGKGKVATPSEVYHFRTALSNKSKHEAKLQPGLRVLSVDLGLRTFASCSVFELVEGKPKNGLFFPAADGRDENAVNKLWARHERSFKLALPGEDPTKQEKIARAAAMSEIRTLRLDIRRLKDILRLGIVEDEEKRNDLIKALEESLSSETADSALTLDDLSGLDDKKYRSTQELWQQRCQQYYNEAEKKISERFSQWRTHTKPKSSSWQDWRDRRSYHGGKSIWMIEYLDSIRKLIMNWNLRGRSYGQVNRQDKKQFGTIASHLLHHINNLKEDRTKSGADMIIQAARGYIPSKDGVGWIEKFEPCRVILFEELARYRFKVDRPRRENSQLMKWNHREIVSEAKMQAEIYGMIIETTAAGFSSRYLASSGAPGVRSRYLNDEDFSGGLPKDYLVYELEWMIDHSSSMSKEEKKEVLHKKIMPGMWVPWTGGEMFASMKDNKSINFIHADINAAQNLQRRFWNRCRDAYRITCRQVDHENGDRYSLENQPGPRLLGALQQLENGDKEFYLEMEADNNHFIMVEAGKKKTRASEDEQDVGEDDFAEALAEIEENDESGGKRETFYRDPSGMIFDSRHWIPSKHYWFEVKKRVWEKMEKPLILYQEKDDGLQF

SEQ ID NO: 62 - protein, 792 aa, unidentified
  REGION 1..792: note = Cas Enzyme sequence
FHTNAYESIVQKYNDLRNYLTKKTYSEEKWKLNFQNPTLAAGWDKNQESDNSAVILRKDGRYYLGLMRKGHTHLFVEKYQSQVSEDSSQGQYEKMVYKYIKDIVTGIPKSSTQMKEVVEHFKESSDDYILEKGPSIGKFVTPLIITEEVFNLNNKIFLKTNLNRAVLRGEILKKEEKNHIKLFQKDFVKLGGDPTLYKKSLLIWIDFCKKFLESYPSCTFFDYSRLKESIQYESLDEFYEEINSLSYVISFDKISQEYIEKQNAEGNLYLFEIYNQDFAIGKTGKKNLHTMYWEGLFSVENTNGFPLKLNGEAEIFYRPKSIEAEREKRCKSKRDIIKNKRYTEDKIFFHCPITLNRGKGEAKYFNQEINDVLANNENINIIGVDRGEKHLAYYSVINQKQEILESGSLNSVGGKNLNGEIVSVDYAEKLERKANEREQARRDWQSVEGIKDLKKGYVSQVVRKLADLAIQYNAIIVLEDLNMRFKQIRGGIEKSIYQKLEKALIDKLSFLVEKGEIDPKKAGHLLNAYQLTAPFESFQKMGKQTGILFYTQASYTSKIDPLSGWRPNLYLKHSNAKKDQAIISQFSSILYNTEKNRFEFTYDVKKFQTLKEWPKNTVWTICSSVERFRWNRTLNQHKGGYDHYTDMTEQFDILFKSYKIDIRSDIRVQIMNLEAKGNEKFFADFIFFFNLVCQIRNTDPLKEKDDPLGDFILSPVAPFFDSRKAEDFGKNLPKNGDDNGAYNIARKGIIILDKISAFKEKEGSCKDLKWGDLYVSQSEWDTFAQMRRETKK

SEQ ID NO: 63 - protein, 792 aa, unidentified
  REGION 1..792: note = Cas Enzyme sequence
ATNVKDKKFSIKRTLDSLKNIERFLNMFQVVNANTQTDINFYDNLKNILEKHLNRDFDKLYNKVRNYLTKKDFSAEKFKLTFDNPNLAGGWATTQEITKSSFILKRYNEKRNSDDIFLAIWNKKAGGKTKLREKLSTTNLNNSYQRMDLYCWSNASRYLPHVFVLTKKYKGALSKEFIEKYDKGYHRLGDNFDKAFMTEYIGHLVKCLDEYENKEYSYKEFNYQFKQPEMYNNIDEFYRDAERQSYKMNFNNICSDTLHKYVNEGFLYLFQIYSKDFSTNKKEENFSSAKDLNTIYFESIFSKENVENQVFQINGGAELFYREKSIEGKVTHKANVPFDKKRKQAEDNKKSLFPYDLTKDKRYSKDKFFFNCPIKINFASQNVLGGGFNKKVNQKLSDVQYIIGLDRGERHLVYATVIDKKGNIIESKSLNIIESKYSDETYSTDYQQKLVEKANKRKQDRQNWDAVEGIKNLKDGYISHVVNVIRQLQQKYNAVIMLEELNRGFKNNRIHIENNVYQKFETALIKKFNYLIDKKDTSTYLKGQQLTLPITTLDKVYKQSGIVYFVPAWNTSKIDPTTGFVNLFYANSGIRYKNIEEAKKFVEKLDDIYFNATKNRFEFVIDYTKFFNESICSKNKWTLNTYGTRINSYLDKSSGYRVCDEIDLTDEFKKLFGKDYSSVSKDGILQKDSKEFFERFLKLFQLMCQLRNSKSGTEIDYMISPVEGVNGINFDSRSKREGLPQNADENGAYNIARKGLMLINQLYDQIENHSGNEKIKFNYIITNKEYLKHLQS

SEQ ID NO: 64 - protein, 794 aa, unidentified
  REGION 1..794: note = Cas Enzyme sequence
MIVFKNFTRLYPISKTLRFELIPIGRTLENIERNGIIAQDEQRANEYVKVKDIIDRYHKQFIKMCLNNFKLKLNSDETNDSLEEYRELISKANRSEKEEKRFEAVKENLRKQIVGAFKKGATFGDLFKKELIQEHLVNIAETEEEKTMIENFSKFTTYFTGFHENRKNMYSEEEKSTAIAYRLINENLPMFYDNMQSFRKIAASTVADHFIEIETVYQEYLNVEHISEMFSLDYFTDVLTQEQIEVYNSIMRGINEYVNLYNQQQKDRKNRLPLLKPLYKMILSDKVAISWLPEKFESDEEMIDAINKAITKLQTVLDGKNEKSLKYLLLHIGEYDLSRIYISNDFGLTDISQQMFGQYDVFVKGIKNDIRDQAIPTKKEKQDPELYEERINRLFKSGKSFSIAYLNAIGDKVQTIEDYFTQLGSYDRNGEQRVNIFTQIEMARVAASDILAGKHTNLNQSEADVKLIKDLLDAFKALQYFIKPLLGCEEEADKDNEFYAKLYEAWNELDMVTPLYNKVRNWLTRKPYSVEKIKLNFENSQLLGGWDINKEPDCTSVLLRKNGIYFLAIMDKKSNHSFDCDDLPSEGSCYEKIDYKLLPGANKMLPKVFFSKSRIDEFAPSVSIIESYRNGTHKKGVNFSLSDCHRLIDFFKDSINKHEDWSHFGFKFSETKTYQDISSFYKEVEQQGYMLGFRKVSEEFIDRLVNEGKLYLFKIWNKDFSEYSKGTPNLHTMYWNMLFDERNLADVVYKLNGQAELFYRKKSLDLSKTSIRLIILLPTRIRRVTNGKATLNMI

SEQ ID NO: 65 - protein, 794 aa, unidentified
  REGION 1..794: note = Cas Enzyme sequence
LREEYPEEEKLCKDSESTRQIKVLLDAMKELQWLITPLLKGKEESDKEELFYVELIRINDTLSQLNSLYNKVRNYITKKPYSLEKVKLNFSKSTLLDGWDRNKEKDNLATIFLKDGNYYLGIMNRDSNQVMDTAPKASSNQVYQKMEYKLLPGPNKMLPKVFFSKTHIDEFAPDEELLKHYKEGTHKKGDNFNLEDCHKLIDFFKASIQKHSEWCEFDFHFSDTESYKDISGFYREVEQQGYKITFRDIDESYIDELVENGQLYLFKIYNKDFAEHSKGTPNLHTLYWRMLFSPENLAHPVYKLNGQAEIFYRKASIAKKDIVTHKPQEVLENKYPDAGKKTSTFKYELIKDRRFTVDKFQFHVPITMNFQAEGENYVNHKVRRLIHDAQNLHVIGIDRGERNLLYISVIDMNGNIIEQKSLNVVVSEGRKVEVDYHKILTKREGDNRKAKQNWQTVNSIKELKEGYLSQVVHEIAQMMIRYDAIVVLEDLNFGFKRSRQKVERQVYQKFEKMLIDKLNYLVDKGTNPNENGGLLHAYQLTEKFESFQKLGKQSGFLFYVPAWNTSKIDPATGFVNLFDTKYINKVKTQEFIEKFDVITYNQERKCFDFYFDYSKFTEKAEGSRTKWCICSEGNRAEAYRNPNKNNKTEFKTCDLTERFIQLFEQYQIDWKEKNLVQSLSIVEEAEFYRSFMHLLSLMLKLRNDIDGEDKIISPVRNESGECFETKFPGTGEEQNSKTEKQYPYDADANGAYNIAKKGLWIIEQIKKTPEDKLDKVKLAITNKEWLAYAQEHRI

SEQ ID NO: 66 - protein, 795 aa, unidentified
  REGION 1..795: note = Cas Enzyme sequence
PLLNENYSNEKGLKNDDKSISLIKNFLDAIKEIEKFIKPLSETNITGEKNDLFYSQFTPLLDNISRIDILYDKVRNYVTQKPFSTDKIKLNFGNSQLLNGWDRNKEKDCGAVWLCKDEEYYLAIIDKSNNSILENIDFQDCDESDCYEKIIYKLLPGPNKMLPKVFFSEKYKKLLSPSDEILKIRKNGTFKKGDKFSLDDCHKLIDFYKESFKKYPNWLIYNFKFKKTNEYNDIREFYNDVASQGYNISKMKIPTSFIDKLVDEGKIYLFQLYNKDFSPHSKGTPNLHTLYFKMLFDERNLEDVVYKLNGEAEMFYRPASIKYDKPTHPKNTPIKNKNTLNDKKASTFPYYLIKDKRYTKWQFSLHFPITMNFKSPDRAMINDDVRNLLKSCNNNFIIGIDRGERNLLYVSVIDSNGAIIYQHSLNIIGNKFKGKTYETNYREKLATREKERTEQRRNWKAIESIKELKEGYISQAVHVICQLVVKYDAIIVMEKLTDGFKRGRTKFEKQVYQKFEKMLIDKLNYYVDKKLDPDEEGGLLHAYQLTNKLESFDKLGTQSGFIFYVRPDFTSKIDPVTGFVNLLYPRYENIDKAKDMISRFDDIRYNAGEDFFEFDIDYDKFPKTASDYRKKWTICTNGERIEAFRNPANNNEWSYRTIILAEKFKELFDNNSINYRDSDDLKAEILSQTKGKFFEDFFKLLRLTLQMRNSNPETGEDRILSPVKDKNGNFYDSSKYDEKSKLPCDADANGAYNIARKGLWIVEQFQKADNVSAVEPVIHNDKWLKFVQENDMANN

SEQ ID NO: 67 - protein, 795 aa, unidentified
  REGION 1..795: note = Cas Enzyme sequence
FAEKLQLRINPQYWPHADTNKDRKGHARLILSRLPGLRVLSVDLGHRYAAACAVWEAVAKGDFEKECSNAKGKGAEIHYGPDGCKPEDAIYAHLVWPEKASNSATKKAKTEGRDKFHPVTIYRRIGADTLPDGTQHPAPWARLDRQFLIRLQGEEEGVREASNEEVWKVHQMEAELGRTAPIIDRLVKAGWGQSGKQRTRLEALRELGWKPASEAAGVSDDMDADEGDDRKPSLSVDELMSSAVRTMRLALKRHGDRARIAHYLITDEKTKPGGTKEKLDENGRVDLLQDALVMWHDLFSSRGWRDDAARQLWDEHVAKLSGYKAPEEIGEEFSGPERKKKQKENREKLHDVAKAMAQDVTIREALHDAWKKRWKDDDERWKKQLRWFKDWVLPRGKHASDPTIRKVGGLSLPRLATLTEFRRKVQVGFFTRLQPDGTRAETKEQFGQSALDALEHLREQRVKQLASRIAEAALGIGSEGGKGWEGNKRPRQHINDPRFAPCHAIVIEDLTHYRPEETRTRRENRQLMTWSSSKVKKYLAEACQLHGLHLREVSASYTSRQDSRTGAPGIRCQDVPVKEFMRSPFWRKQIAQAEKKQAEGKGDARERFLRDLNAMWKDKTVANWEKAGVIRVPVRGGEIFVSASRDSQGAKSLQADLNAAANIGLRALTDPDWPGKWWYVPCDPAGFRPIKDKVEGSTAVKLDQALRQPAQAQSGDAAKDKKKRGNKGGGKSKEVVNLWRDISSSPLECIEFGEWKEYAAYQNEVQCRVIRILEEQIKGRHKQPHEGSEEDDISF

SEQ ID NO: 68 - protein, 801 aa, unidentified
  REGION 1..801: note = Cas Enzyme sequence
MMAALGLDKSPDRVNFANCRITLQPASESDIQLAFPVEVNSEKIKATVSREALWENQFNLYPDGEKQFYNSSLRWPQEMQRTKPPAPWHEQLDSFRCIATDLGQRDAGAFARLSVLGGSDFGKQPSRFIGEAAGKKWRAALERSGLFRLPGEDAQVWREKSDKDDENPADSGKPFDFREELWGERGRPARDWEADDTAELMRLLEVPLEDKNVSLLSEGWRSLLSFPEQNDKLGVAMSGYQSRIARLHRWCWFLKGDDKQQQTAWNEIGECEDPRLISAEQIVQAKNRDPRLQTELESQLRKRLELAPVLLVRIANRILPLRGRSWRWEKHPISNAEITLHHLTQNGPKLDSKDHPVWLRGQRGLSLERIEQVEKLRRRFQSLNQTLRREVGGKAPIRRDETVPDPCRDLLDKLDNLKEQRVNQTAHMILAEALGLRLAPPSADKKVLRQQRDQHGAYEKILDKSGKWIGPADFIIIEDLSRYRASQGRAPRENSRLMKWCHRAVRDKLKQLGEVFGIPIVETPAAYSSRFCSRSGVPGFRAEEIAPGFENESPWSWIKEKKDDHGQPTAEAMHIQELVQQMAEAQRIPTRSGKLLAKPRTLFAPLAGGPVFVPIVDSIPNAELAPKLVQADINAAINLALRAIADPRLWAIQPRLRSQREGGKKPGTAKKEKVKQGTADAPTEAKLLTREKRKFGEGGKPLVIHRAAGAKPDDTRQPNFFADLAGLKVLAEQLALNNPREYSWLRKEWTSAEISGESSNPPLVHSKSFWGTVKAKQWERIQAINAARLAAWRDKSNPMAD

SEQ ID NO: 69 - protein, 802 aa, unidentified
  REGION 1..802: note = Cas Enzyme sequence
VVPSGLFDLADWNGRLQAPRRQLDAIAAIHDRTDLSVEEKRQLVAKRIRTIRWLVTFSAKLQSRGPFIAYAAQHGFDWRYGAHGIENKSREGLAKLVLCRLPGLRILSVDLGHRYAAACAVWETLSAAQMQNACLEAGMEAPSQRTLYLHLKHFVNGKEKKTIYRRIGADTLPDGSPHPASWARLDRQFLIKLQGEDRDARPATCDEVVAVEQLETELGYVRPIKRKGREHLVDELMSDALRTLRLGLQRHGARARIAFNLTATKRTRPGGIQELLDQESRIGLLTETLLEWNELYAGERWADELARDMWNKHIQPLLGGTILQETNNQDVTPSAAKRRMQREETREKLRPVAKQIAENDSLCRQLNVLWSTRWQIEDAAWRMRLRWMRRWLLPRGINRDPQFRKSIRDVGGLSLIRIASFKSLYQVQKAYWMRPHPDDLRRNIPERGDSSLTSFGQRVLDAMERMRENRVKQLASRIAEAALGIGDETSVNAKNGRQKRPTERSNDPRFAPCHAVVIEDLTHYRPDETQTRRENRQLMSWSSSKVKKYLGEACQLNGLYLREVPPAYTSRQDSRTGAPGLRCNDVTVAEFYTSRFWRKQVEAAEKNQKDGKKGDARERYLLSIDERIRSEANDRDVFRIPVKGGEIFVSACGQDGGSNANRKAPPGLQADLNAAANIGLRAIFDPDWEGRWWYIPCDATTICPVAKKFNGCKAVDSSKPLRIVAEKVAVSSSGIDEKRSGRKGIALTDGSRIVNLWRDPSGAPIRRDVPSNSEWQDYAEYWNKVQSRVIANLRKSYGLREI

SEQ ID NO: 70 - protein, 803 aa, unidentified
  REGION 1..803: note = Cas Enzyme sequence
ASFKQHHETVQPVLNKEYGNNSELIQDKKAVAAIKDYLDSYLHILHFVKPLYVAPPQKEDTAIPDKDAAFYNEFDELFRQLSSVIPLYNKARSFLTQKPYSTEKIKLNFENVSLLSGWDVNKETDNTAILLRRDGLYYLGIMDKEHNRSFLNIGTHSDDNDCYEKMNYKLLPGANKMLPKVIFSEKRINDFKPSDEILEKYEKGTHKKGENFSLNDCHTLIDFFKASIAKHEDWKQFGFQFSPTKTYQDISGFYREVEHQGYKISFQNVSAKYIHQLVSDGKLFLLKIYNKDFSQNSKGKPNLHTMYWKMLFAEENLKDVVFKLNGEAEVFYRPQSIHEKSKIVHGKNKLIDNKNPNNSKKQSRFDYDIVKDKRYTEDKYQFHVPITLNFKSGDIFKFNDLVSETLKENFSNINIIGIDRGERHLAYYSLINSKGEMLEQGSFNVIKNEYNGTRYETDYHASLAEKEKTRDEARKSWDAIGKIKELKEGYLSQVVHKIARMMIEHNAIVVLEDLNFGFKRGRMKVERQIYQKLEKMLIDKLNYLVFKDHEAAAPGGVLNAYQLAAPFTSFRDMGKQTGFIFYVPAANTSKIDFATGFVNLLYPKYENEKQAKDFFNKMDGMRYNAEKDYFEFEVDYNNFRADKMELLKKSLWTICTFGNERYQYHPSKREYSKVNITEDIKTLLKKQGIKFDSGNNIKEDILAVENVQFFKDLIFYLKLVLQMRYTDGKDRDFILSPVANDKGEFFNSEKAADTEPKDADANGAYHIALKGLLLLQKIREGEKKLSISNKEWHDFTQEKKYRK

SEQ ID NO: 71 - protein, 804 aa, unidentified
  REGION 1..804: note = Cas Enzyme sequence
KGLELGDFYNNPEFGYFNKFYDGAYKDIVQSYNKIRNYLTKKPWDNNKKWKLNFKNPSLADGWDKNKESDNFAVILRKNEKYYLGLMKKGCNKIFDNRNLSLMEDGLNSEKYEKMVYKLLPGVNKMLPKVFFSNSNIDFFNPSKEILKIRNHSSHTKNGNPQKGFEKKDFNLKDCHKLIDFFKESLLKHKDWKDFNFQFSETQKYQDISSFYREVEKGGYKITFQDISEKYINEKVANSELYLFEIHNKDWNLKDGQKKTGTKNLHTMYFEALFSQANMVDFPLKLNGQAEIFFRPKISENKLGKKKDNDGKEVVDHKRFAKDKIYFHCPITLNRGADKIYSFNQKINNELLANNPDINIIGVDRGEKHLVYYSVITQKGQILDMGSLNKIKHNENSKEVNYSEKLEEKAKDREQARKDWQEVEGIKDLKKGYISQVVRKLADLAIEHNAIIVFEDLNMRFKQIRGGIEKSVYQQLEKALIEKLNYLVNKGEKDPEKAGNLLKAYQLTAPFETFKDMGKQTGILFYTQADYTSITDPVTGFRKNIYISNTASIEKIKEGINKFKEIGWDDEQESYFFRYDVRDFNKQGKGESKEWKIYANVPRIRREKNNGHWDYKFLNPNDLLKELFDVYGLKYSDGELLEQIKNKDKNGELGQKEVDGKKRDFYKSLIYILNLILQVRNSFSEKDSEGKEKEYIDFIASPVYPFFKTAHKDQKVDFTVFEKMFLNKAENKEKIKNEFNGDANGALNIARKGVVMLNNISKWQAGNERLKRENKKEIFYPDLYISYLDWDKYAQNEWDKFTQQ

SEQ ID NO: 72 - protein, 805 aa, unidentified
  REGION 1..805: note = Cas Enzyme sequence
VYKRQVYNKVRNYITQKPYKEEKIRLKFNNPTIADGWSSSKEQEYGSILLRKGGQYYLGVFNPFDKPTIQTENDLTGNYYEKMEYLLMKDISQMLPKCTTQLKEVKAHFLRGSEDFLLNTKKFFKPLRITKEIYDLNNVSYDGKKKWQKDYLKTGDEQGYRDAVLKWNTFCIQFLQSYKTTMGYDYSVLRSVAEYQTVDELYNELNNLLYKIQFLKVGVKQITQLEEEGKLFLFRITNKDFEPGKKEGSKKNLHTLYWEALFSEENAVQNIIKLNGGAELFLRPASIKNPVVHKAGEVLLNKRVEAVNAEGETYYKPIPEEIYRQLKRYYNQEMAKDELSLEVQEFMEQNEIYTSVRKYDIVKDRRYTKDKYFLHVPITINYRAGSGNKFRLNVLKELQKCRNVNVIGLDRGERNLIAYSVVNAQGIIMEQGSFNIVEGMDYHAKLSQLEAARKEERKNWKKIENIKELKQGYISQVIHQITQLIEKYNAIVVMEDLNYGFKKGRYKVEKQVYQKFETALIRKLSYMVTRKTEGTDMLLPGGVLNGYQLAMLPESVKNAERQCGAIFYVPAGYTSKIDPTTGFVDVFNYSKLSDREKRKQFFTKFDDIFYDERKDCFAFHFNYRNFEVYQEVARTEWTVYTNTVKHVYSKEERKNYLIEPTRELKKLFVENGIDYQRGNLKESIQSLASDIEHAGFWKQLEYLFQVAMRLRDSDNSERVIDRILSPVINAKGEFFMTPDVPSEKNRYDSMPMDADTNGAYHIALKGLFLLNKKIREAELTDKIPKDLFKITNAEWFAYVQEEIHG

SEQ ID NO: 73 - protein, 808 aa, unidentified
  REGION 1..808: note = Cas Enzyme sequence
MLRGYERVREAWSKKECTTHEMRKTALAQLQTELKGKFGDPDFYLWLAKDENMDIWKHDSNPVFEIAQLNALKRLLAKRKQQSIYTQPDAVKHPKWSQFEAPGGTNLKNYKLIQDNEGLLLLELPLLSHSPNGLLEKNYTIRLAPSGQINNPEIVNGDISKLTFFYGDEQYAADLGGSDILFNRSFLEHRPIESLRQGNWGGGKHNTLAVWFKCVLDVEPKPAKPDWLKKQNDRYMLITPAAINHFKSGLLNKKHKELLESGLRVLTVDLGVRTFASCSVFELVKGKPERGLYWHADVDKDLWARHERSFTLAMPGDNVTAEAKDARIHAYEELNRLKQGKNFIRNLLRLSVIEDIQKRTEEFELFCAGREKFSGKDLAYKLSADDIKTLTSCLGKPIESWRVQIKAVFVKYEKIIADDISKWRTSTRPKTTERQYEMGKSYWGIEYLEAVRDFLKGWSTHAREYGQITRWDREKNGIFANNLLEHINNKKEDRIKTGSDLIIQSARGKLYNEKTKEWEDKFQPCRLILFEDLAMYRFRTDRPKRENTQLMRWSHRAITNEANQQASIYGIHVDTTGAGFSSKFYARNGCPGVRATKLTAQDIEYIYANEYVKDRLLVDGFGEHFLREGTIVPWMGGELFVSFSQRGKLEILHADINAAQNLQRRFWTRYIDVFRVPVVQIDKSGEQWIPQSNGERLKGGLYILVGSKAPVKFVKAEGDGFKVERLTQKTPKVFSDTEDSGLDEFSEELLEQGIDLMSEEGKGKSVFFRDASGIILRSDRFYESREFWDRVHMVINHALKEKYEPNPF

SEQ ID NO: 74 - protein, 809 aa, unidentified
  REGION 1..809: note = Cas Enzyme sequence
YELDPLFYLHPETGYMQFHTNAYESIVQKYNDLRNYLTKKTYSEEKWKLNFQNPTLAAGWDKNQESDNSAVILRKDGRYYLGLMRKGHTHLFVEKYQSQVSEDSSQGQYEKMVYKYIKDIVTGIPKSSTQMKEVVEHFKESSDDYILEKGPSIGKFVTPLIITEEVFNLNNKIFLKTNLNRAVLRGEILKKEEKNHIKLFQKDFVKLGGDPTLYKKSLLIWIDFCKKFLESYPSCTFFDYSRLKESIQYESLDEFYEEINSLSYVISFDKISQEYIEKQNAEGNLYLFEIYNQDFAIGKTGKKNLHTMYWEGLFSVENTNGFPLKLNGEAEIFYRPKSIEAEREKRCKSKRDIIKNKRYTEDKIFFHCPITLNRGKGEAKYFNQEINDVLANNENINIIGVDRGEKHLAYYSVINQKQEILESGSLNSVGGKNLNGEIVSVDYAEKLERKANEREQARRDWQSVEGIKDLKKGYVSQVVRKLADLAIQYNAIIVLEDLNMRFKQIRGGIEKSIYQKLEKALIDKLSFLVEKGEIDPKKAGHLLNAYQLTAPFESFQKMGKQTGILFYTQASYTSKIDPLSGWRPNLYLKHSNAKKDQAIISQFSSILYNTEKNRFEFTYDVKKFQTLKEWPKNTVWTICSSVERFRWNRTLNQHKGGYDHYTDMTEQFDILFKSYKIDIRSDIRVQIMNLEAKGNEKFFADFIFFFNLVCQIRNTDPLKEKDDPLGDFILSPVAPFFDSRKAEDFGKNLPKNGDDNGAYNIARKGIIILDKISAFKEKEGSCKDLKWGDLYVSQSEWDTFAQMRRETKK

SEQ ID NO: 75 - protein, 809 aa, unidentified
  REGION 1..809: note = Cas Enzyme sequence
HRFAASCAVWEAISTEDMAKACREHGHRKPQESDLFIHLTRTVKKERKKGRDKGKTLNVVETTICRRIGEDLLRNPETGKTTDTPHPAPWARLDRQFFTKIQGEERSVRIASEAEYEYVKQLEDGLHYARDKRTPLPWQVDQLMAEAVRAVRLALRRHGDTARLAFGLASEYKLMPGASKFWFTKQQDDDRDPQKDAEKKAADRAVKHTKYLQDLLCLWYDVAVSARWRDDDALNRWNAHVQPQIQQATFTEPPPLQGQDANDKKKVERRERQIESWKRVWERLRTTLTRRAEEQEEGIERSEWKPDRDAIGALLAPVAEALRNDPQKRKELATKWKTRWEADDTCWPGRLKRLRRWLLPRGLRARPKETQEQTNARKIRRAAGMNVGGLSLARLVTLIEFRRQVQVGYFTRLHPDGSKAEIKEEFGQRILDAVDRMREQRVKQIASRIVEAALGVGIERDRVWDETKKKWRYPKRPRELLYYEDEQGTAYGDSRFKTCHAVVIENLRSYKFADMQPRRENRALMSWSAGKVRKYLEEACQLHGLHLREVMPNYTSRQCSRTGLPGVRCDDVPIDAFLTAPWWNMAVNAATKRLQENGADSLDRLLVALREKWSTASDQDRRRQRTLRLPRAGGDLFVAAPPNGVATAKDRRCGALQADLNAAANIGLRALFDPDFPGRWWYVPCIEDIAAGTAVPRADKVKGSVCFGPDRSKPEQFGSLLKPGAGDSSDGLARSARRKRTRRSTADGKETTNFWSDPRAELLRNATNGGFWLPTPAYWRWVRKRVVAALWQVNGLSAPPAELVRDGQA

SEQ ID NO: 76 - protein, 809 aa, unidentified
  REGION 1..809: note = Cas Enzyme sequence
NAYTEVKDLLNTPYPSNKNLAQDKVNVEKIKNLLDAIKSLQHYVKPLLGDGTESEKDEKFYGEFVALWEELDKITPLYNMVRNYMTRKPYSTEKIKLNFENSTLMKGWDLNKEQDNTTVILRKDGLYYLAIMNKNHKKVFDVMNMPTSGDCYEKMEYKQIADAGKDIQNIIYHDGKYQRFTKKLDRLKEENIPQIYRIRERGSYLQDAPKSDVKKFSKEDLSTFIEYYKDAAIHYWDWCEFSFKKSKDYANWKEFTNHVNMQGYKISFRNVSVDYIHSLVEEGKIYLFQIYNKDFSPYSKGTPNLHTLYWKMLFDERNLADVVYKLNGEAEVFFRKSSITCERPTHPAHQAIENKNALNEKKQSVFTYDLIKDRRYTVDKFQFHVPITMNFKCTGGDNINQSVNEYIQKSDDLHIIGIDRGERHLLYLTVIDMKGQIKEQYSLNEIVNTYKGNEYRTNYHELLSKREDERMKARQSWQTIENIKELKEGYLSQVIHKISELMVKYNAIVVLEDLNMGFMRGRQKVEASVYQKFEKMLIDKLNYLADKKKNPEEEGGILNAYQLTNKFTSFQKMGKQSGFLFYTQAWNTSKIDPVTGFVNLFDTRYETREKTKVFFCKFDFIRYNRDKDWFEFAFDYNKFTTKAEGTRTQWTLCTCGNRMETFRDEKQNSQWTSQECDLTDKFKEFFAKYGIDIHTNLKEAIAQQDSADFFKGLLYLLKLTLQMRNSKTGTDIDYMQSPVADANGNFYNSELCDNSLPKNADANGAYNIARKGLWIVRQIKASDDLRNLRLAISNKEWLQFAQNKPYLND

SEQ ID NO: 77 - protein, 810 aa, unidentified
  REGION 1..810: note = Cas Enzyme sequence
  VARIANT 805..808: note = X can be any amino acid
MENFKNLYTINKTLRFELKPCGKTRENFKRTEILERDESKARNRKKMQSIIDESLKKMIEERLKNVVLDEEHLTKAFSNDSKEREKSLIFLKKQVVQVFNDKDFKEEYLKPKKNIEKLAKNYPDEKVIQEFNEFTTYFVNFFEIRKHIFLGNTSGSIAYRLIDENLKIYRNNVEKIKKLPKELKIELNDLIKIDDFSYYNNYLTQSTITEYNEILGGVVLNNGTKLQGINEKINLHCQKNKLKLPRLEQLYKMILSDRETSSFVVDVIENDEELIEMLMGVAHKISLSNEISLSEYYNIFMKYTEIGNLPGVSYTLISNLILEAYDEKYGTAKRKKSYESNRKRAIESEVYSIGMLSELLKDTEIDLMQNIKMKYKELIENCRLAKENFENVDWLSIENVKQSGNTRIIKEFLDALKDIQRFYSWFDIVNEDKNPSVDFYLWLSKNMEQLGFEFNSIYNKTRNYLTKKQYSEEKIKLNFDSPTLAYGWDINKEVANSAFILRKLNDQRVDYNYFLGIWNKNIPPRENVIIFDDNGVYEKMKYKLIADPGRDLAHLFMTGKWKKQYPMTPEFEDKYQKKGYKKGDNFDKKFLHQLIDRYKHGLIHHENKHQEVFEFKFRDTKDYNSYEEFLSDVKRDSYKVSFEKIADVESLINEGKLYLFQIYSKDFSIHSKGTKNLNTIYFESLFSEENLKENIFKLSGGAELFYRHASLKYGTKILQKGHHYEELKDKFSYPIIKDKRYSEDKFLFHVPIEINFNSENLTAKNFNERVNENIKEFKHIIGIDRGERHLVYLSVIEIATGKIIXXXXDY

SEQ ID NO: 78 - protein, 813 aa, unidentified
  REGION 1..813: note = Cas Enzyme sequence
KFEQFLNSASGKIEIDAEEKIIIKNFADDVLFIYQMGKYFSLEKKRSWNTEYEIDSLFYLHPETGYMRFYTDAYESIVQIYNDLRNYLTKKSYSEKKWKLNFQNPTLAAGWDKNKEADNSAVILRRDGKYYLGLMKKGHTHLFTETYQSQVLGDGNQGYFEKMVYKLLPGANKMLPKVFFSASNIEYYAPSEKVLEIRNQSSHTKNGEPQKGFYKKDFNLKDCHILIDFFKESIAKHPDWKHFHFNFSDTKTYNDISEFYKQVSDGGYTVSFDKISQSYIEQQNAEGNLYLFEIYNQDFAIGKTGKKNLHTMYWEGLFSVENTNGFPLKLNGEAEIFYRPKSIEAEREKRCKSKRDIIKNKRYTEDKIFFHCPITLNRGKGEAKYFNQEINDVLANNENINIIGVDRGEKHLAYYSVINQKQEILESGSLNSVGGKNLNGEIVSVDYAEKLERKANEREQARRDWQSVEGIKDLKKGYVSQVVRKLADLAIQYNAIIVLEDLNMRFKQIRGGIEKSIYQKLEKALIDKLSFLVEKGEIDPKKAGHLLNAYQLTAPFESFQKMGKQTGILFYTQASYTSKIDPLSGWRPNLYLKHSNAKKDQAIISQFSSILYNTEKNRFEFTYDVKKFQTLKEWPKNTVWTICSSVERFRWNRTLNQHKGGYDHYTDMTEQFDILFKSYKIDIRSDIRVQIMNLEAKGNEKFFADFIFFFNLVCQIRNTDPLKEKDDPLGDFILSPVAPFFDSRKAEDFGKNLPKNGDDNGAYNIARKGIIILDKISAFKEKEGSCKDLKWGDLYVSQSEWDTFAQMRRETKK

SEQ ID NO: 79 - protein, 814 aa, unidentified
  REGION 1..814: note = Cas Enzyme sequence
IRDRENDVKAIKEYLDSVLNVIRLVKPLSVGTELERDTDFYGQFDELYDILDDVVPLYNQVRNYITSKPSEEKKLKLMFDSPTLAEGWSTTKEKDYKCLLFEREGLYYLGIINSSSKESKKIDFSKLSCGEDKCSYKKMVYRQIQSAANYFSIKQIKPQNPPSYILKWLSSGFDKKTLSRQQLTKLISYVIDDFIPNYKMLNDENGSPYYSFSFKEASQYESWKEFTDHIDSMCLYSIGFENIPVQIIDSLVERGVLYLFKLNNKDFSRSSVGRENLHTIYWRMVFAEDNLNDVVFKLNGGAELFYRRASIKNPYIHKLGKKLVNRIDRDGKRIPDVAFGQLVKFADGEIAIDELSGVAKDLYSAGKVVMKDVKHEIIKDRRFAEDKFFFHVPITINAKANKKASRFNDFVNDAVRNFEDVNIIGIDRGERHLLYVTVIDSKGKILEQRSFNTIDIDRYDGKRIDVDYHAKLDQMEKDRDKARKSWSEIGKIKDLKSGYLSMVVHEIAKLMVKYNAIVVLEDLNGGFKRGRSAIEKQVYQKFEKAMIDKLNYLVFKDSEPLSLGGALRGYQLADKFESFEKLGKQTGFIYYVPAAYTSKIDPTTGFTNIFDFKKCTSAEGIKRFFNLFDSIKYSETDKAFIFAFDYNKFDTRFPSWNSKWEVYSASRRLAYSKDQKVDVEINPTNAIIEALTKRCVAIKDGFDLGLYMKELDATRENAGLFKSVFYAFERTLQMRNSSAKTGEDYIESPVKNSSGGFFDSRKCVNELPENADANGAYHIALKGLLMVNELKTNETPKLTIKNEDWLEFVQRRHV

SEQ ID NO: 80 - protein, 816 aa, unidentified
  REGION 1..816: note = Cas Enzyme sequence
MANDLYRTYEVLVEESVHPDHPKRAKDRTSKPERFNAELDGALRDTHMIFQDAVCYNTLCIAGLAGNEELPAAPGEKPKPLNPLWKYLTSSAPGGINAETEKMICRLATHYKPLEGVKTAKDFLNRVYSDPLQTHEGMTDAEREAVMLMRAQCYRILEKYGTKQKTNGGLECEDMSAFANTWTGLTSIPGSITVIPGNGGRLRTLLNLIWRLHGDKEKDGKGRYTVNRDHKKMRPVHYRMVMETLARSAFPKRQRQPDEVEDRDDQNLRLKLASQDQWDEWRPLFESKKGKEENDRRQNLEAVALKYAPTKWLELAEAVKEQITDYCEDADSLDKLLVAVIEFCLPLRGRHWSWSYAENKARLSWGKDDEDPAWNPNIQGMRGLSMRRLDQILNLRQRCQSFAKLEDRYHRQFLKNDFNPPDSVPREEIDDVCPLLLERSNRIREQRVNQAAHLILAEALGMELKNPAEVENKNGRKNEVDLHGEYQRRKDKNGKPYPRCSVIVLENLERYRTSQERTRSENSRLMQWAHRAIIEKLEDMCRPFGITLMLVDPAFTSHFDSRNGLPGVRVNQVSRGFHEQYPYAKWINDKTKKGDKTSLALEIENLIADFDAHPNYGGTLVLAVEGGKEFVPVMSPEGGESVVNADITAAANIGLRGVADPQRWDIFPRLRTKQVSDTQVRVTSWRGWFGKLMPEQRMMGKAVAGGVSELPAPAAKTKRKKADSEGAETGDKADSQSGQSSEYPPFFVEHPQHDWLPANDWLKKLALEFVQDGKKLRAYPQGAYLKRVELECTTRIEAINRARIQKSKRGNDDVPM

SEQ ID NO: 81 - protein, 816 aa, unidentified
  REGION 1..816: note = Cas Enzyme sequence
LFKSITESYTIFKSVFDSKEVDEDDYEFSEKEIEEIKTYLDGVKKLESLLKQFMLNGKENNIDYVFYGDFIPAFDRICEIDSIYNKVRNYITSTRKPYKSDKYRLYFDNPQMLEGWDINKENARKTSMLLKDGQYYFAIINDKKSPFDNIPDEYVEDRDYYKKMIYKQIPNAAKYISGKNIKNPPLEILEILKKRKKDSKSLTEDEKNRFIDYVKTDFLVNYEPIIDKNGNRYFDFKFKNAEEYPTLEDFFEDVNRQAYSIRFEKISTRYINELVENGQIYLFRIYSKDFSEYSKGNKNLHTMYFEALFDEDNLENQIMKLNGGAEFFIRPASISKDKLIVHNKGQRLDNKNPLNSKKQSVFNYDLIKDKRFTEDQYMLHVSIDINKNAMEAENVQTINERVRKELKECDDNYIIGIDRGERNLIYICVINGNGEIVEQMSLNNIINEYNSVQHTTDYHKLLSKCEAERDKQRKSWKSIENIKELKDGYLSQVVHKICQLVEKYDAIIAMEDLNRGFVRNRLKFEKQVYQKFEKKLIDKLNYMVDKNKQEMENGGILKGYQLANSFNKDSSFQNGFVFYVPAWLTSKIDPTTGFVDFLKPKYVSVNESCEWISRFDSIKYDKSIDMFGFDIDYSNFTRADIDYRKKWTFYSNGDRIEEFRNSNTNNKNDYKVIKLSEEIKKLLESYNISYIGGDDIIPAIKCISDKGFWVNFIRYIKLTLQMRNNITGKTDVDYIISPVMNNMGNFYDSRQYDNEDSSLLPQNADANGAYNIARKALWAIDRIKEAEDDELKNVKIAISNKEWIEYAQTHFIKKEC

SEQ ID NO: 82 - protein, 820 aa, unidentified
  REGION 1..820: note = Cas Enzyme sequence
KQRKNIAGMVTISAVVACMIISLLLQRKEINDSIKSYSARYEMLQDSIEEEKEHVKEIEKFIKPLSETNITGEKNDLFYSQFTPLLDNISRIDILYDKVRNYVTQKPFSTDKIKLNFGNYQLLNGWDKDKEREYGAVLLCRDEKYYLAIIDKSNNRILENIDFQDCDESDCYEKIIYKLLPTPNKMLPKVFFAKKHKKLLSPSDEILKIYKNGTFKKGDKFSLDDCHKLIDFYKESFKKYPKWLIYNFKFKKTNEYNDIREFYNDVALQGYNISKMKIPTSFIDKLVDEGKIYLFQLYNKDFSPHSKGTPNLHTLYFKMLFDERNLEDVVYRLNGEAEMFYRPASIKYDKPTHPKNTPIKNKNTLNDKKASTFPYDLIKDKRYTKWQFSLHFPITMNFKDPDKAMINDDVRNLLKSCNNNFIIGIDRGERNLLYVSVIDSNGAIIYQHSLNNIGNKFKGKTYETNYREKLATREKDRTEQRRNWKAIESIKELKEGYISQAVHVICQLVVKYDAIIVMEKLTDGFKRGRTKFEKQVYQKFEKMLIDKLNYYVDKKLDPDEEGGLLHAYQLTNKLKSFDKLGTQSGFIFYVRPDFTSKIDPVTGFVNLLYPRYEKIDKAKDMISRFDDIRYNAGEDFFEFDIDYDKFPKTASDYRKKWTICTNGERIEAFRNPAKNNEWSYRTIILAEKFKELFDNNSINYRDSDDLKAEILSQTKGKFFEDFFKLLRLTLQMRNSNPETGEDRILSPVKDKNGNFYDSSKYDEKSKLPCDADANGAYNIARKGLWIVEQFQKADNVSAVEPVIHNDKWLKFVQENDMANN

SEQ ID NO: 83 - protein, 821 aa, unidentified
  REGION 1..821: note = Cas Enzyme sequence
AEKFVNDSEKILHISEVDYQKDENKFVIKNWLDSALYCSQILKYFRVKARFQIDGNFQNYLDDLKIGEVIENYDVIRNYLTKKPQSELNKLKLNFENGTLAGGWDENKELENFCVILQDENKRNFLAILTKENRKVFESKGKNKNQIFSNDGSGWRKMVYKLLPGPNKMLPKVLLPKKDRCKFGATEEILDIYSEGGFKKNEATFSKEKLGKIIDFYKKGLEVYPSPENSWQSLFGFKFRDTADYNGVDEFYGDVEKQGYSLNFVDINKEKLDELVDEGKIYLFQICNKDFNLKDGLEKSGNKNLHTIYWQAVFSGLENAPKLSGGAEIFYRPALKKGDIKFATKKDEADNEIDVVLKNGKKAIKHFRFSKEKFVFHCPITLNFCLKNNRINNFINKNLVENRDNVSFIGIDRGEKHLAYYSVVDKNGEILEQGSFNKIKDETSGKETDYAEKLEKMAGNRDESRKNWTTIGTIKEMKEGYISQVVRKIVDLTIKHNAYVVLENLNSGFKNSRKKIEKQIYQKLELALAKKLNFVVDKKAKEGEIMSVQKALQLTPPVNNFGDIEKASQYGIMLYTRANYTSQTDPITGWRKTIYLQKGSEEKIKEQILNAFDDFGFDGKDYYFDYTTKYKEGNKIIEGKKWRLYSGKDGKSLDRFRNESVYENSEKIWKTVSRDVVEILDKLFEGFDKDSGESLFQQIKNGKQLNKIDEYPAWESFRFAIDLIQQIRNSGPKDKDGNPTKDDDFILSPVRDENNSHFDSREGGAIISNGDANGAYNIARKGMMMFERIKEFEKMSETEKKKKKYPDIFIGDKEWDKFAQK

SEQ ID NO: 84 - protein, 824 aa, unidentified
  REGION 1..824: note = Cas Enzyme sequence
  VARIANT 812..824: note = X can be any amino acid
MFKLLPDITGIVFFYRDSWRGYEEVITVDVVFYIGGNVMANSLSGFTGLYSLSKTLRFELRPVGKTKENMKIKGLLSEDEHRAKSYKQVKKIADDYHRKFIENALKNVHLEGVEEYAELYCKRNKTEKERKEIDKAADNLRKQVIKFMTTRDEFKKLGKKDFIEEMLPEFVDSEEKKKLIKEFKGFTTYFGGFFENRNNMYSAEKKSTSIGYRVIDQNLPKYIDNVNALKKILEVNPGNMIENIENDFMDMLEGKALNEFISLDNYSYFITQSGIDKYNTVIGGKSCDERTRIKGINEYVNLYNQKADKKIGILKPLYKQILSDKDSKSFLPESFERDNELLNAIELFNAGQKENIESIKGLFEQLSEYEADHIYVKDIFLSEISNELFSEWGYIKGRLEDKYDEEYTGKKKANTEKYIEERKKYFKNKRSYSLSELDAVLENNAVTSYFSGEQLKQAIINMADSYKDIEDLVNTDYPSDRKLQKDKESTKLIKGYLDACKDFGRFIQPLLGDGKESEKDAAFYGKFTPAWEAFDSITPLYNKVRNYMTKKPYSTEKVKLNFENQTLLAGWDLNKEEGNKSLIFIKDNNYYLGIMDKQHNKIFRDVEEAKSEPYYRKMEYKLLPGANKMLPKVFFAKSNIDFFNPSNKILEDYNAGRHKKGDNFDIKACHALIDFFKESIEKHQEWRQFEFEFSPTETYKDISDFYREVEAQGYKISFKNISEKYIDELVDEGKLYLFKIWNKDFSPHSKGTPNLHTLYWKMIFDEKNLQDVVYKLNGEAEVFFRKASIDEKDIIKHEANKPIENKNKLNDXXXXXXXXXXXXX

SEQ ID NO: 85 - protein, 825 aa, unidentified
  REGION 1..825: note = Cas Enzyme sequence
  VARIANT 807..810: note = X can be any amino acid
MAKIFEDFKRLYPLSKTLRFEAKPIGATLDNIIKSGLLDEDEHRAASYVRVKKLIDEYHKVFIDRVLDNGCLPLKNEGHNNSLTEYYESYVTKSQNEDAKKVFKEIQQNLRSIIAKKLTEDKAYANLFGKNLIESYKDKTDKTKIIDSDLIKFINTAESTQLDSMSQDEAKELVKEFWGFTTYFVGFYDNRKNMYTAEEKSTGIAYRLVNENLPKFIDNMEAFKKAIARPEIQANMEELYSDFSEYLNVESVQEMFQLDYYNMLLTQKQIDVYNAIIGGKTDDEHDVKIKGINEYINLYNQQHKDDKLPKLKALFKQILSDRNAISWLPEEFNSDQEVLNAIKDCYERLAENVLGDKVLKSLLGSLADYSLDGIFIRNDLQLTDISQKMFGNWGVIQNAIMQNIKHVAPARKHKESEEDYEKRIAGIFKKADSFSISYINDCLNEADSNNAYFVENYFATFGAVNTPTMQRENLFSLVQNAYTEVAALLHSDYPTAKHLAQDKANVAKIKALLDAIKSLQHFVKPLLGKGDESDKDERFYGELASLWAELDTVTPLYNMIRNYMTRKPYSQKKIKLNFENPQLLGGWDANKEKDYATIILRRDGLYYLAIMNKDSKKLLGKAMPSDGECYEKMVYKLLPGANKMLPKVFFAKSRMEDFKPSKELVEKYNNGTHKKGKNFNIQDCHNLIDYFKQSISKHEDWGKFGFNFSDTSTYEDLSGFYREVEQQGYKLSFARVSVSYISQLVEEGKMYLFQIYNKDFSEYSKGTPNMHTLYWKALFDERNLADVVYKLNGQAEMFYRKKSIENXXXXHKSTLNRVLDDSCGF

SEQ ID NO: 86 - protein, 826 aa, unidentified
  REGION 1..826: note = Cas Enzyme sequence
LINKVIPEKSLVTYFKNCNKTEENPDLLNRIQNCYLQVKNLLNTDYPAEKSLKQDKQNIEKIKQLLDSIKEFQRFIKPLLGKGDEANKDAIFYVEFEKLWHELDRITPLYNMVRNYVTQKPYSTEKIKLNFENSTLLNGWDVNQERDNISIILRKGELYYLAIINKKNNTIFLKENTPSTGNCYEKMEYKLLPGANKMLPKVFFSESRIDEFKPSKQLLENYNNETHKKGEKFNLEDCRNLIDFFKQSINKHEDWKNFGFQFSDTSTYQDLSGFYREVEQQGYKITFRNISEDYINQLVEEGKLYLFQIYNKDFSPFSKGTPNMHTLYWKMLFTPENLQNVIYKLDGQAEVFFRKKSLNYTDETWQKGHHYDKLKNKFAYPIISKRRYALDKFQFHVPVTMNFKAVGNERINELVNQFIKNNGIEHIIGIDRGERHLLYLSLIDLNGKIVKQFSLNEIGNEYKDNIYKINYRDLLDKKETERDDARKSWNEIETIKELKEGYLSQVIHKITQLIIEYKAIVVLEDLNFGFMRGRQKVEKQVYQKFEKMLIDKLNYLVDKKKQVADEGGLLNAYQLTNKFESFKKEGKQNGFLFYVPAWNTSKIDPVTGFVNLFNVKYESVSKAQEFFKKFDCIRFNQIDDNNCRFDFYFDYKNFTDKAEGSQTKWTLCSSNDTRYRWNKSLNQGKGAQEEVKVTEALKLLFSDKDYNIAYGDGKDLRERISNQTSAKFFKELMSLLSTLLSMRHNNGKKCDEEQDFILSPVEPFFNSLHATDEHPKDADANGAYNIARKGLWVLQQIGKATDLKKVELTVKNKEWLRFAQNKNTQS

SEQ ID NO: 87 - protein, 829 aa, unidentified
  REGION 1..829: note = Cas Enzyme sequence
MDHALTVNQMLKYFLVKENKIKGSPLDSEISNALKAILFEGTINPSPLQAAESEKDVTVYWFKWYDALRNYLTKKPQDDVKDNKLKLNFENGSLLGGWSDGQEKIKASVVLKKENDFYLGILKTRTLFDTEKENNSVYKNTTSDSGRLILANLKFQTLAGKGFLGEFGQSYGNMGTEDPVKAIQCLQKIIKDRYINKYPLLKKIAEKLYSTKKDFDKEIQETLVNCYVCEFTQINWLEVEKQTDLGNMYLFKIHSKDDGRKNTGNKNLQTLYWRAVFENNSPFQLNGGGEVFYRKQAIKDKKIKTGYGNKSFIIDNKRFTSEKFLFHCPIKLNYRAKSYSKPQYALSEINNEINKHFVTNDNIYFLGIDRGEKHLAYYSLIDQNGKIIDQETLNLPFTDKAGKPRGIKKQKYFYNKKADVWEPKEVDCWNYNDLLDAMASNRDMARKNWQTIGTIKELKEGYISQVVRKIVDLSTAKDKPVFIVLEDLNTGFKRGRQKIEKSVYQKFELALAKKLNFLVDKSAKNGEIGSVTKALQLTPPVNNYGDIENKKQVGIMLYTRANYTSQTDPVTGWRKTIRLKKGSEKDIKEQIIKEFTDIGFCGKDYYFEYVDKNTGKQWKLYSGKDGKNLDRFRGSRGKDKNEWTIKPVDVASILDQVFINFNKNHSIRQQIIEGTFLEKTKEEPEITAWESLRFAIDVIQQIRNTGEDERDKDFIFSPVRDENGNHFDSRVYLDREKENIVMPSSGDANGAFNIARKGILMSEHILVWIKNRKPKYDKNTNDLSLFISEDEWDLYLTNREEWKKQLSKFSSRKAIEQARKAMDTKTHSL

SEQ ID NO: 88 - protein, 830 aa, unidentified
  REGION 1..830: note = Cas Enzyme sequence
TNRFLDTFTVEDGEAIDVGFYSEIDDLKEIIDGIDPLYNRVRNYVTRKPYNKNKIKLNFNSPTLAEGWSKSKEYEDNAIILRRDGKYYLGIFNVKNKPDKKIMEGYSGYVGDGYEKMVYSLLPGAGKMLPKVFLSKKGIGNYKPSSYIIDGYDNDRHIKSSKNFDINFCHDLIDYFKASISANPDWKVFDFKFSDTKSYEDISGFYSEVEKQGYKISWVNISKEDIDRLDETGQIYLFQIYNKDFSESSMGTPNLHTLYFKNLFSEENIRETVLKLSGKGELFFRKASIDKPSGHRKGSILVNKTYKTNIGNEEVRVPVPDKEYMEIYTYLNNGRTTKLSENAQSLLDNKLVEYFEAEKEIIKDRRYTVDKFFIHTSVVINYNAEGASDKQLNEQVLEYISKQDDMHIIGIDRGERNLVYVSVIDMKGRIVEQKSYNVVNSYSYQKKLVERERTRDEARKSWKEVGRIKDLKDGYLSLVVHEIADMVIKYNAIIAMEDLNYGFKRGRFKIERQVYQKFESMLISKLSYLVDKTKKADEPGGVLKGYQLAFVPKDVKKVGRQCGIIFYVPPAYTSKIDPATGFVDLFKFKSGEKEGTARADNDRKEFLSKFDDIRYVEKNDNREEMFAFTFDYDNFAMHNTVIAKKKWTAYTFGSRIQKVYENGRYTSNTREIELSDKMKRLLNENNIEYGDGHNLVDDIRTLDVDSSGAVINEIFKIFRLTVQLRNSKSEAENEKNGEYDRIISPIMNDAGEFFDSFKYKKMNEETEPGKHNATMPIDADANGAYCIAMKCLYEAKNIKSGWEKEGKKNNDLLCVTNADWFDFMQNKRYV

SEQ ID NO: 89 - protein, 831 aa, unidentified
  REGION 1..831: note = Cas Enzyme sequence
NGESAIKIENYISSFGEERNKGGLIVNEDFITWASTLYSGIEKLMSSENQDILLENEDNIKKIKDFMDNLLKIFQHYKLLSGSGQEINRDNDFYTVFDSIFDTLKNIVKLYDMVRSFVTKKPYSTDKVRLSFGSAITCGGWENELAKYSIILKNGSDSYLGIINPKNPARFDNVKEPKGDCYEKMQYSSIPDPSKLLSTLMVINGVTTRITGRKDENGINAALEEAKEKYLPEDINTIRKKGSYKLGDNFDKEDSIKYIAYYMERLLEYKKTIKFDFKKPSEYHSYAEFLEDVGSQAYKISFKNVSLAVVNAFVENDQLYLFKIYHRDMLPYIEGIPGYYTLFWKELFSEQNLSDTIYKLCGGGQIFYRKASLKVFSHHIEDKGRFLVKDKRYTEDSFLFHVPIEINSKLDKKSNVNLLVKESIRQNDVKHIIGIDRGERHLIYVSVIDLDGNIIESFSLNEILSKSHNSQRITNYQDLLTKRGEHRKEQKKNWNVIQEISSLKKGYLSHVIHVISSLVIKYDAIVVLEDLNSGFMQSRAGIEKQLYRNFEIALIKKLNLLINKTTDVNSDGGLRRPYQLTNKFESFEKIGNQCGVLFYLPAWNTSKLDPVTGFCNLFDCRSKSIVEDKNFFGKFKDIRFNAEKDYFEFVVDNYTAFNHRAEGTQQSWTICTSGIRIKAAKDKNTGIWVSDEVPLTDKLKSLFEKNEIDIYVDLKNQILSQTSGRFFAELMNLFYLTVQIRNSVIGKEIDYLLSPIMGKNGEFFDSRNPTFKYLPENADANGAYNIARKGLIMVNKIKDAKSASDRISNVNNREYLQFVQGQFFMEKRKAA

SEQ ID NO: 90 - protein, 831 aa, unidentified
  REGION 1..831: note = Cas Enzyme sequence
MKEIKELTGLYSLTKTIGVELKPVGKTQELIEARKLIEQDDQRAEDYKIVKDIIDRYHKDFIDKCLNCVKIEKDDLEKYVSLAENSNREAVDFDNIKTKMRNQITESFKKNPLFVGLFKKELITKYLPNFVSEEERVVVNKFSKFTTYFDAFNNNRKNLYSGDAKSGTIAYRLIHENLPMFLDNIASFNTISEIGVNKYFSDIENEFAAILDGMHLSALFQLYYYSNTLTQEKIDNYNYIVGAINKAVNLYKQQHKTVRIPLLKTLYKMILSDRVTPSWLPERFESDEEMLTAIKETYESLKEVLVGNNDDSLRNLLLNIDNYDLDHVYIANDSGLTSISQKIFGCYDAYTLAKKDQLQRENPATKKQRENPNLYDERIDKLYKKEGSFSIAYLNRLVDTKEHITINEYYRLLGSYCREGGKSNDDFFKQIDGAYSAISYLFSAEHGEIAQSDSDTAVVQKLLEAYKGLQRFIKPLLGHGDEADKDNEFDVKLRKVWDELNIITPLYDKVRNWLSRKTYNPEKIKLYFENNGKLLSGWSDSQTEYDNGTQYGGYIFRKKNEIGEYDFYLGISADAKLFRRDETICYEDGMYERLDYYNLKPNTLLGNSYIGNYGEDSNAVLSAFNDAVTKLHLEKKLVPKDNEKVPTYLKRLKQDYANFYQILMNDDNVVDAYKSMKQHILATLASLIRVPAAIELTTQTNLDIDELIDEIINLPSESFGYFPVATAAIEEANNREKKPLFLFKMSNKDLSYAEKFSKGDRKSRGTENLHTMYLKALLGMTQNVFSIGSGMVFFRHNTEGLAETTARHKANEFIANKNKLNDKKRVFLTMR

SEQ ID NO: 91 - protein, 831 aa, unidentified
  REGION 1..831: note = Cas Enzyme sequence
MDNNNLHAVDGYFATLGAVNTPTMQRENLFALIQNAYTDISDLLDTPYPENKNLAQDKTNVAKVKALLDAIKSLQHFVKPLLGMGDESDKDERFYGELASLWTELDTVTPLYNMIRNYMTRKPYSEKKIKLNFENPQLLGGWDANKEKDYATIILRRNGMYYLAIMDKDSKKLLGKTMPSDGECYEKMVYKLLPGANKMLPKVFFAKSRINDFKPSKKIVENYNNGTHKKGKNFNINDCHDLIDYFKQSIDKHEDWSKFGFNFSDTSTYEDLSGFYREVEQQGYKLSFTNISVSFIDKLVDEGKMYLFQIYNKDFSDYSKGTPNMHTLYWKALFDERNLADVVYKLNGEAEMFYRKKSINNTHPTHHANHPIQNKNKDNKKKESVFEYDLVKDRRYTEDKFLFHVPITMNFNSVGAENINQQVRKYLQQADDTHIIGIDRGERHLLYLVVIDMQGNIKEQFSLNEIVNEYNGNTYRTNYHDLLDVRADKRLKASQSWQTIENIKELKEGYLSQAIHKITQLMVKYHAVVVLEDLNKGFMRGRQKVEKQVYQKFEKMLIDKLNYLVDKHKDANETGGLLHALQLTSEFKNFKKSEYQNGFLFYIPAWNTSKIDPVTGFVNRFDTRYTNAVEAQKFFRKFDEIRYNEEKDWFEFEFDYDKFTQKAHGTRTRWTLCTHGKRLRSFRNPAKQYNWDSEVVALTDEFKRILGEAGIDIHENLKDAISNLEGKRRKYLEPLMQFMKLLLQLRNSRKNPEEDYILSPVADENGVFYDSRSCGDKLPENADANGAYNIARKGLMLIRQIKEAKELGKVKYDISNKAWLNFAQQKPYKNE

SEQ ID NO: 92 - protein, 831 aa, unidentified
  REGION 1..831: note = Cas Enzyme sequence
LNTLLSEHNYNITSYFKSFGVAGKDENNDVFKDIENAYSKVDNLLNVKYPEKDNLAQDKDNVNKLKTFLDSIKRLQHFIKPLSEIENQGSKDERFYGDITILFEELDKITPLYNKVRNRMTKKPYSTEKIKLNFENSTLLNGWDVNKERDYNCAILKKNDLYYLAIMRKGYGRIFIDSPKANEEDIYQKMEYKLLPDAFKMLPKVFFSKSREAEFSPSKEIISIREKGSFKKGASFNIKDCHKFIDYYKSSIEKHNEWRQFDFNFTPTEKYEDISGFFREVDQMGYKISFRDIPSVYIDKMVEEGKLFLFQIYNKDFSKYTKGSPNLHTLYWKMLFDENNLSDVIYKLNGQAEIFYRKKSITYQKPTHPAGQQIKNKNLLNKKGYSQFEYDLIKDRRYTLDKFQFHVPITMNFKANGIKNINPIVNDFIKKTSDLHFIGIDRGERHLLYIVVIDSKGKIKEQLSLNIIENEYKNNKYLTDYHSLLKSKENQIHQERQSWSAIENIKELKQGYLSQVIHKIVNLMVKYKALVVLEDLNMGFKRGRQKVESSVYQQFEKALIDKLNYLVDKQKEPNEVGGLLNALQLTCDFSSFKDMGKQNGFLFYIPAWNTSKIDPVTGFVDLLHPKYESVEKSREFFNKFKEIKYNNEKGWYEFVLDYNDFTTKAEGTRTDWTLCTHGTRIKTFSNKEKNSSWDCVEVDLTKDLNSLFNKYSIPLTNDMKDDIVRQTDTQFFKDLTKLLALTLQMRNSVTDTDIDYLISPVANEDGVFYDSRTCEEDLPKNADANGAYNIARKGLWCAKQIQETSESDKINLAISNKEWLRFVQTKPYLND

SEQ ID NO: 93 - protein, 832 aa, unidentified
  REGION 1..832: note = Cas Enzyme sequence
  VARIANT 809..824: note = X can be any amino acid
MKNNLSQFTNRYSVSKTLRFELIPVGVTKEQINSKGLISQDKQRADSYQEMKKTIDAFHKHFIELAMQNVELTQLQAFNDLYFSSAERKKEESYKAELKKVQENLRKEIANGFKSGEAKDIFSKIDKKELITQLLEDWIKSQDEKFYFDESFKNFTTYFGGFHENRKNMYSDKEQSTAIAYRLIHENLPKFLDNIKVFEKIKLIPELYDKCKELYGNIEEYLNIKYIDEAFEIEYFNEVLTQRQIDVYNLIIGGRVGAEGDKKTQGLNEYINLYNQKQKDKSKRIPKLKVLYKQILSDREKTSFVMDKFEKSEDVTEAINSFYHHNILSYQPNDSPDAENVLNKLESLLAIVGTYETDKIFLRNDAQLTTISQKIFGSYSVIPDAISYYYDQVINPKFEEDYAKAIDKKKEKLDAEKNKFLKQDYFTIGMLQVATDNYFSTLDDTLEIKKKYTPYCIADYFKNHFKAEKNQDSDKDFTLTANIEAKYSCIKGLLENYPEDRMLHQDKKTIDNIKLFLDAIMELLHFVKPLILPSDSILEKDTAFYNQLEPWYDALKEIIPLYNKVRNYATQKPYSTEKFKLNFENSTLLDGWDVNKEEANSGILFIKNGLYFLGIMDKHHNKIFRNIPKKTTDRTYSKVNYKLLPGASKMLPKVFFSAKNIGFYNPSEEILHIRNHGSHTKNGDPQRGFEKLDFNLKDCHKMIDFFKDSIQKHPEWKNFGFNFSDTSTYDSIDGFYREVEAQGYTIGYTEIDEDYIHQFVDEGKLFLFQIYNKDFSPYSKGKPNMHTLYWKALFSSENLKDVIYKLNGXXXXXXXXXXXXXXXXPCANYDEF

SEQ ID NO: 94 - protein, 832 aa, unidentified
  REGION 1..832: note = Cas Enzyme sequence
VIQRLFDSILSLQRIFKVFCPSLYEVDSDGLFVAKFSDYWNVLRGFDKDYDLLRNLFKRKPYSTDKIRVHFGLSNLMDGFVDCWTDMVDKGTQFNGYILRQAHSFVDKNTSKELQEFQRYNYYLVISGNVRLFREKGNALVCEKKKEKLLASDEFSGFERFDYYQSSINNFNREFKRLTGRDRKSFTDEILQNEGKKELKSTYIENLIKVAKSMKRLTALQNLVSDEKVRKYSENLDYETLSAEIGQILATGRERKYVPVSTNEMKNLLKSSKNNKGEEVRTFMFRISNKDLSYAETMQKGERKSHGAENMHTMYFRALLDTLQNTFDIGTGTVYFRKASDKRKMKYDEKNPTHRKGDELAFKNPYNKGKKKSVFGYDLIKDRRYTKDSYLFHLSITQNYQKKGNAEDLNAMVRDYIRTQEDLRIIGIDRGERNLLYATMIDGEGHILAQKSFNVIGYQGTTASGESFQVETDYHQLLNEKAEKMRSLQREWKEMDKIQDMKDGYLSVVVHELAKMVVENNAIIVMEDLNMGFMESRQSQLANVYQKFEEKLRNKLQFYVDKRKRNDEPSGLYHALQLAGTETKDNQNGFIFYIPAWNTSKIDPVTGFVNLFNLKYTNIKDARALFSTFDKIEKNPETGHYDFVFNYSSMARKKMAKKMDGTRSDWTLSTHGGRIVKEQKGNYWEYRKIESLTSEFDALFEEYGIEAGANLQEAIVKCDKAEFFKMLIRLMKWTLQLRNYDDKGNDYLISPVCYRGNEYFCSLDYDNEEGMCISKSPYQMPKDADANGAFNIARKGLMLCERLKEGGKTGVIKGAEWLQYVQKMSERYIGKE

SEQ ID NO: 95 - protein, 832 aa, unidentified
  REGION 1..832: note = Cas Enzyme sequence
MKREPWPWTMQFNWNGDGHDSTLRWHREDWSKVKTKKEFPGQWFASASVKSFRLLSVDLGQKQAGAYAIIEVSCCLSDDEKKNARFIGMTEHGGEHHDWYARVLTTGLHKLPGEDAVVFRSVTELDKQRASARGKATPTGDAFREELSGSAGRIATKDESRKAIDLLTELDQLALLDEDPAKAAVECERLTFPLQNTKLLIALRRAQSFASKLHRWCWFLDPQDEKAREDQPVRRRTAIKEIAEADNHQWLDDKTREMAKARHAILGDAKEDPELHPEIVKALKDRLEDLVKKLPRWLEVIANRVYSSRRGQLVWRNHPEPGMERCHLLDFSLRTKEERDKLTKDEHRLGGQRGLAMERIEQLEELRKRCQSLNQMLRRDIGGKPPLSRDDSIPDPCPTILAKLDDIKEQRRNQTAHMILAQALGLTLAAPTEPKNDTEREMREAKDSHGEYVKVDAKGRPIPADKPESWRGLVDFIVIEDLSRYRTTQGRAPRENSRLMKWCHRAIRDKLKQMCEPFGVPLVETPAAYSSRFCSRTGVAGFRAVELSGDPLTESKWRWRIRKPEEGKKESDDQIKRRERWELLFSQVQKANLGRDGKSKGQELRTLLVPDAGGSIFIPISGLNEAYERPAKNSTNPKLHRPIIEFQPVKLEDNQWKQPRLIHADVNAAVNLGLRTVADPQLWSVHSRLRSERKFGTPPKPKPKTVRGKDKTPEPMQPDTFWVSEKEKRKYGEQTDEKRIEIKLLDAKKANLKASDSRHPNFFNDVADLKTWIHDGAATLEGLPVGCSRPPHLVSSKALWGYIKDQAWQRCIAINAARLKAWGIDPPKEWKT

SEQ ID NO: 96 - protein, 835 aa, unidentified
  REGION 1..835: note = Cas Enzyme sequence
YAAPRICRDKLRSTGDSNLYEAPWLQPMMEALGLDNAPERVNFANCRITLQPVDEANMQLTFPLDVSTEKITAAVARNAVWEKQFNLHPDGESFHNASLRWPHEQQPAKPPVPWHQQLKRFRCLSTDLGQRDAGAFARLLAGCDGDLAKRPARILGTTDGREWRAVLERCGLFRLPGEDARVWRERSRLDEADPGDSGEPFDFREELWGERGRPARSWEADETEELMRKLEAVERDAEGNERLILLPDGWRKALSFPEQNDKLLVAMRRYQSRAARLHRWCWFLTGDARQQDTAIAEIGDAEDERLVSPELKALAQKRDPRAVEELGFQLRERLELAPRLLVRLANRILPLRGRSWLWEKHPAATDENPLHDLTQCGPSLDSRDKPVWLRGQRGLSLERIQQIEELRRRFQSLNQTLRRPIGGKPPIRRDESVPDPCPDLLDKLDNLKEQRVNQTAHMILAEALGLRLAPPPSNKKALRLERDQHGVYEKITDKQGLWIGPVDFVVIEDLSRYRASQGRAPRENSRLMKWCHRAVRDKLKELCEVFGLPVLETPAAYSSRFCSRSGVPGFRAAEVTAGFTREGQWAWLVGKKDEQGNPKEEAQGLLDVDRQLAQAQAELEREWAERVRPGPCPKRTLLVPSAGGPVFVPVVSKAHGCDLSPAVAQADINAAINLALRAIADPRMWTIHPRLRTQREGGEKTARSKKLKAHPDATTTAHEARLFAREKRRYGNASKPLVVHRSPRAKPDETRQPNFFADCAGLQALAEELGNQNREHAWLGREWTTAEVLAEDGLPPLVHSKSFWGCVRAAQWARVRAINDARIAQWKAKLDRMPD

SEQ ID NO: 97 - protein, 837 aa, unidentified
  REGION 1..837: note = Cas Enzyme sequence
MNNKLTAFTGKYQLSKTLRFELKPVGKTLEHIQAKGLISQDEARAASYQKMKKTIDGFHKHFIELAMSTVKLTKLEAFQELFNASPERKKEESYKKELEKVQDSLRKEIVKGFSTGEAKEIFAKIDKKELITELLEQWMQRQNEDDFYFDEKFKNFTTYFGGFHENRKNMYSDQAQSTAIAYRLIHENLPKFLENIKIFEKIKAVPEVYEKCQVLYKEIEEYLNINSIDEAFELDYYNEVLTQKQIDVYNLIIGGRIPSEGKTKIQGLNEYINLYNQRQEKNKRIPKLKILYKQILSDRVSTSFTLDKFTKDQEVLNAVEEYYKFELLDYKPKDKEDTENVLESVKEIVAHLTDYDLRKIYLRNDTKITTISQKLFGNYGVFSTALAYYYTTVIKPNFIEDHQKGNDKKREKLDNEQAQFLKQSYLSLDLLQIALDHYIPTLDQEEDVVKRYSSNCLANYFKDYFKAEKEEGKDKEFGLIDNIKAKYSCIQGMLGTDYPEDKKLVQQKEELFNIKAFLDSLMELLHFVKPLSLPNDSLLEKDQNFYGQFEPLMEQLNGLIPLYNKVRNYATQKPYSEEKVKLNFKNPELLGGWPVDREIATSSVLFRDGENYYLGILDKESKKDFKNLPKPDNPNDVLYKMLYLQAADPSKDVQNLMVIDGKTVKKNGRKEKAGEFMGQNLILEDLKNTYLPDDINTIRKRKSYSKLSDNFSKSDLIAFIDYYKQRAIEYFHNYQFQFKNSDEYRDFGEFTTHINEQAYQINFTEISWKFIDELVNEGKLYLFQIYNKDFSSYSKGKLNMHTMYWKALFEEENLKDAVYKLKDKRKFFIEKVLLKTL

SEQ ID NO: 98 - protein, 838 aa, unidentified
  REGION 1..838: note = Cas Enzyme sequence
AKINQSVQALNGEVPNTLQAYFAALGAVDTDTLQKENLFAQIENAYAEVKELLKTPYPADKNLAQDKRNVEKIKNLLDAVKALQHFVKPLLGDGTESDKDEKFYGELTALWDELDKITPLYNMVRNYMTRKPYSTEKIKLNFENSTLMDGWDLNKETDNTTVILRKDGLYYLAIMNKKHNKVFSIKNIVSEGECYEKMEYKLLPGANKMLPKVFFSKSRIGEFAPSEALLENYRNETHKKGPNFNIEDCHALIDFFKASIDKHEDWCKFGFQFSDTSTYEDLSGFYREVEQQGYKITFRNVSVDYVNTLVEEGKIYLFQIYNKDFSPYSKGTPNLHTLYWKMLFDERNLADVVYKLNGQAEVFFRKHSINYEHPTHPAHQPIDNKNAQNEKRQSTFTYDLIKDKRYTVDKFQFHVPITMNFKSTGNENINQSVNEYIRQADDLHIIGIDRGERHLLYLTVIDLKGNIVKQESLNEIINEYKEFPSINYHDLLTKREENRMKSRQSWQTIENIKELKEGYLSQVIHKIAELMVRYNAIVVLEDLNQGFMRGRQKVEASVYQKFEKMLIDKLNYLADKKSQPEEPGGILNAYQLTSKFVSSQKMGKQSGFLFYVPAWNTSKIDPVTGFVNLLDTRYETREKAKAFFCKFDTIRYNDAKGWFEFAVDYSKFTTKADGTRTHWIICTYGKRIETFRDEMKNSNWSSREIDLTEEFKAHFAKYGINIHGNLKDTIVCQDNTDFFKGMLYLLKLTLQMRNSTTGTEIDYIQSPIADEHGVFYNSTTCSDTLPQNADANGAYNIARKGLWVVNQIKASEDLEHLKLAISNKEWLQFAQNKPYLND

SEQ ID NO: 99 - protein, 839 aa, unidentified
  REGION 1..839: note = Cas Enzyme sequence
MESDNQKVPVSRADRFGRAAAGASKKSAVEVQGIFKKDFWNGRLQVPREQLRCLGRYVEKHGWDNHAIEMRDRLKWTLTLSLNLSPYGPWMEYATRNGLKTDPKYSPHASLNKERGDMAKKNLDSLPRIRILSVDLGLRHAAACAVWETVSTEQVMKACMAAGQKKPSEEDMYVHLRESHPEKKSKKGETVKYTIYRRIGPDTLPDKKPHPAPWARLDRQFIIKLQGEKKKTRKASNKEIWAVHCLERNLGHAVPLIDRLVATGWGSTVKQQSQLEALKTLGWKPIEGRMPESNSNENGYRISLLVGDLMASSVHNMCLALKRHGDRARIAYYLVADEKTKPGGAKEKLNAKGRIEIILDALVLWHNLFSSPMWRDDYAKNLWDEHIASLAGLKIPVAIGERLPSMGREKKQKVIKEMLYPLAKALAGNKTLCDILHEAWKKRWEADDALWENYIRWFKDWILPRKKKIQRENIRRKGGLSLARLSVMENFRKLVQVAYATRLRPDGSKGFGRERLGQRLMDALDNLREQRAKQIASRIIEAALGIGSEGKGWERNKRPRERIQDPRFAPCHAVVIENLNHYRPKDIRLRRENRRLAAWSVARVKQFLSEACELHGLHLHMVNAGYTSLQDSRTGAPGIRCQDVTVTDFMRSGFWREQVTRADKRVKSGEKNTLDDFLVETNSVCESKMSEMKQARVLRLPLKGGKIFVSANPRSPAAKGINADLNAAANIGLAALNDPDWPGKWWYVPCDANSMTPVENKVKGSPVVPKGPMKKLTSGEGKDTVGKKRRQENTCKTRKIVNLWRDVSALPLDGGKDEWKEYAEYINDVRNRVIEILKG

SEQ ID NO: 100 - protein, 839 aa, unidentified
  REGION 1..839: note = Cas Enzyme sequence
EYISAINEKIKDLDVNEIEYDEKINLIENETKSEEIKSKLDSIMEIMHWTKMFIIEEEIEKDVNFYNEIEEIYDELQPLVTIYNRIRNYVTQKPYSEEKIKLNFGIPTLANGWSKTKEYDNNAIIMIRDGKYYLGIFNAKNKPDKKIMEGHQSEENGDYKKMIYRLLPGPNKMLPKVFMSKTGIAEYKPSQYILECYEQNKHIKSDKNFDIKFCRDLIDFFKTSINRHPEWSKFNFKFSETSEYEDISTFYREVEKQGYKIEWTYISEKEIKELDENGQLYLFQIYNKDFSEKSKGKENLHTMYLKNLFSEENLKNIVLKLNGEAEVFFRKSSIKKPIIHKKGSVLVNKTYNENGERKSIPEEQYTEIYKYLNSIGTNELSEKSKKLMEEGKVEYYKANYDIVKDYRYSVDKFFIHLPMTINFKAAGFSPINNIALKNIALKEDMHIIGIDRGERNLIYVSVIDTKGNIVEQRNFNIVNGIDYKEKLKQKELDRDNARKNWKEIGKIKDLKEGYLSLVVHEIAKLVVKYNAIITMEDLNQGFKRGRFKVERQVYQKFETMLINKLNYLIDKDLAVDQEGGLLRGYQLTYIPESLKVLGRQCGYIFYVPAAYTSKIDPTTGFVAIFNYKGMTDKDFVTSFDSIKYDDERGLFAFEFDYENFVTHKVEMARNKWTVYTYGERIKRKFKNGLWDTAEKVDLTYQMRSILEKYEIEYNKGQDILEQIEKLDEKAQNGICKEIKYLVKDIVQMRNSLPDNAAEDYDAIISPVINNNGEFFDSTRGDEDKPLDADANGAYCIALKGLYEVMQIKKNWNEETEFPRKELKIRHQDWFDFIQNKRYL

SEQ ID NO: 101 - protein, 839 aa, unidentified
  REGION 1..839: note = Cas Enzyme sequence
EEKLLDEYIRNKSKKESAYAQLVKTDFYDKKTIPAGDDVQRIQQYLDKVLSLTHIVRGLCADSQDPRTDFVFSDDVSSLEDDRVQIISCYNLIRNFVTKKREKTAKEKQIQLCFGRPAHFEQVWNNKQEGKFGNVDAALLEYAGKYYYMVPAAKNEAKLNFPVTDEPQMGECYNYLATKKAIGFAKAFAKFYIKSPEAMEGFEKTEEPFEISVGNDTMIISRKVYEDYEAKTFRESEEAKNKLIDCAKEFLSKNLSYCIYDWSVLKEANDYVNYGEFCNEVDSIAFRVINRYVSKKLVDDAVERGNLYMFEISSLDMYKDSSRMKNIMALRFNQIMNGMFTGDKSIIINNAPQIRYRPVVIEKKDVHPVGSRLVNKNTTDGRTIPGDVYLELCAYYNGKKDSLSPEASLYNEKVSVKDSDRAHIKDKHYTEEKFLITFSYTANKNVASATSGYQLNEMVRKEIRENGCNIMAVIRGIDNLLYYAVVDENGNRIEAGDLNVVGDTDFYEKLTILGKQRYTDQKNWKHENKVADLKDTYLGQVCRKIASIAVKNNAVIVIDKINESTKRKNAAFDNNMYRKFENALVNSLTDYYDIGIRGDEPGSVKNPLQLTVKEDNGFQNGIIFYQFDTFTKNICMRTGFVNLLNTFEIKTVASKVAFLKKLSDIYYDNDINEFVFEFTWRNIGCILKDEELPLYDGMDKIWKVRTHFTRYMRNAEKNKYVEIDGTEVLKELIRKNHPDMIGGKIDVDRLTSEEVKKVFEIFTLYTNGYIPRMDDAESGYMSPACDWNNFGTIRYDEMTALQLAKKSSLMIGKVKSGKDWKDMNVSRVEWLNHVLKADW

SEQ ID NO: 102 - protein, 839 aa, unidentified
  REGION 1..839: note = Cas Enzyme sequence
MNKQDQYSIKYLDECIMASSIETKAGIEDYYVKVGEIDNENENERRPNVFSSIELAYADAKNLLLSPYPETANLLQDEAATDKIKALLDSIKKLQAFVKPLLGKGKQADKDELFYGSFTQLWEVLDGITLLYDKVRNYLTRKPYSQEKIKLNFANSTLMNGWDLNKERSNTTVILRKNGLYYLGIMDKDSNDVLDIANLTSEGECYEKMEYKLLPGPNKMLPKVFFSDSRIDEFAPSEKIQAIYKDGSFKKGDNFSIEHCRALIDFFKASIQKHEDWSKFGFHFSDTDTYDDLSGFYKEVEQQGYKLTFRNVSVAYIDSLVDEGKLYLFQIYNKDFSPCSKGTPNLHTLYWKMLFDERNLADVVYKLNGQAEVFFRRKSQIANNTVHRANISIDRKNPRNQWAKSVFPYDITKDKRYTVDKFQFHVPITMNFKNNGVNNINPLVNDYLKATDDVYVIGIDRCERNLLYYSLIDKHGNIIEQDSLNEIGNYNYLTKLNEREQERDKARKSWKSIEGIKELKEGYLSQVIHKISELMVKYHAIVVLEDLNFGFKRSRQKFEKQVYQKFEKTLIDKLNYLVDKKTDADVPGGLLNAYQLTNKFESFQKLGKQSGFLFYVPAWNTSKIDPTTGFVDKLNTRYETVDKSRLFFNKFKLIRYNNQENLFEFTFDYNDFSKDLEDTKTEWTVCSNGERIEQFRNREKNNNWDTRTIVLSDAFKKFFKENGIDISGNIKAQIVERTDKRFFEQLLHLVRLMLQMRNSDIEQDYIISPVRNDNGTFFNSNNPGGMPKDADANGAYNIALKGLWVVRCIKQSDDLTKLKLAISNKEWLQFIQNKPYKLN

SEQ ID NO: 103 - protein, 842 aa, unidentified
  REGION 1..842: note = Cas Enzyme sequence
HRFAASCAVWEAISTEDMAKACREHGHRKPQESDLFIHLTRTVKKERTEGRDKGKTVDVVETTIYRRIGSDRLPDGSEHPAPWARLDRQFFIKLQGEERPARAATNGKLKDGSPTETNEVAVVAKLARDLDLRHEDADDPTGRSVDELMRRAVRIATLGLKRHGRVAKIAYVFKPDCSGIPGMGGSLKAITRGDDDHVKFLTNALADWHALAIDTHWDGSAARQLWNQHIKPVPHGFEISEPTPPDPDAERPTRQQRRKSEDELREKLKPIAEHFAKIDPTSTKGIHEAWANVWNTDDGIERTKNDFEHTLIRDENGKVIGSYTSPKPGKEPSGGWHERLRMLTDWIMGWHLAGAQSKHWNRNVGGLSLTRIATMRSLYQLHKSFAMRPRPDKVQGAPERGESNAGVAQSILDAMERMREQRVKQIASRIVEAALGVGMERDRVWDEMKKKWRYPKRPRGLLYHEDGEGNAHGDQRFKTCHAVVIENLRSYRPDELQTRRENKALMSWSAGKVRKYLEEACQLHGLHLRKVMPNYTSRQCSRTGLPGVRCVDVFVDPTTGEPKTYWWKKALSAAKKKTGARNDTKTTGDAESRFIVDLADHLATLKNNGKSFPKSVRVPHNGGELFVAAPPWSCRDNGHCPCQLCDRKRALQADLNAAANIGLRALLDPDFPGRWWYIPAAMEAGWRVPAPKSCAGAAGLDGWKVAPKDGYLSADGMPLTAADDETVKQAEEGVDSAKTELDTAKKAAKKPGADQAALNTAKERHEQAKAALKEAKKAASQKEIVNIWQDPCAERASPASGRWQETTAYWAWVRKRAIGALSVRSGLVERIDPSGLEADVVG

SEQ ID NO: 104 - protein, 843 aa, unidentified
  REGION 1..843: note = Cas Enzyme sequence
HRFAASCAVWEAISTEDMAKACREHGHRKPQESDLFIHLTRTVKKERTEGRDKGKTVDVVETTIYRRIGSDRLPDGSEHPAPWARLDRQFFIKLQGEERPARAATNGKLKDGSPTETNEVAVVAKLARDLDLRHEDADDPTGRSVDELMRRAVRIATLGLKRHGRVAKIAYVFKPDCSGIPGMGGSLKAITRGDDDHVKFLTNALADWHALAIDTHWDSSAARQLWNQHIKPVPHGFEISEPTPPDPDAERPTRQQRRKSEDELREKLKPIAEHFAKIDPTSTKGIHEAWANVWNTDDGIERTKNDFEHTLIRDENGKVIGSYTSPKPGKEPCGGWHERLRMLTDWIMGWHLAGAQSKHWNRNVGGLSLTRIATMRSLYQLHKSFAMRPRPDKVQGAPERDESNAGVAQSILDAMERMREQRVKQIASRIVEAALGVGMERDRVWDEMKKKWRYPKRPRGLLYHEDGEGNAHGDQRFKTCHAVVIENLRSYRPDELQTRRENKALMSWSAGKVRKYLEEACQLHGLHLRKVMPNYTSRQCSRTGLPGVRCVDVFVDPTTGEPKTYWWKKALSAAKKKTGARNDTKTTGDAESRFIVDLADHLATLKNNGKSFPKSVRVPHNGGELFVAAPPWSCRDNGHCPCQLCDRKRALQADLNAAANIGLRALLDPDFPGRWWYIPAAMEAGWRVPAPKSCAGAAGLDGWKVAPKDGYLSADGMPLTAADDETVKQAEEAVDSAKTELDTAKKAAKKPGADQAALNTAKERHEQAKAALKEAKKAASQKEIVNIWQDPTAQRTSPSAGRWLETTAYWNTVKVRVLARLRPVNGLDEPGRPERVEGDDSPW

SEQ ID NO: 105 - protein, 847 aa, unidentified
  REGION 1..847: note = Cas Enzyme sequence
FAQIENAYEDARAILQLKDTGDTLSQNKSAVAKIKALLDALKGLQHFIKPLLGSGEENEKDELFYGVFLMMWVELDTVTPLYNKVRNWLTRKPYSDNKIRLYFDNKGLFLNGWVDSKTESDNATQYGGYLFRKKNAIDEYDYFLGVSADTKLFRSFNLVAPSDTSSYERLDYYQLKSQTFYGGRYKGDYAQESIEIQSAIDTFVYKYGSKNIKTKINNEKSKRHPKVSTASGYLRFIEQYEKDLYDALQKDNNFIEANLNMITSFKETLLSLDRIPLAKQIANRNYKLFSEMMEDIDTLLKSKLFSYFPISNSELEDAICRELKPLYLFKITNKDLSFAETYQKGLRKSRGRDNLHTMYFKALMSGEQNVYDIGSGSIFFRKHTIDYSNEILIKGHHYEMLKDKFQYPIISNRRYAFDKFQFHLSICINYNSPKIKDINPIVQDTIKQGGFSHIIGIDRGERHLLYLSLIDLKGNIVKQMTLNEIVSEYKGQTYRTNYHDLLTKREGDRTDARRSWETIETIKELKEGYLSQVVHIISKMMVEYNAIVVLEDLNTGFMRGRQKIERQVYEKFEKMLIDKLNCYVDKQVSPTAEGGLLHPLQLTCDAQKWKRSHQCGCLFYIPAWNTSKIDPVTGFVNLLDTRYDTREKARVFFSKFQRISYNIKKDWFEFALDYNDFTAKAEGTRTQWTLCTYGERIRTFRNPQKNHQWDDERIMLTDTFKKLFDKYDIDINGNLKEAISAQTDAQFFKDLLGLTKLLLQMRNSRTNSEEDYLLSPVADDAGHFFDSREGISSLPVDADANGAYNIARKGLWVVRKIQETPEGEKQTLVITNKEWLQFAQTKPYLCD

SEQ ID NO: 106 - protein, 848 aa, unidentified
  REGION 1..848: note = Cas Enzyme sequence
MKEIKELTGLYSLTKTIGVELKPVGKTQELIEARKLIEQDDQRAEDYKIVKDIIDRYHKDFIDKCLNCVKIEKDDLEKYVSLAENSNREAVDFDNIKTKMRNQITESFKKNPLFVGLFKKELITNYLPDFVSEEERVVVNKFSKFTTYFDAFYENRKNLYSGDAKSGTIAYRLIHENLPMFLDNIASFNKISETGANEYFSSIEAEFTDTLNGKHLADLFQIDYFNNTLTQKKIDNYNYIVGAVNKAVNLYKQQHKNVRIPLLKKIHKMILSDRVTPSWLPERFESDEEMLTAIKAAYESLKEVLVGDDDDSLRNLLLNIDNFDLEHIYIAKDSGLTSISQQIFGYYDTYTLAIKDQLQRKNPATKKQRENPNLYDERIDKLYKKEDSFSIAYLNRLVDTKEHITINEYYRLLGSYCREGGKSNNDFFKQIDGAYSAISYLFSAEHGEIAQSDSDTAVVQKLLEVYKGLQRFIKPLLGHGDEADKDNEFDAKLHKVWDELDIITPLYDKVRNWLSRKIYNPEKIKLCFENNGKLLSGWSDNQTKSDNGTQYGGYIFRKKNEIGEYDFYLGVSSDAKLFRHDATIGYEDGMYERFDYYQLKSKTLLGKSYVGNYGEDSNAVLSAFNNAVTKLHLEKKLVPKDNENVPKYLKRLKQDYAGFYQILMNDDNVVDAYNSMKQHILATLASLSRVPAAIELATQTDLDIDDLIDEIMKLPSESFGYFPVATAAIEEAKKREKKPLFLFKMSNKDLSYAEKSSKGLRKSRGTENLHTMYLKALLGMTQNVFSIGSGMVFFRHQTKGLAETTARHKANEFIANKNKLNDKKKSIFDYEIVKNKRFIKDKYLFICL

SEQ ID NO: 107 - protein, 848 aa, unidentified
  REGION 1..848: note = Cas Enzyme sequence
MLGSDFGTIEEKLLDEYIRNKSKKESAYAQLVKTDFYDKKTIPAGDDVQRIQQYLDKVLSLTHIVRGLCADSQDPRTDFVFSDDVSSLEDDRVQIISCYNLIRNFVTKKREKTAKEKQIQLCFGRPAHFEQVWNNKQEGKFGNVDAALLEYAGKYYYMVPAAKNEAKLNFPVTDEPQMGECYNYLATKKAIGFAKAFAKFYIKSPEAMEGFEKTEEPFEISVGNDTMIISRKVYEDYEAKTFRESEEAKNKLIDCAKEFLSKNLSYCIYDWSVLKEANDYVNYGEFCNEVDSIAFRVINRYVSKKLVDDAVERGNLYMFEISSLDMYKDSSRMKNIMALRFNQIMNGMFTGDKSIIINNAPQIRYRPVVIEKKDVHPVGSRLVNKNTTDGRTIPGDVYLELCAYYNGKKDSLSPEASLYNEKVSVKDSDRAHIKDKHYTEEKFLITFSYTANKNVASATSGYQLNEMVRKEIRENGCNIMAVIRGIDNLLYYAVVDENGNRIEAGDLNVVGDTDFYEKLTILGKQRYTDQKNWKHENKVADLKDTYLGQVCRKIASIAVKNNAVIVIDKINESTKRKNAAFDNNMYRKFENALVNSLTDYYDIGIRGDEPGSVKNPLQLTVKEDNGFQNGIIFYQFDTFTKNICMRTGFVNLLNTFEIKTVASKVAFLKKLSDIYYDNDINEFVFEFTWRNIGCILKDEELPLYDGMDKIWKVRTHFTRYMRNAEKNKYVEIDGTEVLKELIRKNHPDMIGGKIDVDRLTSEEVKKVFEIFTLYTNGYIPRMDDAESGYMSPACDWNNFGTIRYDEMTALQLAKKSSLMIGKVKSGKDWKDMNVSRVEWLNHVLKADW

SEQ ID NO: 108 - protein, 849 aa, unidentified
  REGION 1..849: note = Cas Enzyme sequence
MSAGTDYITVEEMLIKKLEELKSRKKESYHLMTTCAFWNNDNKPTQDENGVIQKYLDDVLAVVRFTKIFSIDVKLTNADTIFMEDVAGMDKDKHGINKTYNMIRNYLTKKTELDAKQRRVQLCFGRPTHFEQKWNLMHGDKGIFGNCDAGLLEKDGCYYYIVPASKNGEKLNIHVSDCEDEADSYNMLSTKKGMGFLKMLIKCTLKSKSAIAKYKETDEPFELPIGDETITISKKMAEDYANKKYSKSKEELIKVIDFAKEFIAKHPSFKRYDLSSLKESSAYDNLKQFSDEVDSLCFAVTRLYVSKEQIDDAVEKGNLYMFMITSQDMYKSADKKHNIYSIRFNAIMKSMFEAGNHIIVNNSPSIYYRPALVEAEDKHPAGSILVNKLTTEGKTIPGEIYLELCAFYNGKCDKLSPLASVYNEKVSVKESTFPHIKDKHYTEEKFSITLSYKMNTNVVGNTSVFTLNNLVQEDIRENGCNIMSVIRGMDNLLYYCIVDSGNKRIASGNLNTIGNADYYEKLCVLGTQRYIDAKNWKYEKKVAELKETYLRQICRKIIKIAIENNAVICIDKVSDLRKNKLSAFDNQVYKKFENTLITALANYYDTSIPNTEAGGSLNPLQLAVEGADTMQNGILFHVAETNTRNICMKTGFINLMSTFGISTVKAKMEYLKKVSRIYYDSKADDFVFEFTWRNLGCCLKKDELPLYNGLDKVWQLHTHLTRLKWNKEKSQYEEIDGTELIKAIRRSHSDMIGKDIEVDMLSSKEIQTLYDVFILYANGFMPKEFMEDTSSYDSPIVPWSSVGRIEYDEMTAYQLCRKASLTMEKIKKGLSSKELVVYRTEWLNYLLEN

SEQ ID NO: 109 - protein, 849 aa, unidentified
  REGION 1..849: note = Cas Enzyme sequence
QEGVKLLNLDRINYNDFSDHFISDYFKNLINEKIIDEITNHKLDFDKINYNNLNSFSDNEKQLIKILLDSILGFYNSIKPLYVNIKSSQEEKTQEAYELDSDFYNDFQIIIDSFKKIIPIYNKTRNYLTKKPYTTKKFKLNFDNSTLLDGWDINKEKDNYSLLFKKDNQYYLGICSKGNSTDISKYIQKKVFNSGDYFEKIDYKLLPGPYKMLPKVFFSKTNIEYFSPSEEIISIRNYASYSKNGTPQKDFDKEEFNITDCHKLINFYKFSLNKHHEWKNFNFNFKPTDQYKDINEFYQDVEDQGYNLSFKNIDSKYILDLVDSGKLFLFKIYNKDFSKFSKRTPNLHTIYWNELFSEENLSKLIYKLNGKAEIFFREKSNIKNNTIHGKNQLIQNKNPINNKTESIFEYDIIKDKRYTQDKFLFHCPITINFKSRGNGKDIHKQINNYIKDFEGNINILSIDRGERHLLYYTLLNSDGKIISQNSFNNISDGFNRSFDYQDKLDQREKERDQSRKSWTAIENIKYLKEGYLSRVIHEIAKIAIENNAIIVLEDLNFGFKRGRFKIEKQIYQKFEKMLIDKFNFLIFKKRSKESIGGALNGYQLTNKFESFSKLGKQSGILFYVPASYTSKIDPTTGFFDLIRPKYESVDKSIQLIKKFEYIKYNSDMDMFEFNYNYFNFNNELKLDRKNWCIYSNGSRLYNFRNKDKNNEWDTKEINLTKELKDLFESYSIDYNSTQNLIDRIILIDHKDFFEKLIYILKLMLQLRNSIPNSKEDYILSCVKNKDGLFYDTRKNMTSKSLPVNADSNGAYNIGIKGIMIIDKIKNNLEIKITKEEYVNFIINKNDYGK

SEQ ID NO: 110 - protein, 850 aa, unidentified
  REGION 1..850: note = Cas Enzyme sequence
KYFKSRKSFSINLLNQSILLLKFEDEQALQRIETYYALLGVSQKKENSFFDEIEQSYNSVKDLLLEPWDDKKNLAKDEKNVDLIKAFLDSLKDLQHFIKPLLGHGDEAEKDERFYGEFMSHWDVLDAVTPIYNKVRNYMTRKPYSTEKFKLNFENSTLLSGWDVNKETDNAAVLFRKEGLYYLGIMDKQHNKVLKKSFSEQKGGYEKIDYKLLPGANKMLPKVFFSKSRIEEFAPTNELMKNYKLETHKKGKTFNIEHCHSLIDFFKDSLNKHDEWRNFNFKFSDTKSYKDLSGFYREVEQQGYSISFRSIPDDYINELVDSGKLYLFQIYNKDFSPYSKGTPNMHTLYWKMLFDERNLANVVYKLNGQAEIFYRKSSITKEDTITHKAHKSIANKNSLNKKKESVFEYDIIKDRRFTLDKFQFHVPITMNFKAEGNTNINEKVNHYLVDNKSTHIIGIDRGERHLLYLVVIDLQGNIVEQFTLNEIINNYNGNEFKTDYHRLLDEREGSRASARKDWKTIENIKELKEGYLSQVIHKISQLMVQYNAIVVLEDLNFGFMRGRQKFEKQVYQKFEKMLIDKLNYLVDKKKDAEELGGTLKALQLTNKFDSFKKLGKQSGFLFYIPAWNTSKMDPVTGFVNMLDTRYSSVEKSRNFFNKFDTIAFNKVDNTFSFSFDYNKFHARAEGTKTQWTVVANNSVRYRYKRELNNGHGGQQAYQIAQELELLFGKYNISYGAGNNIVEQIVEQSEKDFFVQLLKLLSITLSLRHNNGKQGAEEEDFILSPVADKHGVFFDSRLAGDNLPKDADANGAYNIARKGLWIVEQIQTADDLKKVKLAIKNKEWLNFAQGN

SEQ ID NO: 111 - protein, 851 aa, unidentified
  REGION 1..851: note = Cas Enzyme sequence
SGKIEIDAEEKIIIKNFADDVLFIYQMGKYFSLEKKRLWNMEYELDPLFYLHPETGYMQFHTNAYESIVQKYNDLRNYLTKKTYSEEKWKLNFQNPTLAAGWDKNQESDNSAVILRKDGRYYLGLMRKGHTHLFVEKYQSQVSEDSSQGQYEKMVYKYIKDIVTGIPKSSTQMKEVVEHFKESSDDYILEKGPSIGKFVTPLIITEEVFNLNNKIFLKTNLNRAVLRGEILKKEEKNHIKLFQKDFVKLGGDPTLYKKSLLIWIDFCKKFLESYPSCTFFDYSRLKESIQYESLDEFYEEINSLSYVISFDKISQEYIEKQNAEGNLYLFEIYNQDFAIGKTGKKNLHTMYWEGLFSVENTNGFPLKLNGEAEIFYRPKSIEAEREKRCKSKRDIIKNKRYTEDKIFFHCPITLNRGKGEAKYFNQEINDVLANNENINIIGVDRGEKHLAYYSVINQKQEILESGSLNSVGGKNLNGEIVSVDYAEKLERKANEREQARRDWQSVEGIKDLKKGYVSQVVRKLADLAIQYNAIIVLEDLNMRFKQIRGGIEKSIYQKLEKALIDKLSFLVEKGEIDPKKAGHLLNAYQLTAPFESFQKMGKQTGILFYTQASYTSKIDPLSGWRPNLYLKHSNAKKDQAIISQFSSILYNTEKNRFEFTYDVKKFQTLKEWPKNTVWTICSSVERFRWNRTLNQHKGGYDHYTDMTEQFDILFKSYKIDIRSDIRVQIMNLEAKGNEKFFADFIFFFNLVCQIRNTDPLKEKDDPLGDFILSPVAPFFDSRKAEDFGKNLPKNGDDNGAYNIARKGIIILDKISAFKEKEGSCKDLKWGDLYVSQSEWDTFAQMRRETKK

SEQ ID NO: 112 - protein, 852 aa, unidentified
  REGION 1..852: note = Cas Enzyme sequence
SIRELEHFAALCPEEHDQNSILSYISSATEEKTSAVTVAYDSAEKLLSENYSENNDKKLCRNDAAIEMVKNLLDSIKEVEWLLKPLLGTGKEENKDDTFYGRFLPLFESLSELDKLYDKVRNYVTQKPYSKDKIKLNFSNDIFLEGWAQSLEIARSAQLFRKGNTYYLAAMDKDLRSALPKKYIAPSSSDDALEKIVYQQMASPAKDIPNLMVINGKTVKKNGRKEKSGDHIGENIILEQLKNEYLPARINEIRKKRSFSRTSEHFSKEDLAEYIQYYSERVQEYYSSFDFNFKDATDYSSYDEFLKDVDGKAYQITYESVSYKQIMSLVDSGHLYLFQIYNKDFSPHSHGKENLHTMYFKMLFDERNLADVVYQLNGGAEMFYRKASIKDGEKIVHPANLPVKNKNSLNEKKESVFGFDLVKDRRFTKRQFSLHLSITLNFKSEGREFINHDVRLALKNSEDNCVIGIDRGERNLLYVCVINGKGEIVCQQSLNEIISDNSYKVDYHKLLDDKEKARDAARKSWGTVENIKELKEGYLSQVVHKICELAIKYDAVIALEDLNFGFKNGRFKVEKQVYQKFENMLISKLNYLVDKARAADEAGGLLNAYQLTNKADGVNRGRQNGIIFYVPAWLTSKLDPTTGFADLIRPRYTSIADTKSFIQRIDDIRYNSSEDLFEFDFDLEKFPNTAASYKKKWTVCTNGERIKTFRNENKNGEWDNETVLLSKAFKNLFSEHRVDIAKDIKSQLLSVDAASFFAHFMKLLALTLQMRNSITGSDIDYLISPVRNASGSFFDSRNLDPALPENADANGAYNIARKALWAIDLLKNTPDDELQRADLFIRNADWLKLAQK

SEQ ID NO: 113 - protein, 854 aa, unidentified
  REGION 1..854: note = Cas Enzyme sequence
VPVPVGRAKKVRRKKMESDNQKVPVSRADRFGRAAAGASKKSAVEVQGIFKKDFWNGRLQVPREQLRCLGRYVEKHGWDNHAIEMRDRLKWTLTLSLNLSPYGPWMEYATRNGLKTDPKYSPHASLNKERGDMAKKNLDSLPRIRILSVDLGLRHAAACAVWETVSTEQVMKACMAAGQKKPSEEDMYVHLRESHPEKKSKKGETVKYTIYRRIGPDTLPDKKPHPAPWARLDRQFIIKLQGEKKKTRKASNKEIWAVHCLERNLGHAVPLIDRLVATGWGSTVKQQSQLEALKTLGWKPIEGRMPESNSNENGYRISLLVGDLMASSVHNMCLALKRHGDRARIAYYLVADEKTKPGGAKEKLNAKGRIEIILDALVLWHNLFSSPMWRDDYAKNLWDEHIASLAGLKIPVAIGERLPSMGREKKQKVIKEMLYPLAKALAGNKTLCDILHEAWKKRWEADDALWENYIRWFKDWILPRKKKIQRENIRRKGGLSLARLSVMENFRKLVQVAYATRLRPDGSKGFGRERLGQRLMDALDNLREQRAKQIASRIIEAALGIGSEGKGWERNKRPRERIQDPRFAPCHAVVIENLNHYRPKDIRLRRENRRLAAWSVARVKQFLSEACELHGLHLHMVNAGYTSLQDSRTGAPGIRCQDVTVTDFMRSGFWREQVTRADKRVKSGEKNTLDDFLVETNSVCESKMSEMKQARVLRLPLKGGKIFVSANPRSPAAKGINADLNAAANIGLAALNDPDWPGKWWYVPCDANSMTPVENKVKGSPVVPKGPMKKLTSGEGKDTVGKKRRQENTCKTRKIVNLWRDVSALPLDGGKDEWKEYAEYINDVRNRVIEILKG

SEQ ID NO: 114 - protein, 855 aa, unidentified
  REGION 1..855: note = Cas Enzyme sequence
MPSNNSIFSEFTNLYSLTKTLRFELRPTEETKVLLQKTNNLGLTPVQTDQKIDDLYNKEMKPMYDKLHEKFITESLQKVEFDLETLSELEKNYLEFKKLSKNKKENQKQLEILQKNDKGKIVGRIPDLQSKLRNSIVVNYEKTAENWKKEYVIKNKDSQEQSISKEKSYKILTESSSLKLLQLIYPEKADLIKDNFIGFHTYFTGFNQNRTNYYTNDGKVTEVAFRCINVNLTKFIENKAIFESAKIKISSLSEFDEYFKLEKFQNCLTQTGIEDFNDILATIKSKINLEYNQKANKNEQIRGFNKLHKQIGCKTRQQNELEKSGTSQYPDYLEKVGLGFKISKNGKDYQIWEAVESLSKQLEKKVEELQKGYMDFFQNWESGDYKLNEIWFRKEALNTISGRWFGGSNWSVLGRVLSYNGVGKTEDGEYKIPVFVNLLDIKEALEKLENGIEFDLFGKIKKQKENKENSELTKYTAENLFLDRYKENFKVSLFETFLAIWKYEIETKFKEIEKFKEAFNKVKSTKFDKNIKDENGLSLHTKVVKNLVEDGYLNLLRLTKYHTTDKKGELVADCHQDGNFYEELNNFWGDDTEPNNIVMYHKALQSSLTEKPFETDKIKLNFENGMLLGGWSDGQEKNKGGVILQNQDKFYLGILINRGFFRTDKLNELYQTEEQNWQRLILTNLKFQTLAGKGFLGKYGQSYGELGKIEPLKAVKLLQEFIKENYLAKYPQLKNVAEKEYQEKKVFDAEIKVALEECFTMNFVPIKAEILQQGLQTEQLYLFEITNKDFARKNPESKENLETIYWKNLFSLENLKSPKIALNGGGEIFFRKGQKEKLVSKKDKKDKEILDAKRY

SEQ ID NO: 115 - protein, 855 aa, unidentified
  REGION 1..855: note = Cas Enzyme sequence
LFQQDHWNGRLQAPRIQLDAIARHVDEHGWDAKARGMIDRIRWLVSFSAELTQQGPWTEYCDRFEENAPAKPFTSQKGEYAVKHRDNDQRKGQAKLILSRLPGLRVLAVDLGHRYAAACAVWEAITQEQMQQACADAGIPLPDASAMYVHLLRTNSLGKPTTTIYRRIGPDVLLDNTPHPAPWVRLDRQFLIKLQGEDRSARKASPDEIAAVERFEQWTGQVCSDTDPPRELTVDALMSDAVRTARFALARHSRRARIARDLIAKTRLTSGNREQVLDDAGRLELLLDMLADWHTLVTDWRWNDESARQLWNSRLAVLDGGSPLQLPTQSQQEFPKAQRREAEQALRAELQPLAQTLAGNEMLRRELHRAWCARWSADDDQWKQQLKWLSRWLMPRRLSRLVEVVKQNGKRVKRRKPIREAIASASNVGGLSLTRITTLTEFRRKVQVGYFTRLLPDGTHAELGAHFGQSTLDAIQRLKDQRIKQLASRIVEGALGIAVEQDPVWDDVKRKWRDPKRPRQRSTDPRFAPCHAVIIEDLSHYRPEETRTRRENRATMDWKSAETRKRLADHCQLYGLYLRDVNPQYTSRQCSRTGLPGVRCADVPVADFLDKPWWRKAVKRAKERKEHPTKDKPYDAEAQLLVALDAEWPDRSAVPEAERSAYAERVKSAKLLRLFTKGGDLFVAAPPSSCHSHGHKPCPLCDGKRAVQADLNAAANIGLRALLDPDYPGKWWYVLCGEADAVPRADKVKGSTCFGKEPEQFGALQSATEPIPLTQDGAAGSKKAKNRGRRQKDGQNSNYWADPSGSPLRNAANHGFWLPTPAYWRWVRKRVIAVLRRHNSLTECPTKDLKPDDAT

SEQ ID NO: 116 - protein, 856 aa, unidentified
  REGION 1..856: note = Cas Enzyme sequence
IKSFSIRELEHFAALCPEEHDQNSILSYISSATEEKTSAVTVAYDSAEKLLSENYSENNDKKLCRNDAAIEMVKNLLDSIKEVEWLLKPLLGTGKEENKDDTFYGRFLPLFESLSELDKLYDKVRNYVTQKPYSKDKIKLNFSNDIFLEGWAQSLEIARSAQLFRKGNTYYLAAMDKDLRSALPKKYIAPSSSDDALEKIVYQQMASPAKDIPNLMVINGKTVKKNGRKEKSGDHIGENIILEQLKNEYLPARINEIRKKRSFSRTSEHFSKEDLAEYIQYYSERVQEYYSSFDFNFKDATDYSSYDEFLKDVDGKAYQITYESVSYKQIMSLVDSGHLYLFQIYNKDFSPHSHGKENLHTMYFKMLFDERNLADVVYQLNGGAEMFYRKASIKDGEKIVHPANLPVKNKNSLNEKKESVFGFDLVKDRRFTKRQFSLHLSITLNFKSEGREFINHDVRLALKNSEDNCVIGIDRGERNLLYVCVINGKGEIVCQQSLNEIISDNSYKVDYHKLLDDKEKARDAARKSWGTVENIKELKEGYLSQVVHKICELAIKYDAVIALEDLNFGFKNGRFKVEKQVYQKFENMLISKLNYLVDKARAADEAGGLLNAYQLTNKADGVNRGRQNGIIFYVPAWLTSKLDPTTGFADLIRPRYTSIADTKSFIQRIDDIRYNSSEDLFEFDFDLEKFPNTAASYKKKWTVCTNGERIKTFRNENKNGEWDNETVLLSKAFKNLFSEHRVDIAKDIKSQLLSVDAASFFAHFMKLLALTLQMRNSITGSDIDYLISPVRNASGSFFDSRNLDPALPENADANGAYNIARKALWAIDLLKNTPDDELQRADLFIRNADWLKLAQK

SEQ ID NO: 117 - protein, 857 aa, unidentified
  REGION 1..857: note = Cas Enzyme sequence
DGNVRVDAFVSLADVENALAEKITEDTLKERIIEEFRLEKKAPAFSQFLMLFAKEMGKLDAGYRAKNKTFSKLNLKIFDRGKKDDHVDKLKDALECGLNIVQFVKYFALSSKKAEDKPASISSEFYNRYDDLYGEPDAKHIIVRYHDAFRNFLTLKLEDADKIKINFESGTPIKWTTRGYIFRDRDTQIYNVGILVKGGGTQSDFEPNKKTKGVYGIESSPFEQMFYQQLKFQTLAGRAYIRDYKLKYSQDPNAVLHLQELIKKQFIKTYPSLQPLISSKYTSKKEFDLAVKECLKGCYALAFMPVVRDYVIKKESEGAIYLFEISYRDKRSKIGALKNIHTLYFEELFSQKNCEHVTLKLNSEGTEIFSRKAQIQEEHEKRRNVEVIKKKRYTTDKIFLHLPIKLNPNAEQVNAGFRYRYNQEINSMALGHGEGNIIGIDRGEKHLAFYSVINRDSKIIASGSFNEINGVNYFEMLRMREKERLEQRRSWKAVSQIKDLKGGYISQVIHQLAELVIEHNAIIVFEDLNLRFKEIRGGVERSVYQQLEKAVIEKFSYMVFKKREALAPGGVLNGYQFATPVQSFEEMSRQNGIIFYVNPEYTSITDPITGWRQHIYLSSSANDSTLLEAFTKKIQIGWDELKQSYTFSYNQKDFARDKDAVSHEWVLYADMPRIDRYRNKDGYWEAHKINPNELLKELFSAWEFHQLEGDMSEQIAIMYADKALQGEREVNGKKQRFFKALRYYLNIIQQIRNSDSVRYVPDRDKEGNIKEDKDNKWVVKKIGDDIDFIASPVEPFFAIPSQYSKENLCGLKIENGDANGAYNIARKGIIALQRVRENPEKPELYITRSDWDRFVQK

SEQ ID NO: 118 - protein, 857 aa, unidentified
  REGION 1..857: note = Cas Enzyme sequence
VIRNYLYNEYDKAHSSKKIKDIEKYEEDRRKDLNKIKYYSLADIFVCVNENEFVNRLNNDLRDNITAITNAVSSFLTLSATSKLLGDESNTEIIKNLLDALIELKNTFGIFNVECNESKDEMFYSAYDEINSHFSGLTKLYDKVRNYLTQKPYSQDKIKLNFGNSQLFNGWDLNKEKDYQTVMMRKGNDYYVGIIDRESKNIFQNMPEYADGPCYEKMIYKLLPGPNKMLPKVIFAKSNSGIFQPPKEIKDKYERGTHLSGPNFNLNDCHTLIDYFKSCLKKYEGWNCYDFHFSDTSSYRNISDFYREISEQGYKISFVSVDESYINECVEQGKLLLFRIYNKDFSEYSKGKKNLHTLYFTELFSEENLANPTFLLNGGAEMFYRFASPKLDPNKVTHPKNQPIKNKNPLNAKKESVFAYDLIKDKRYVRAQFSFHVPIKINAFDGDSGYNKVSNKVRELLCECDDNYVIGIDRGERNLLYVCVIDGKGRIVEQFSANIIEDDDNKEIKTDYHYLLDKRESERLEARQSWKSINGIADLKKGYLSQVVHKICLLVEKYDAVIAMEDLNSGFKNSRKKVEKSVYQEFEKALIEKLNFLSFKDRQPNGVGGLRHAYQLTDKFESFQKIGLQNGIIFYIPAWNTSKIDPSTGFVDLLNIKYSSIEATGNFFKKFDNIYYDNQRDKFAFSFAYTNFGKNFDYKNKWTVYTNGDRIETFRINNNQFDCRTVFPTELLKGAFESVGIAYGDGHNLIDDICAIKSKDFYEKVLHALKLALQMRNSNSKTGDDYIISPVLNINGEFFDSRNYSGVDADMPTDADANGAYHIAKKCLWAIDNIKAGNNKISITKKEWLEYMQRGNQ

SEQ ID NO: 119 - protein, 858 aa, unidentified
  REGION 1..858: note = Cas Enzyme sequence
LASKEHDKILQIFEKEDVGLLGSKVAVERLRKYEAERHEQLKSFGLATDDDPYRFSRRTIRAWDRVQEAWKKKPDSSEADRLAVLAELQTKLSGKFGDPDLFRWLAKEENKGLWSGSEVVAKVAHLNTVEKELKRRSPNATFTPPDAVHHPRWLMYEPKNGSNLRNYELHSNGYEVTLDVPLLQKKPAGLEEINQVFTLCPSSQFSHPRFEGTDKVVRVSYQTAGQDFIADLKSSEVLFSRQYLENRNDEQLLEGDIGSVWLKVVLDIDYKAPKDWLDARGKIARSGAVEHFKTSLATNSKFEKEVVSGTRVLSIDLGLRSFAACSVFELVDEKPKQLCFSIHGKPNLWAKHERSFLLELPGESSPTTEVEDARATASKELRRIKQEINKLKSISRLVLSQTPEDRLAAINDIELEFLAPDEASTFDQCFQEQIRSLKLCTDVETDNWAKCIKESFTVIEELLGKEISQWRKATRRKVTEYGATRLGRDYQGGKSAWAIEYLTNVRRTLQAWSLHGRRSGEIRRADRGSQGTFAARLLDHINALKEDRIKVGSDLIVQAARGFVRGIGDRWEQRFKPVRFIFMEDLARYRFKVDRPRRENSQLMRWAHREIRRQVEMQAEIYGILVGDTGAGFTSRFYAKNHAPGCRCQVLTVKDMKSPVFLQRLIEEGIADTIESLKPGMRIVRDGGPDFITLDRDRKPIVIHADINASQNLQRRFWTRHGDPYRLTAIKVNVNGRDAYYCDSTGKRLTGALEEAYGSKYICLMLAADGNGFVVENLKKAQWQRVVGQNAVDDEESSSEDELGLEFHDDFAEVQKEGGRETFFRDPSGRLLNPNRWFLSKEYWGRVKSQIAASLKRQ

SEQ ID NO: 120 - protein, 858 aa, unidentified
  REGION 1..858: note = Cas Enzyme sequence
MTMGLWNGSRIEDTPLLWQSKRFGSDIGQAGAEHPLVASRADRFGRAVAMAKDNAPVVPSGLFDLADWNGRLQAPRRQLDAIAAIHDRTDLSVEEKRQLVAKRIRTIRWLVTFSAKLQSRGPFIAYAAQHGFDWRYGAHGIENKSREGLAKLVLCRLPGLRILSVDLGHRYAAACAVWETLSAAQMQNACLEAGMEAPSQRTLYLHLKHFVNGKEKKTIYRRIGAETLPDGSPHPASWARLDRQFLIKLQGEDRDARQATCDEVVAVEQLETELGYVRPIKRKGREHLVDELMSDALRTLRLGLQRHGARARIAFNLTATKRTRPGGIQELLDQESRIGLLTETLLEWNELYAGERWADELARDMWNKHIQPLLGGTILQETNNQDVTPSAAKRRMQREETREKLRPVAKQIAENDSLCRQLNVLWSTRWQIEDAAWRMRLRWMRRWLLPRGINRDPQFRKSIRDVGGLSLIRIASFKSLYQVQKAYWMRPHPDDLRRNIPERGDSSLTSFGQRVLDAMERMRENRVKQLASRIAEAALGIGDETSVNAKNGRRKRPTERSNDPRFAPCHAVVIEDLTHYRPDETQTRRENRQLMSWSSSKVKKYLGEACQLNGLYLREVPPAYTSRQDSRTGAPGLRCNDVAVPEFNSSRFWRKQVEAAEKNQKDGKKGDARERYLLSIDERIRSEANDRDVFRIPVKGGEIFVSACGQDGGSNANRKAPPGLQADLNAAANIGLRAIFDPDWEGRWWYIPCDATTICPVEKKFNGCKAVDSSKPLRIVAEKVAVSSSSINEKRSGRKGIALTDGSRIVNLWRDPSGAPIRRDVPSNSEWQDYAEYWNKVQSRVIANLRKSYGLREI

SEQ ID NO: 121 - protein, 860 aa, unidentified
  REGION 1..860: note = Cas Enzyme sequence
DRFGRVVAGTPRGAVGIANLFQEELWNGRLQAPRRQLDHLADLIYGKHGEPSWDRLDKALGTPASSIVDRSLKRLRWLLTASAKLQPSGPWLDYVARGLPPGVSYKVSAKGAFLNYVANTGRRGASASLRLARLPGLRILSVDLGHRYAAACAVWETLSADQVAAACRASGIGLPSAEQPFIHLRRRSLEMKAGDDRENSAAGTTIYRRIGPDVLPDGVPHPAPWARLDRQFLLRLPGEERPARFSRLDEYEVYHSLLAASGSPTDYCSSLEKDQTRVRLRIDELQAKAVRAARLGLRRLGNLARIAHAFTATARPGTGGQPTSLTTTEARVAHITEALMLWQDLAGDAASGDAWANGLWEEWVRTRLGGPVLLPMSGARLDRREKKTRIEEAEAALRGVAERLADPHAQESVALHELWSAEWERRSENWRRQLRLLRRLILPRIGQRPKSSDRVALERWKKKAVEIRRTGGLSLRRLNTVRGLYQVLKAFRMRPEPKDLVANVPAEGDGSLARFGDRILTTAERLREQRVKQLASRIVEAGLGVGSENRRAHWNGRKRANVAIPDRRFAPCEVVVIENLENYRPEETRLRRENRQLMNWCARNIRKHILEGCQLHGLYFTEVSPHYTSRQDSRTGAPGIRCEAIPRTVLEEAVREVGLTQPTGEQTQNAVSRLRRELVRLENLPATERSARECVLLKAKERLRDLPRSVGTILVPRQGGELFVSADVGSPTVGGIQADMNAAANIGLRSLMDPDWIGAWWFVLVDAKTGVPDGKRVEGCPFWRDRVSTQLLAAAEGLRKSRRGSRQDESQKVYAWRGGGWDESGWGSWGWQTTRDYWRLVEEKVVQNLVMRLQELETPW

SEQ ID NO: 122 - protein, 860 aa, unidentified
  REGION 1..860: note = Cas Enzyme sequence
DERFPKNKEQRESFLKRKCHTLADVRAAFALEGVEPLMDTFVKKYSEYMLLLENGLSGAQGVRDKHKDLFEDKSENGNLRRAFDDILKGCRLMACFDAKDDTQTDMQFYYDLHDILDVWGRVYPLMNGTRNYCTRKFEKSDKWRMWFFNDSILGGFSEGIDFKNIFAKGGMIIRRDGKYQLVVLRRGTRIGKDLFTVDPGDETCERMSVNKGKDPAMMIPKVLFSENALTTYGASGQVRRAVAEKTYTGPAANADDLRAVIGYCYACFDEHLSFKKFGFPKRDAASFRNWREFTEFLSRYTYVNDFVQMSATKIDALDRDGLAYVFTLTGEALTNIYRGRYTRSVLVRNLVDAICGTNDTRIAASRIYYRPQLIKEWHGHKPGSLLLDKRTTDGRTLPAAIRTEIWRAIDHDKQCEDPRDCVRREGLTQEALKWLPYVKLHRATFELTKNRRYMKEHFELQVSLTLGAGNDTPANVQEALNGLVDNWLENNPGRPVVGINRGENNLIYATLVDTEGRVLEQRSFNVIGGIDYQMRIDDRAKEMEQLVRDWKSPDTIMNLKEGYLSAAVSEIARMAFENEAVIAMEDLGQQFLRDRTPLRGGIYRKFQEMLVNKLRWYVPDKHNPNEVWQLTAGVGVKKKAANLTFPHRNGIVFFVSPWAVSSTDPRTGFRFQIPVYDDKMKAEAKRDVLSRMKDIRKNAHGDWEFTFNYRDYEKIPIKGPDADWTVTSKGTRMERSGNSQGKPVVTEVRPTAIIDEVFPDAKKGESVMPLIDGLGGERLDKMIRGLRLTVQMRNCDVGAHLDRFVSPVEGGLDTDAALPGEPTCTDGVTACNVARKAQLAIARHLDEIPNEMWLESQFRC

SEQ ID NO: 123 - protein, 861 aa, unidentified
  REGION 1..861: note = Cas Enzyme sequence
LTTGIVLKTERGLEPAKVRVHYAAPRLFRDQLRRVGDSGLESVPWLQPMMQALGLPEPDRTDFSNCRVTLQPASEDNVQLTFPMPLEPVKLQALLGHKDKWNYQPSGKGGEKNFGQFNYSASEPRVETSLRWASDIAFAKEAGQPRKREPEPWHRKMHSFTCLSVDLGQRGAGAYARIEARCDGKFRTNNQGQPVPTRFVGETEGKQWRAALAASGLFRLPGEDAKVWREQTELDAQKRKPKDSGKPFDMREEFWGDRGRPAEPPEAHETTGLMRQFEAVEKDAEGREQFPLLPADRRDALTFPEQNDKLLIAARRAQSRVARLHRWCWFLADEAKRSEAFKEMSDCEDERLLSAAEREQAKQNDPRLADSIRTRLDQKQNVLPPLLLRLANRIVPLRGRVWAWNPHPDRRAQEGRCHLLEMTDSAAHKPMIRGQRGLSFARIQQIEELRKRFQSLNQTLRRELGAPPPKRRDDSIPDPCPALLGKLDEIKTERVNQTAHMILAAALGLKLAPPPENKAELRNTRDVHGQYVREREPVDFIIIEDLRAYRASQGRGRKENWRLMRWCIGHVRDKLRELCEPVGVPLVETPAAYSSRFCARSGMAGFRAVEVTPGFTKHGHWAWLADKDDDESNPTAEAQWLLNLDGQLCMSQTALESDWKVKHPGQPCPKRTALVPQASGPIFVPVSAAGADGDLAPKVTQADINAAINLGLRAIADPKLWSIHPRLRTKRPDGSASKARKGNGARNKRPATAPSDGLPATPTLFTREKRKFGEIGIELKLGQPSKGSALEDTANPNYFRDFSGVAKWDEAEVQDPVSRKSVTLASGKALWGAVKKLQWQRCREINDARLAAWRNKVDPLP

SEQ ID NO: 124 - protein, 861 aa, unidentified
  REGION 1..861: note = Cas Enzyme sequence
KAYKAIKSFSIRELEHFAALCPEEHDQNSILSYISSATEEKTSAVTVAYDSAEKLLSENYSENNDKKLCRNDAAIEMVKNLLDSIKEVEWLLKPLLGTGKEENKDDTFYGRFLPLFESLSELDKLYDKVRNYVTQKPYSKDKIKLNFSNDIFLEGWAQSLEIARSAQLFRKGNTYYLAAMDKDLRSALPKKYIAPSSSDDALEKIVYQQMASPAKDIPNLMVINGKTVKKNGRKEKSGDHIGENIILEQLKNEYLPARINEIRKKRSFSRTSEHFSKEDLAEYIQYYSERVQEYYSSFDFNFKDATDYSSYDEFLKDVDGKAYQITYESVSYKQIMSLVDSGHLYLFQIYNKDFSPHSHGKENLHTMYFKMLFDERNLADVVYQLNGGAEMFYRKASIKDGEKIVHPANLPVKNKNSLNEKKESVFGFDLVKDRRFTKRQFSLHLSITLNFKSEGREFINHDVRLALKNSEDNCVIGIDRGERNLLYVCVINGKGEIVCQQSLNEIISDNSYKVDYHKLLDDKEKARDAARKSWGTVENIKELKEGYLSQVVHKICELAIKYDAVIALEDLNFGFKNGRFKVEKQVYQKFENMLISKLNYLVDKARAADEAGGLLNAYQLTNKADGVNRGRQNGIIFYVPAWLTSKLDPTTGFADLIRPRYTSIADTKSFIQRIDDIRYNSSEDLFEFDFDLEKFPNTAASYKKKWTVCTNGERIKTFRNENKNGEWDNETVLLSKAFKNLFSEHRVDIAKDIKSQLLSVDAASFFAHFMKLLALTLQMRNSITGSDIDYLISPVRNASGSFFDSRNLDPALPENADANGAYNIARKALWAIDLLKNTPDDELQRADLFIRNADWLKLAQK

SEQ ID NO: 125 - protein, 863 aa, unidentified
  REGION 1..863: note = Cas Enzyme sequence
ELEQTTGNKSDSYRISIRSVRGWDRIYPLWLKRSVNATPTELRDILKSVQREMSEGFGDPQLFIYLAQPENRDIWYGSNEKARILNHYAIYNGILTKLEQAKEQATFTMPDPIDHPLWVRFDARGGNLYTYILEEDEGWRVQFERLLWPNERGWEEREKVNVKVAPSKQLVRKAKNGYQKIIELVNNPKGKQEVIYRDYSTMLPFDGVLGGAKIQLNRYYLEKSKEKIARGQIGSVYLNISLEVTPIQEVKNGRLQTPLGKALTIVKSDWPKIVDFKSEQLQQMLTEQNSNKGDLKGVRSLAEGLRVMTIDLGQRASAAVSIFEVTAERPSDEKTKLFFAIPDTPLYAVHRRSLLLNLPGESPDKETEQRRKDRYSSYRAIRFQVRMLAQILKLHTKETSEERLTELQSFLKAVTEYELWDDEIKSLWKQELNKLRKSVNQSNEEWVQEIVLTHRSLESRVAKNISNWRKSLSNKRGGFLANSRYKIAGLSLWNVDDLTRNRRLLLSWSKRSRIPGKMNHLQHEERFGLHQLVHLQNVKNDRLKQLANLIVMTALGYTYDQERKVWLETYPACQVILFEDLSRYRFKLDRPRRENSQLMKWAHRSIPKTVAMQGEIYGLQVGDVYAAFSSRFHARTGTPGIRCKQLKECDLNDSFIKEALIRDKFITEEKWSSLKAGDIVPWKGGELFATLEKNASDKNGSKLLLIHADINAAQNLQRRFWNHRSELFRIACRRTKINDGEVYVPTSQSERWKKQMGKGYFVKDNNYSGRDNELEKVEAYEWNNMERIRQEVVSIDETIELEDMEEINQAIEEELESKGDYVTLFRDPSGVIFPDYLWIPQVQFWSVVKNKIQKELHKRIFGN

SEQ ID NO: 126 - protein, 864 aa, unidentified
  REGION 1..864: note = Cas Enzyme sequence
MQKNIIKTSFAKEDKRSIYVKKSYLSTISMDIYGKWDVLQRNLNTYCSEKNITLQDVVSVDMIEQALEQKDSVINTVKNKLSEAISVEKQISKIQDLCADKNVLAHKTIIKEFYEKMLLIQRSLNIFDLDNIENVFISEIIANKEKMHELNTIYNMVRKFCTKSPIKKDTYPLYFNKSSCLSSFDYDKFKDGTSISSILRKDGLYYLLILNPEYATKLPEKAKTNEQGYEQLVYKQLTGLNKMFPKVFLAKSNEELYSPSERILNIAKNKLYTKEAADRESCVEWISFCIESFKKNKDWMKNFNPSFRKPEEYASANEFYTELERSTIRMDFSESVDESYLRQAVSRGEIFLFQLYSKDFSPYHNGKDSIYTRLLKEMFSEENLHRINHTDETALKLASGGSQLTFRKASLPYKETHPANVPIANKNPLNQKKESTFDYPLCKDKRYMTDKYLLSLAVQIGFRNEEVYKYDLNRMVNESVLKQMPNILSVRAGERHLLYYIVTDPNGNILEQDSLNIIHSKNDKQEVRTDYKEILVKRENEIAEAKEKWDYSKDIKKIKEGYLSQAIYTIVKLREKYNAVIFVEDYSGPFVQGRMKNMKTIYQQFQKALLQKLSCYVPEDKSHNEAIQLAYPVSSLEELKGQSGIVYFVNPSYTANIDPTTGFVNQYYEFFKYESMKKAKETVSKIMDIQYNEKNHDFEITISEKDFGLSNLDKIWVLHTKGIRSIYKDKKYHEYDCTEKMRELFRTYRVSKLEDIRNAENLNKPFYEQLFEIIQVLLKMHYYSIDLEEEYCLSPVKNKDKICFDSRTRKVDGLVNSAAVKTYLMCKKGMRDLQCIDEETLLVKRDEKGKHKDMWLAYLQTSVC

SEQ ID NO: 127 - protein, 867 aa, unidentified
  REGION 1..867: note = Cas Enzyme sequence
NDNRLDKFGQDGSDTVKLIENDAKIERIKCVLDMLLNTNRFLDTFAVGDGEAVDVGFYSEIDELKEIIDGIDPLYNRVRNYVTRKPYNKNKIKLNFNSPTLAEGWSKSKEYEDNAIILRRDGKYYLGIFNVKNKPDKKIMEGYSGDVGDGYEKMVYSLLPGAGKMLPKVFLSKKGIGNYKPSSYIIDGYDNDRHIKSSKNFDINFCHDLIDYFKSSISANPDWKVFDFKFSDTKSYEDISGFYSEVEKQGYKISWVNISKEDIDRLDETGQIYLFQIYNKDFSESSMGTPNLHTLYFKNLFSEENIRETVLKLSGKGELFFRKASIDKPSGHRKGSILVNKTYKTNIGNEEVRVPIPDKEYMEIYTYLNNGRTTKLSENAQSLLDNKLVEYFEAEKEIIKDRRYTVDKFFIHTSVVINYNAEGASDKQLNEQVLEYISKQDDMHIIGIDRGERNLVYVSVIDMKGRIVEQKSYNVVNSYSYQKKLVEREKARDEARKSWKEVGRIKDLKDGYLSLVVHEIADMVIKYNAIIAMEDLNYGFKRGRFKIERQVYQKFESMLISKLSYLVDKTKMADEPGGVLKGYQLAFVPKDVKKVGRQCGIIFYVPPAYTSKIDPATGFVDLFKFKSGEKEGTARADNDRKEFLSKFDDIRYVEKNDNREEMFAFTFDYDNFAMHNTVIAKKKWTAYTFGSRIQKVYENGRYTSSTREIQLTDKMKRLLNENNIEYGDGHNLVDDIRTLDVDSSGAVINEIFKIFRLTVQLRNSKSEAENEKNGEYDRIISPIMNDAGEFFDSFKYKKMNEETEPGKHNATMPIDADANGAYCIAMKCLYEAKNIKSGWEKEGKKNNDLLCVTNADWFDFMQNKRYV

SEQ ID NO: 128 - protein, 868 aa, unidentified
  REGION 1..868: note = Cas Enzyme sequence
ISLGEIDRLVDKYNLCPDKAVSTKSLIRSISDIAAGCKASPLTMNSGLPLAENEVEITVFKDALEPFMDIFRWCAKFKTDEPVDKDADFYTELEDISDEIHSIVPLYNRTRNYITKKPYSIDKFGLYFGTSTFASGWSESKEFTNNAILLVKDNKFYLGVFNAKNKPAKSIIKGHDTMQDGDYKKMVYSLLTGPNKMLPHMFISSSKAAPVYGLTDELLSDYKKGRHLKASKNFDIDYCHKLIDYFKHCLALYTDWDCFDFKFSDTESYNDIGEFYKEVAEQGYYMNWTYIGSDEIDSLSENGQLYLFQIYNKDFSEKSTGKPNKHTSILRSLFSDENVADPVIKLCGGTEVFFRPKSIKTPVVHKKGSVLVSKTYNAQEMDENGNIITVRKCVPDDVYMELYGYYNNSGIPLSAEALKYKDIVDHRTAPYDIIKDHRYTEDEFFINMPVSLNYKAENRRVNVNEMALKYIAQTKDTYIIGIDRGERNLLYVSVIDTDGNIVEQKSLNIINNVDYQAKLKQVEIMRKLAKQSWKQGVKIADLKKGYLSQAVHEVAELVIKYNGIVVMEDLNSRFKEKRSKIERGVYQQFETSLIKTLNYLTFKDRKPLEAGGIANGYQLTYIPESLKNVGSQCGCILYVPAAYTSRVDPTTGFVTLFKFKDISSEKAMTDFIGRFDCIRYDAEKDLFAFEFDYDNFEIYETCAKTKWCAYTYGTRVKKTFQNRKFVSEVVIDITEEIKKTLAATDINWADGHDIKQEIIDYALSSHIFEMFKLTVQMRNSLCESKDREYDKFVSPILNASGKFFDTDAADKSLPVEADANDAYGIAMKGLYNVLQVKNNWAEGEKFKFSRLSNEDWFNFMQKRQQTNS

SEQ ID NO: 129 - protein, 870 aa, unidentified
  REGION 1..870: note = Cas Enzyme sequence
MAKNTELISLGEIDRLVDKYNLCPDKAVSTKSLIRSISDIAAGCKASPLTMNSGLPLAENEVEITVFKDALEPFMDIFRWCAKFKTDEPVDKDADFYTELEDISDEIHSIVPLYNRTRNYITKKPYSIDKFGLYFGTSTFASGWSESKEFTNNAILLVKDNKFYLGVFNAKNKPAKSIIKGHDTMQDGDYKKMVYSLLTGPNKMLPHMFISSSKAAPVYGLTDELLSDYKKGRHLKASKNFDIDYCHKLIDYFKHCLALYTDWDCFDFKFSDTESYNDIGEFYKEVAEQGYYMNWTYIGSDEIDSLQENGQLYLFQIYNKDFSEKSFGKPSKHTAILRSLFSDENVADPVIKLCGGTEVFFRPKSIKTPVVHKKGSVIVSKTYNAQEMDENGNIITVRKCVPDDVYMELYGYYNNSGTPLSAEALKYKDIVDHRTAPYDIIKDRRYTEDEFFINMPVSLNYKAENRRVNVNEMALKYIAQTKDTYIIGIDRGERNLLYVSVIDTDGNIVEQKSLNIINNVDYQAKLKQVEIMRKLARQNWKQGVKIADLKKGYLSQAVHEVAELVIKYNGIVVMEDLNSRFKEKRSKIERGVYQQFETSLIKTLNYLTFKDRKPLEAGGIANGYQLTYIPESLKNVGSQCGCILYVPAAYTSKIDPTTGFVTLFKFKDISSEKAKTDFIGRFDCIRYDAEKDLFAFEFDYDNFETYETCARTKWCAYTYGTRVKKTFRNRKFVSEVIIDITEEIKKTLAATDINWTDSHDIKQEIIDYALSSHIFEMFKLTVQMRNSLCESKDREYDKFVSPILNASGKFFDTDAADKSLPIEADANDAYGIAMKGLYNVLQVKNNWAEGEKFKFSRLSNEDWFNFMQKR

SEQ ID NO: 130 - protein, 873 aa, unidentified
  REGION 1..873: note = Cas Enzyme sequence
  VARIANT 859..861: note = X can be any amino acid
YNTFIGGYSKKDGTKVQGINEIVNLYNQKNKKDKEKYKLPQFTPLFKQILSDRDTKSFSIEKLENIYEVVELVKKSYSDEMFDDIETVFSNLNYYDASGIYVKNGPAITHISMNLTKDWATIRNNWNYEYDEKHSTKKNKNIEKYEDTRNTMYKKIDSFTLEYISRLVGKDIDELVKYFENEVANFVMDIKKTYSKLTPLFDRCQKENFDISEDEVNDIKGYLDNVKLLESFMKSFTINGKENNIDYVFYGKFTDDYDKLHEFDHIYNKVRNYITTSRKPYKLDKYKLYFDNPQLLGGWDINKEKDYRTVMLTKDGKYYFAIIDKGEHPFDNIPKDYFDNNGYYKKIIYRQIPNAAKYLSSKQIVPQNPPEEVKRILDKKKADSKSLTEEEKNIFIDYIKSDFLKNYKLLFDKNNNPYFNFAFRESSTYESLNEFFEDVERQAYSVRYENLPADYIDNLVNEGKIYLFEIYSKDFSEYSKGTNNLHTMYFKALFDNDNLKNTVFKLSGNAELFIRPASIKKDELVIHPKNQLLQNKNPLNPKKQSIFDYDLVKDKRFFENQYMLHISIEINKNERDAKKIKNINEMVRKELKDSDDNYIIGIDRGERNLLYVCVINSAGKIVEQMSLNEIINEYNGIKHTVDYQGLLDKCEKERNAQRQSWKSIENIKELKDGYISQVVHKLCQLVEKYDAIIAMENLNGGFKRGRTKFENKLINKMEYMADKKRKTTENGGILRGYQLTNGCINNSYQNGFIFYVPAWLTSKIDPTTGFVDLLKPKYTNVEEAHLWINKFNSITYDKKLDMFAFNINYSQFPRADIDYRKIWTFYTNGYRIETFRNSEKNNEFDWKEVHLTSVIKKLXXXRNIRLITLAVRI

SEQ ID NO: 131 - protein, 873 aa, unidentified
  REGION 1..873: note = Cas Enzyme sequence
MSVFSKYRNFFPVKKSISLGAIPTPVTVSNMKKDRILENDIIREERASRMEDVYDEEYKKLIEKILSSMDNKKELKELISAYEKRKEDRNGYADAENDFVESISKALSESEEYKNLCNAEYFSKELPKKVSSEIADLISKLNFGSFETHRKTRTTLFGVKDGSVAKRIGHDNFLIYMDNCAKLENALSILGKETLEKYVAEMGDASDITEELIYGYAEKENYISLFSQKAIDDYNLLINGYTVGKRTKIKGINELINEHNQQEKEKEMKLAFLSKLQKLPLFDATSYSVIPESFSSDSELIESIDMLYNKDIGERKSLKSVIENAAKIFLGFSEVYDLSHIYINPKKNNAFSKNFLGKWNILERLFKEDFAKKNESPKLKGKKLDKLVEDAYKNKVFSFTDVEKIADMCDGFEEFSIEKAYIRDILDKALAVSNAYNEYKAYMEEREKMENAPAIKRDNRAAAVIRELCLAVKECERSLIYILHGEELIEVGAEGDAVFYEKFNSLAETIKDSDRLYNKIRNFVSQTKVSEDKTRLMFNNDEFLKGWSDSSKKGGAIIRDGKEYYLICIMKGFKGIENIQSDGNDLDLMEYNFTGDVSKCLGKNLMYTGMKNKSGAGSKYVYNENSKIVADYGLTEDVFNAYQNGIHTKGYADQGYTEEEHKDALRKIIRYFNKALPLAYSGFDAEGLRDDYETFNEYCNELNKRNFTLGFRKASRTKIDEYEKAGYIYKFRIWCRDFSEKAYGIKQNYALIFNALFNEKNEYYSKIRLCGSAKLIFVKASIKDEDKVVHKAGQPIRNKNPKSGKPTSTYSYDIIKDRRKLKDHYIIQLPYEINRQALGNPVNLNAVVLDDIRNGNLKSIVSIKTGQDNLLWV

SEQ ID NO: 132 - protein, 874 aa, unidentified
  REGION 1..874: note = Cas Enzyme sequence
MFGDWSTINRAIMANLKLSVKPKRKEDESDYEARIRKLLSKNDQYSIQYINDCIAAANIENKSTVEDYFAKLGEVDTADEQQVNLFSQIELAYTDVKDLLSNEYPANANLAQDDSAIEKIKKLLDTIKALQYFIKPLLGKGEQADKDELFYSSLTQLWEQLDEVTPLYNKVRNYMTRKPYSQEKIKLNFENSTLMDGWDLNKERDNTTVILRKDGLYYLGIMNKAANKAFDIANLSADGDCYEKMEYKLLPGPNKMLPKVFFSESRIAEFAPSEKILAIRKDGSFKKGDNFSIDNCHALIDFYKKSIQKHEDWSKFDFRFSDTESYEDLSGFCKEVEQQGYKLTFRNVSAKYIDTLVDEGKLYLFQIYNKDFSPCSKGTPNLHTLYWKMLFDERNLSNVIYKLNGQAEVFFRRKSNIYKNTIHRANIEIERKNPRNKDAYSKFPYDIIKNKRYTVDKFQFHVPITMNFKNDGVGNINPMVWNYLKDTDDVYVLGIDRGERNLLYYSLIDKNGNIVEQDSLNVIGDYDYLNKLNEREVERDNARKSWKCIEGIKELKAGYLSQVIHKIAQLMVKYHAIVVLEDLNFGFKRSRQKFEKQVYQNFEKTLIDKLNYLVDKKIDADAPGGLLNAYQLANQFESFQKLGKQCGFLFYVQASYTSKIDPTTGFVSKLNTRYETIDKARAFFNKFKSIRYNSQSNLFEFAFDYNDFSKELDGSKTQWTIHTNGERIEQFRNREKNNSWDTRTIVLTDAFKEFFAQNGIDINGNIKAQVVERADKQFFEKLLHLLRLTLQMRNSDSTQDRIISPVRNSSGEFFDSNCPGNMPKDADANGAYNIALKGLLTVRRIKQSTDVKPNLAISTKDWLKFIQEKPYLEN

SEQ ID NO: 133 - protein, 876 aa, unidentified
  REGION 1..876: note = Cas Enzyme sequence
ALLEELKRVVPKKSKKESDEAYEERLGKILKAQGSISIAKINQSVQALNGEVPNTLQAYFAALGAVDTDTLQKENLFAQIENAYAEVKELLKTPYPADKNLAQDKRNVEKIKNLLDAVKALQHFVKPLLGDGTESDKDEKFYGELTALWDELDKITPLYNMVRNYMTRKPYSTEKIKLNFENSTLMDGWDLNKETDNTTVILRKDGLYYLAIMNKKHNKVFSIKNIVSEGECYEKMEYKLLPGANKMLPKVFFSKSRIGEFAPSEALLENYRNETHKKGPNFNIEDCHALIDFFKASIDKHEDWCKFGFQFSDTSTYEDLSGFYREVEQQGYKITFRNVSVDYVNTLVEEGKIYLFQIYNKDFSPYSKGTPNLHTLYWKMLFDERNLADVVYKLNGQAEVFFRKHSINYEHPTHPAHQPIDNKNAQNEKRQSTFTYDLIKDKRYTVDKFQFHVPITMNFKSTGNENINQSVNEYIRQADDLHIIGIDRGERHLLYLTVIDLKGNIVKQESLNEIINEYKEFPSINYHDLLTKREENRMKSRQSWQTIENIKELKEGYLSQVIHKIAELMVRYNAIVVLEDLNQGFMRGRQKVEASVYQKFEKMLIDKLNYLADKKSQPEEPGGILNAYQLTSKFVSSQKMGKQSGFLFYVPAWNTSKIDPVTGFVNLLDTRYETREKAKAFFCKFDTIRYNDAKGWFEFAVDYSKFTTKADGTRTHWIICTYGKRIETFRDEMKNSNWSSREIDLTEEFKAHFAKYGINIHGNLKDTIVCQDNTDFFKGMLYLLKLTLQMRNSTTGTEIDYIQSPIADEHGVFYNSTTCSDTLPQNADANGAYNIARKGLWVVNQIKASEDLEHLKLAISNKEWLQFAQNKPYLND

SEQ ID NO: 134 - protein, 877 aa, unidentified
  REGION 1..877: note = Cas Enzyme sequence
KALLEELKRVVPKKSKKESDEAYEERLGKILKAQGSISIAKINQSVQALNGEVPNTLQAYFAALGAVDTDTLQKENLFAQIENAYAEVKELLKTPYPADKNLAQDKRNVEKIKNLLDAVKALQHFVKPLLGDGTESDKDEKFYGELTALWDELDKITPLYNMVRNYMTRKPYSTEKIKLNFENSTLMDGWDLNKETDNTTVILRKDGLYYLAIMNKKHNKVFSIKNIVSEGECYEKMEYKLLPGANKMLPKVFFSKSRIGEFAPSEALLENYRNETHKKGPNFNIEDCHALIDFFKASIDKHEDWCKFGFQFSDTSTYEDLSGFYREVEQQGYKITFRNVSVDYVNTLVEEGKIYLFQIYNKDFSPYSKGTPNLHTLYWKMLFDERNLADVVYKLNGQAEVFFRKHSINYEHPTHPAHQPIDNKNAQNEKRQSTFTYDLIKDKRYTVDKFQFHVPITMNFKSTGNENINQSVNEYIRQADDLHIIGIDRGERHLLYLTVIDLKGNIVKQESLNEIINEYKEFPSINYHDLLTKREENRMKSRQSWQTIENIKELKEGYLSQVIHKIAELMVRYNAIVVLEDLNQGFMRGRQKVEASVYQKFEKMLIDKLNYLADKKSQPEEPGGILNAYQLTSKFVSSQKMGKQSGFLFYVPAWNTSKIDPVTGFVNLLDTRYETREKAKAFFCKFDTIRYNDAKGWFEFAVDYSKFTTKADGTRTHWIICTYGKRIETFRDEMKNSNWSSREIDLTEEFKAHFAKYGINIHGNLKDTIVCQDNTDFFKGMLYLLKLTLQMRNSTTGTEIDYIQSPIADEHGVFYNSTTCSDTLPQNADANGAYNIARKGLWVVNQIKASEDLEHLKLAISNKEWLQFAQNKPYLND

SEQ ID NO: 135 - protein, 880 aa, unidentified
  REGION 1..880: note = Cas Enzyme sequence
MIMTVFDSLTGFFPLAKTLPVKLTPIGSTMDKIRENGIIETDEGLLRNYTRLKQMADEYHKQFIATVLENFKFRVHSEGKDDSLQEYAEAYDSDRTHDADNRLKFDVVRACLRLAVSKAFEAMPQFKKLDKKEFVNEILAGLAQGEDVAVVQSFSKFTSYMIPYYNSRKIYGYEEKAHTVPYRCVEDNLPIFYANTKIYTKVREKLPQEVFDDLYRQLEPYLNVNTLDEMFTLDYYNECLTQKDIEVYNSVLGGINTPDGHIKGLKEYIHLYNESCKDKKERLPELKELKKQILSDRVILSWVDAKYVDSRDMYKDLQTFHQKSYSPDVAGPLRLLLMNIHNYNSRGLFITNKDSLAQISVGTCGRWDALRNAMYADYSVRMPRKRRETPENYEKRVLKAMSDCKSLTVEEVNDLLGEYGKNVLDYFSRMGAVDQGTLQRENYFAAIDNKWTDLVPYVLRSAKADSSHKPDEAESSAIKAYLDAVKDLYNFVLPLKGCGNENGRDTLFYDQLDRLLETLEEVIPLYNRVRNFVTQKPFSVEKMKLNFSSPMLLSGWSTDNEKSHRSVILREDDKIYLAILEKGMGGLFIDESDTLQEDEPYYEKMVYNFFGDANKNLPYRCFAKCNEEAYKPSAEVLRIRQAGSYMTTSKNFRLGDLHKLIDYYKSCIMKMPVWSEVKFDWKPTEEYKTLGEFTESFVRPGYFIEFLKISAQTIERLVDEGKIYLFRMDRKDWSVYSKGRKSLHTLYMEMLFHPENLDKVVYKLSGGAEMFFRKASIRPGNPTHPAGQPIANKSPEVACQKPTSTFDYDLIKDKRYTKDMFMLHLPVAVNYCIPDSKGMKVTAAVRDLVRQGRFRHIIGIHRGERNLLYVSVTDMHGNIV

SEQ ID NO: 136 - protein, 881 aa, unidentified
  REGION 1..881: note = Cas Enzyme sequence
LLIIQYLKGISHFVLYYLDANTNSKKKKDEKYYDKRQKELKKNKSYSLEKIVSLSPKTVQVIDKYIEKLQSDITAIKETQEDFEIIVLKGHDKSKSLRKNTKAIETIKSFLDTIKDFEHDIKLISGSGHEVEKNLAVYAEQENVLSSIRGVDSLYNMSRNYLTKKPFLTEKFKLNFNNATLLNGWDINKEKDYLGVLFEKSGKYYLGIIDNNSRKIFESEYMYSGKVDCFNKIVYKQIQDAAQYLSSKQINPQNPPKDITEILAKKKADSSSLSRKEVERLIDYLKDDFLVNYPMILNQDGENYFDFHFKDSKEYESLKEFFKDVERQAYSIRTTSIDDSYIYKMVDEGKLYLFQIYNKDFSPYSKGNYNLHTLYLKMLFDERNLQNIVYKLNGGANVFYRFASIKEDEIIIHKSGEEIKNKNPKRAIDKPTSKFEYDIVKDRRYTKEKFMLHIPVTMNFGVDETIRFNDVINDALRADDKVRVIGIDRGERNLLYVVVVDSDGTILEQISLNSIINNEYSIETDYHKLLDEKEGDRERARKNWTTIENIKELKEGYLSQVVNVIAKLVLKYNAIICLEDLNFGFKRGRQKVEKQVYQKFEKMLIDKLNYLVIDKSRNQENPEELGHALNALQLTDEIKSFTELGKKKQTGIIYYVPAYLTSKIDPTTGFANLFYVKNESVEKAKEFFNRFDNICYNKAEGYFEFSFDYKNFTDRACGTINKWKVCTYGERIIKYRNVEKNNYFDDKVIVLTEEFKRLFNENGVQYENCKDLRKELDAITNASFFNHLIKLFKYTLQMRNSSNDGSRDYIISPVMNDKGEFFNSELGDSSKPKDADANGAFNIARKGLWVLEQLNKSSSGDKVNLAMTNAEWLEYAQHHTI

SEQ ID NO: 137 - protein, 882 aa, unidentified
  REGION 1..882: note = Cas Enzyme sequence
GETVEGVSLRWQGKRFHKDLDLDHFGADGATVTRGDRVSRAAVGSGSGPVSVSSVFDKKDWNGRLQLNRSQLERLHQYLAAHSLPLANPTDWDEKAVKMWSRLNWFLTTSAKLQPTGPFLDYLQQPLPLGWSANLKKGLLSYAPNKSEKRSGRTRIQLSRLPALRVLSLDLGHRYAAACAVWETLTSDQMRGVCKAAGIAEPGPDAMFLHVEQAMPNRSTVESQTADKVKTKRTVYRRIGAETLSDGTPHPAPWARLDRQFLIRLQGEDRPPRRATGDEFNGFNSFRRFLGLNEFTAEESLDLNGSVLKTPLITDIMNQAVRVARLGLRRLSDRARIAFAMTAMEKPVSGGRMLPLNGTDRMTFLQDALLTWHQLATSSEYVSSDARELWDTWIVNRCSGPSLVMTQGEMSRPARKRSDESVRDSLAVVASQLADPSCELARKLNSLWTRNWQEQELAWRDHLHWLRRLIMPRLGQRPPRTQPEARKAWKEKILQGRRMGGLSYDRLRAFRGLYECMKAFRMRPEPDNLRKNISDTGGRELSNFGRRILDQFEKLREQRIKQLASRVVEGALGVGREVPRNLRNKTRDKKRPTERCSDIRFQPCHAVIVENLRNYRPEESRLRKMNRRLADWAAANVRKYIKEGCELHGLHFDDVPAAYTSRQDSRTGATGVRAEDVPLTVLLDAALGSLDTPSKASDTHKRAVHRWASELKRSAQRVGDDKGDARDHLLVALAAKVKNAKRAQLPDLLLLPRQGGELFLPIVAEEKAGRPRSLQADLNAAANIGLVALLDPDFSGSWWRVKVNPRTGAVANADFPGCPLFEDALILLPVDQRGGKRDRQNAFSIPSATGLQTRDWKNQWAYWPSVLDSCCARLAAWYGLDR

SEQ ID NO: 138 - protein, 884 aa, unidentified
  REGION 1..884: note = Cas Enzyme sequence
FLHLLIIQYLKGISHFVLYYLDANTNSKKKKDEKYYDKRQKELKKNKSYSLEKIVSLSPKTVQVIDKYIEKLQSDITAIKETQEDFEIIVLKGHDKSKSLRKNTKAIETIKSFLDTIKDFEHDIKLISGSGHEVEKNLAVYAEQENVLSSIRGVDSLYNMSRNYLTKKPFLTEKFKLNFNNATLLNGWDINKEKDYLGVLFEKSGKYYLGIIDNNSRKIFESEYMYSGKVDCFNKIVYKQIQDAAQYLSSKQINPQNPPKDITEILAKKKADSSSLSRKEVERLIDYLKDDFLVNYPMILNQDGENYFDFHFKDSKEYESLKEFFKDVERQAYSIRTTSIDDSYIYKMVDEGKLYLFQIYNKDFSPYSKGNYNLHTLYLKMLFDERNLQNIVYKLNGGANVFYRFASIKEDEIIIHKSGEEIKNKNPKRAIDKPTSKFEYDIVKDRRYTKEKFMLHIPVTMNFGVDETIRFNDVINDALRADDKVRVIGIDRGERNLLYVVVVDSDGTILEQISLNSIINNEYSIETDYHKLLDEKEGDRERARKNWTTIENIKELKEGYLSQVVNVIAKLVLKYNAIICLEDLNFGFKRGRQKVEKQVYQKFEKMLIDKLNYLVIDKSRNQENPEELGHALNALQLTDEIKSFTELGKKKQTGIIYYVPAYLTSKIDPTTGFANLFYVKNESVEKAKEFFNRFDNICYNKAEGYFEFSFDYKNFTDRACGTINKWKVCTYGERIIKYRNVEKNNYFDDKVIVLTEEFKRLFNENGVQYENCKDLRKELDAITNASFFNHLIKLFKYTLQMRNSSNDGSRDYIISPVMNDKGEFFNSELGDSSKPKDADANGAFNIARKGLWVLEQLNKSSSGDKVNLAMTNAEWLEYAQHHTI

SEQ ID NO: 139 - protein, 885 aa, unidentified
  REGION 1..885: note = Cas Enzyme sequence
MFGSWSVIEDLWNKNYDSVNSNSRIKDIQKREDKRKKAYKAEKKLSLSFLQVLISNSENDEIREKSIVDYYKTSLMQLTDNLSDKYNEAAPLLNESYANEKGLKNDDKSISLIKNFLDAIKEIEKFIKPLSETNITGEKNDLFYSQFTPLLDNISRIDILYDKVRNYVTQKPFSTDKIKLNFGNSQLLNGWDKDKEREYGAVLLCKDEKYYLAIIDKSNNRILENIDFQDCDESDYYEKIVYKLLTKISGNLPRVFFSEKRKKLLSPSDEILKIYKNGTFKKGDKFSLDDCHKLIDFYKESFKKYPNWLIYNFKFKKTNEYNDISEFYNDVALQGYNISKMKIPTSFIDKLVDEGKIYLFQLYNKDFSPHSKGTPNLHTLYFKMLFDERNLEDVVYKLNGEAEMFYRPASIKYDKPTHPKNTPIKNKNTLNDKKTSTFPYDLIKDKRYTKWQFSLHFPITMNFKSPDRAMINDDVRNLLKSCNNNFIIGIDRGERNLLYVSVIDSNGAIIYQHSLNIIGNKFKGKTYETNYREKLATREKERTEQRRNWKAIESIKELKEGYISQAVHVICQLVVKYDAIIVMEKLTDGFKRGRTKFEKQVYQKFEKMLIDKLNYYVDKKLDPDEEGGLLHAYQLTNKLDSFDKLGTQSGFIFYVRPDFTSKIDPVTGFVNLLYPRYEKTDKAKDMISRFDDIRYNAGEDFFEFDIDYDKFPKTASDYRKRWTICTNGERIEAFRNPANNNEWSYRTIILAEKFKELFDNNSINYRDSDDLKAEILSQTKGKFFEDFFKLLRLTLQMRNSNPETGEDRILSPVKDKNGNFYDSPKYDEKSKLPCDADANGAYNIARKGLWIVEQFKKADNVSTVEPVIHNDKWLKFVQENDMANN

SEQ ID NO: 140 - protein, 886 aa, unidentified
  REGION 1..886: note = Cas Enzyme sequence
MFGNWGVIQNAVMQNIKRVAPARKHKESEEDYEKRIAGIFKKADSFSISYINDCLNEADPNNAYFVENYFATFGAVNTPTMQRENLFALVQNAYTEITALLHSDYPTEKNLAQDKANVAKIKALLDAIKSLQHFVKPLLGKGDESDKDERFYGELASLWAELDTMTPLYNMIRNYMTRKPYSQKKIKLNFENPQLLGGWDANKEKDYATIILRRNGLYYLAIMNKDSKKLLGKAMPSDGECYEKMVYKLLPGANKMLPKVFFAKSRMEDFKPSKELVEKYNNGTHKKGKNFNIQDCHNLIDYFKQSIDKHEDWSKFGFKFSDTSTYEDLSGFYREVEQQGYKLSFARVSVSYINQLVEEGKMYLFQIYNKDFSEYSKGTPNMHTLYWKALFDERNLADVVYKLNGQAEMFYRKKSIENTHPTHPANHPILNKNKDNNKKESLFEYDLIKDRRYTVDKFMFHVPITMNFKSSGSENINQDVKAYLCHADDMHIIGIDRGERHLLYLVVIDLQGNIKEQFSLNEIVNDYNGNTYHTNYHDLLDVREDERLKARQSWQTIENIKELKEGYLSQVIHKITQLMVKYHAIVVLEDLNMGFMRGRQKVEKQVYQKFEKMLIEKLNYLVDKKADASVSGGLLNAYQLTSKFDSFQKLGKQSGFLFYIPAWNTSKIDPVTGFVNLLDTRYQNVEKAKSFFSKFDAIRYNKDKEWFEFNLDYDKFGKKAEGTRTKWTLCTRGMRIDTFRNKEKNSQWDNQEVDLTAEMKSLLEHYYIDIHSNLKDAISAQTDKAFFTGLLHILKLTLQMRNSITGTETDYLVSPVVDENGIFYDSRSCGDELPENADANGAYNIARKGLMMIEQIKDAKDLDNLKFDISNKAWLNFAQQKPYKNG

SEQ ID NO: 141 - protein, 886 aa, unidentified
  REGION 1..886: note = Cas Enzyme sequence
RNLRMGLWTGQRVEKVSLRWSSKRLANDLSLRESGDADPVAVTRADRLGRASVGQTCPVHVASVFAEDNWNGRLQAPRAELDKIARLIERGKPAQARKLRDHISWLVSFSPKLAPSGPFIDYAAANGIEPNRKSGEYWPHSAMNKERKGHHAKLIYARLLGLRVLSVDLGHRFAAACAVWESVATAQVRSETNQGKVVRGGIDKNSLYAHIESKTADGKPRTTVYRRVGPDTLPDGSMHPAPWARLDRQFLIKLQGEEQPPRRAADDEEAMVEGWEKALGLQPLADSDTKPRKDVAELMARAVRLFTLAGRRHNDRARIAHNLIAKHRTKPGGVPEPLTEEGRFELLTETLALWHGLFAGDRWTDPKAQHAWDECGLPTIDLPARGDDEGSSYGGPGRKAAMEAYHAKLRPHAQRLAKTDLSKLAKRWSDRWEQDDRQWEHREKRAGFLRELRQWITPRGLRITAKDSTATRERKAAAALQARHVGGLSMQRINTLTGLYRLLKSFKNRPEPDNLRKNIPEKGDQRLAKFNRRLLDVRDRLREQRVKQLASRITEAALGVGRIKSRHVAAGAARPTSRVDAPCHAVVIESLTNYRPDELQTRRENRQLMEWSSAKLDKYLSESCQLHGLHKREVQPNYTSRQCSRTGAPGLRGVEVSAHDLLTKPWWKKDVAKAKANIEKARKEGRDGAFADRLLVNAEQWALRIPEQDRKDRKAQGSHKPSRAARIVLPRKGGDLFIAESATPNAKGHVPALQADLNAAANIGLRALLDPDWPGKWWWVPCTGGTYTPAPEKTSGADVFKGLTALLHEEPKNRTEGAAGGTEPSKKSRTKPVKAKEVRAIENRWRACSSEPLGTGEWMPSGEYWAKAEDRVRRLLDLQTTPQTRT

SEQ ID NO: 142 - protein, 887 aa, unidentified
  REGION 1..887: note = Cas Enzyme sequence
QGKEGKSSVIGSVSLFLTLCEPRFRPLWMDSDPEEGEEAGDNRFLQRLADLHESVADYLKCDEAINLTPAEPRYSRRLFMFSDLPGKSAPEYQGLDCLEVSMATEGDDARQQRYRLRFGAPRLRRDGLLGNEDGWLQPVTKALGLKLSKPDPSPFDSAVSLMPDFDSSGSLRFLLNFAASIDAEPLREAIGKAKLWDRQLNGTKDKSIHIHWPGTADPTKMKVIPWWENPAVIAEGFTVMATDLGQRTAGSWALLRITATKPATPRPVRSIGHDGKREWFAEILKTGMHRLPGEDAMTRGKDGHMGQELSGKTGRMASEEEWKESLELAKALLAEEPENWIGTDRLVKSYPEQNDALLRLANRRLSRLQTFHRWSCFDPEKETDPLRKDSLIKKLIAELDQWEDDEVSRWADNLRSGDIAAFRSAAGSAFVSYRSGILTHLLALANRVAPLREDRWQWKQRVGESPYGDLVRIPRGEGPKPPVRGQRGLSLARIEQMENLRRLFLRYNRALDREAGKPARFGRADTGRDSGEPCRDLLEKIDRIKEQRVDQTAHLILAQALGVKLAPHGLSAQARLEGDHHGEYTRIPGREPVDLVVIEDLGRYLSSQGRAPSENSRLMKWAHRAVRDKVKMLIEEPFGIPVLEVPAAYSSRFCAVSGEAGARCEERTELDDYLREILERRSVTPAASGQHDLREANLRLLMQFKLLDAINDSRRAAGKCPVTLLLQKTGGPLFVGAGEQSRLVQSDMNAAINLAFRAIAAPEAVHLLHRIRSEKTGDQISTLAKNRREIAVFGKKGLPISMKGEPSAKLSKSANFFHDPAEIAKFDRGEIILGGKPIPVASGIGLWHAVNGAILPKIVAINEDRLRRYGFAEAGRHSEEAEDNIPM

SEQ ID NO: 143 - protein, 888 aa, unidentified
  REGION 1..888: note = Cas Enzyme sequence
DIKIPQAVELKNLFEILDKTEKWKNKEDGLFKTSLFDGEGNKKGIIERAEKPSKALLGMIFADVEKMAKDFSELSPKVLSITTDFKKPEHIENIKMLLDSALYVNQIVKYWKVKDKFAVDPILAESLKAILFGDNNPTKFYDIIRNYLTKRPQEGLNKLKLNFDNSVLGGGWDVNKEPERWCLILKDGEKKYLAILTKASQKLFGEKAKYKEVVTDENYLKMDYKLLPGPNKMLPKVLLPKRNRKEFGATDDILSIYDEGGFKKNQPSFTKEKLWKIIDFYKEGLKVYPSAEKSWQDLFGFNFSPTEKFESIDQFYNEVEKQGYKLSWNIISKKLINEAVENGEIYFFEIRNKDNNLKEGKEKTSEKNLHTIYWNEIFGDVANKPKLNGEAEIFYRKTILKKKENETDKEFEIRLKEKLGKKKDKSGKEVLEHKRFANEKFVFHCPITLNFCLRSLKFNDEINESMVKLNDDITTIGIDRGEKHLAYYFVVKQTKDGKIETLDQGSFNEINGQNYAEKLEKMAGNRDEARKNWKTIGTIKELKDGYISQVVRKIVDLAIYEDVEKKVFRETPAFIVLEDLNIGFKRGRQKIEKQVYQKLELALAKKLNFLVDKHAKEGEIGSVTSALQLTPLVNNFGDIEGKKQFGIMFYTKADYTSQTDPVTGWRKTIYLKKGSEESIKKQILDNFDDIKFDGKDYYFKYTDRNTNKPWELYSGKDGESLDRYYRELVHENSDKKWVPKEQNLKKILDGLFEGFDKEKSLLEQLRQGKNPNKINDRTSWESLRFVIDLIQQIRNSGKTEEDADFILSPVRDKNGNHFDSRKINLNLPTSGDANGAYNIARKGIIMCEHIKRDLSLFISDEEWSAWLAGREIWENWIKKNEKNLKRKQ

SEQ ID NO: 144 - protein, 894 aa, unidentified
  REGION 1..894: note = Cas Enzyme sequence
FLCADIEKNIIQFLNDADNILNLEKYKEDKNEEEEDKIIKQIKDWFDCGINVIRLIKYFAVRKSKRKGSTNSTIEQALRNLLYSDDTNWFKWYDAVRNYLTKKPQDDVKENTLKLNFGSSSLLGGWSDGQEKVKRATLLKNEDDVYLCILKETSIFDTSKEDNPIYTKNGTSGRLILRTLGFKTLSGKGFVSVFNETYSNMSIRDPQKAIKSLQQIIKDRYSQKYPLLNKFVENVYTEKKEFDAEIQKTLKDCYECYFRPIDWQLVLDKEKQGDLFLFKIHSKDLKKESKSKQDNKSKDLQTLYWENVLKEDSMHQLCAGAEIFMREPIKTKKTYKHKLGEYLVNRKDKDGNSIPELIYRELFKWVNDGKKDKLSEEAEKYRNKISIKPVKYEIIKDKRFYLEEKYFFHCPIRLNYNSKSYKEPKFGYQEVNTEINEKLQQIPNLYFIGIDRGEKNLVYYCIVDKNENIIECEDCNIINGTNYLQRLEEKTTERQKSRQGWQAIGNISNLKDGYISHVVHEIVTKASKGLLLEEPQNGAYIVLEDLNTEMKQSRQKIEKQVYQKLEVALAKKLNFVVDKTVAIGRGSVENALQLTPPIANYGDIEGKKQFGIMLYTRANYTSITDPVTGWRKTIHLKAGTEEDIKNQIEDNFTEIAFDGQDYYFEYTEKHVGKKWRLYSGKDGKSLPRFKNNKQKKEDKDIWEPELIDVRSILDKVFEFFDKKQPLLAQIKNGTQLEKIPNRKETAWESLRFAIDLIQQIRNNGKEKEDDNFLYSPVRNNAEEHFDSRSYLNQTNPELPQDADANGAFNIARKGLIMNAHIEQWIKNGKKKVKKDKKEVSDLDLFVSDQEWDMWLLDREKWEQTLPVFASKSEMDKYRNLEKSETKVKPKRKRK

SEQ ID NO: 145 - protein, 899 aa, unidentified
  REGION 1..899: note = Cas Enzyme sequence
KLTDISQKVFGKWSIIEEKLKEKAVQQFGDISVAKNKKKVDAYLSRKAYCLSELSFDDDLHISQYFSDLPQILNTIEGYWLQFNEWCKSNEKQKFLNNPTGTDVVKSLLDAMMELSHKCSVLVMPEEYEVDKSFYNEFIPLYQELDTLFLLYNKVRNYLTQKPSDVKKFKLNFETPSLADGWDQNKERANKAILLFKDGLSYLGIMNAQNMPNLNQKWPADENHFSKMVYKLIPGPNKMLPKVFFSKKGLDTFNPSRHILRIKEEETFKKGSPNFKLADLHDLIDFYKDGINRHPDWSKFNFQFADTKAYEDIAGFYRDIANQAYMITFSDIPVWQINEWIDNGQLYLFQLYNKDYAEGAHGRKNLHTLYWENLFTDENLSNLVLKLNGQAELFCRPQSIKKPVSHKMGSKMLNRRDKSGMPIPESIYRSLYQFYNGKKKESELTAAEKQYMDQVIVKDVTHEIIKDRRYTRQEYFFHVPLTFNANAEGNEYINEQVLSYLKGNPDVNIIGIDRGERHLIYLTLINQRGEILKQKTFNVVNSYNYQAKLEQREKERDEARKSWDSVGKIKDLKEGFLSAVIHEISKMMIDNNAIVVLEDLNFGFKRGRFKVERQVYQKFENMLIDKLNYLSFKDREAGEEGGILRGYQMAQKFISFQRLGKQSGFLFYIPAAYTSKIDPVTGFVNHFNFNDITNAEKRKEFLMKMERIEMKNGHIEFTFDYRKFKTFQTDYQNHWTVSTYGKRIVMRIDDKGYKQMVDYEPTKDIVNAFKSKGIQLTEGSDLKAMIADIEANAANAGFFSTLLYAFQKTLQMRNSNAATEEDFILSPVARDGHYFCSTDEANKGKDAQGNWVSKLPVDADANGAYHIALKGLYLLRNPETKKIENEKWLQFMVEKPYLE

SEQ ID NO: 146 - protein, 899 aa, unidentified
  REGION 1..899: note = Cas Enzyme sequence
MKLWTGSDVLSVSLRWQSKKLAADLALDQEAEEVTDTAAVSRADRLGRAAAGIDRGAGVTIAGLFEEAHWNGRLQAPRQQLEAIAAVRDNQKLSSEERERRIAFMKDRIRWLVTFSAKLRPQGPWHSYAPTQGLQSDPKYWPHSEINKKRKGQAKLILSRLPGLRILSVDLGHRFAAACAVWETMSSEAIQEACRLANHQLPAPADLYLHLKRTVQKNLIDGEKTVEESTVYRRIGADRLPDGTAHPAPWARLDRQFLIKLQGEEKVREASNEEVWQVHLMESALGLSFPLIDRLVYAGWGGTEKQAARLEALREKGWKPTGTPADQDEEGGGYKPSLAVDELMFSAVRTLRLALKYHGDRARIAFALTADYKPMPGDTRYYFSEAKDRSSGADAAEREAKHKDYLLDMLLLWHDLAFSRKWRDEEAKELWNLHIAALPGYQAPAAPIQEEAGQGRKKAREEARAKMTPAAEALLADGTLREKLHGLWKERWEKDDAQWKKHLRWMKDGILPRGGRAATPSIRYVGGLSLTRLATLTEFRRKVQVGFYTRLFPSGEKREIKEAFGQTALDALERLREQRVKQLASRIAEAALGAGRVSRTALKQDPKRPEARVDAACHAVIIENLEHYRPEETRTRRENRGLMNWASSKVKKYLSEACQLHGLFLREVPAGYTSRQDSRTGAPGMRCQDVTVKTFLNSPFWQKQCVQAQKNKSTARDRFLCALKEAVAQGGMEEEKKMGPIRVPVPGGEVFVSADAASPAAKGLQADLNAAANIGLRALLDPDWPGKWWYVPCDRKTAYPAKEKVEGSAAVDVKQALPFVLPEEKENKGKTKGGKKGKGEVMNLWRDVSAEPLMTGQWLDYTAYRKEVENRVIQVLTAQLKARNPLRFGNLGDEEEIPY

SEQ ID NO: 147 - protein, 903 aa, unidentified
  REGION 1..903: note = Cas Enzyme sequence
MKEKFKNLYSVSKTLRFELIPEGKTQESFNTSDILITDEDRSESYKEVKKIMDRYHEWFINESLKDFKFNEGILNEYYRLSLKSRSEKENTAFNEIKKSLRSNIVKIAFKKNEIFEKLFKKDVIFLLEEFVKTGKFFDDLSDEEKRKHLDYINKFKKFSTYFTGFFENRKNVYSDEAKHSSIVYRSVDENLPLFLSNLKIFEDIKKKDSSLVDSFNINEFRLIRERSVEKFENVEIDSIDDMFTLTFFNRLLTQNGIDFFNSMLGGFADKQKEKSIEGLNQKLNQSKIEKIKFKPLKKQILCESSHLSKPIEKFESDDDMIQAIQYYYQETQGAIANLAQLWNELLNGDFDYSGIYLSNNQTLTTLSNRWLGHWDAIKECAIDYNTRGETLTVAKNKKENALFNKRQSIKLSDVQVWINNRYENKNLIDFLKMCDWQPPKKVSLQDTFNSFNQSYQEFETIIKNLNNNSLRTSDKAKEKIQSFLDLGITIYKALELFKGNGDELDRDLKFYSTLDTEMNILEDILYSVYNKSRNYLTKKPYSLEKFKLNFDTTTLLNGWAKSKEKDNLGVLLQKDDNYYLAILNTKYKKVFDQVTELKQGAVYKKMTYNLLPGPNKMFPKVFFSKGRQKEFEPSEHILRIYEKGSFKKGADFNLEDCHALIDFFKASIAKNSDWSSYKFKFSDTHTYADLSEFYKEVEQSGYNVQFTDYSAEYIDNLVNEGKLYLFQIYCKDFSPNSKGRPNLHTIYWRALFDPKNLEKPKIKLNGEAQVFYRKKSIFDSSITHPKRKAIKNKQKDADGTVKEKVFNYDLIKDKRFRMDKFQFHVNITLNHGVEQKTTKQINQLVRSELAKNKKINIIGIDRGENHLLYYSLIDQDGNILEQNSLNKIKPSGYIESKEINYHE

SEQ ID NO: 148 - protein, 905 aa, unidentified
  REGION 1..905: note = Cas Enzyme sequence
MQDEILTKVKNLFINLNNYDTAGIFIKDVATLSQNMYGYWGQIQTLRYEQAQMRYPELNKINRKNIEAELSSDVTLEDILSLPIPEDNPPQTIETIVNEICDGIIAKYKPLEDIYINGKDVLTEGKSAVKDFLDEVLKLTRFMKLFSAPENYICDPLFYEQYNNLMSGWFVDSSMLYDKIRNYVTRKPYKEDKIKLMFDFPTFMDGWDYNREQSNGAVLLLKEGKYYLGIMNHKNKVDINKAPESDKGYLKVFYKQIPNPTLDFPKNLLTSGKAIQRFAPNNELLLGYESKKHIQGDSFDLEFCHQLINYFKKCIPNYPGWEVFEFKFSDTSTYKNISEFYNEAKQQSYVLKYERYISEEYINECVRNEQLYLFEIYNKDFAHNAKGTKNIHTLYWEGLFNTTPIFKLNGEAELFYRPASIDEPVVHAKGSILVNRRDKQGTPIPNNIYKELCQYFNGGEKTELIKPYLEKAITKMATHDIIKDKRYSQDKFLFHVPITINYNAPSTKDLNLRVLKVLKDNPDMNIIGIDRGERHLLYVSVINQKGEIIKQKSLNVINEYDYQMKLSQRNDERKESRQNWETIGSIKELKAGYLSVTIHEIVKLMIDYNAILVMESLDPKFTRTRGKFEYNVYQKFEKMLIEKLNYLVFKTYKPQEKGGLFNGYQLTRQIKPKEKIGRQCGFLFYVPAGYTSKIDPATGFVSLINCNYANIEQSQIFFGQFEKILFNQSEDYFEFHVNHKNLPTFQQDYTNKWVICTYGENRYSYSPKEKKVQTVNVSQELKNLFSQYEIDIYGDLKEAICNQTVAKFYERLSFLFKLTLQMRYSNRETGEDFILSPVKNKQGEFFMSCPENEIKKLPTDGDANGAYHIALKGLQLITNISENYKLPNITTADWFKYAQQRHQEK

SEQ ID NO: 149 - protein, 909 aa, unidentified
  REGION 1..909: note = Cas Enzyme sequence
IKEELKLITRRKNGETEEELDERVSKIFKTQKSFSIDLLNHLPQPVMDDGRPRKVEDYFMSLGAIDTETTQKENLFAQIENAYEAVRPILQLTGTSETLSQNKSAVAKIKTLLDAFKDLQHFIKPLLGSGEENEKDELFYGAFQMIWDELDTITPLYNKVRNWLTRKPYSIEKIKLNFDNAQLLDGWDENKETANAAIILRKDAMFYLGIMNKEDRKLLANPMPTDGDCYDKVVYKFFKDITTMVPKCTTQMKAVSEHFKQSSIDYILFDKKKYHEPVIITKEIYELNNVLYKGAKKFQIEYLRTTGDTAGYEHAVATWKKFCIQFLKAYISTSIYDLSSVEQNIDNYHDLNSFYGAVNLLLYNLSYKKVSVNYINKLVDEGKLFLFRIWNKDFSEYSKGTPNLHTLYWRMLFDKRNLADVVYKLNGQAEVFYRKSSIKDENRIVHPAHKAIDNKNALNKKQTSTFEYDIIKDRRYTVDKFQFHVPITINFKAMGRTNINPIVQETIRRGGFTHVIGIDRGERHLLYLSLIDLHGNIVKQMTLNEIINEYNGQEHKTNYHSLLVRREGERTAARRSWDTIESIKELKEGYLSQVIHIISKLMVEYNAIVVLEDLNMGFMRGRQKIERQVYEKFEKMLIDKLNCYIDKQADPQSIGGLLHPIQLANKFESFRKLGKQCGCLFYIPAWNTSKIDPVTGFVNLFDTRYETREKARLFFSRFQRIKFNKDKDWFEFTFDYNDFTTKAEGTCTLWTLCSYGTRIRNFRNPLLNNQWDDEEIVLTDEFKQLFDKYGLDLQGNLKESINAQTDAQFFKDLMGLMKLLLQMRNSKTNSEVDYLLSPVADGNNHFFDSRDGKLNLPDNADANGAYNIARKGLWVIRRIQETPEGEKLSLAISNKEWLQFAQAKPYLRD

SEQ ID NO: 150 - protein, 911 aa, unidentified
  REGION 1..911: note = Cas Enzyme sequence
MIDILTNIKSYDIDHIFIPNDISLTTISKKVFKDWEAINKSIIKRLKEDNPQKGREKDDNYEERMSKAFKSYDSFSLGLINSCTATDDVCIYFSKIAKTDEETGLSHNLLDNIEEAYDKAKEYLNNGYPSNLNLAQDKSTVQKIKNLLDSIKDLQKFIKPLLGSGTEAVKDERFYGDISLVWEILDQITPLYNKVRNRMTRKAYSIEKIKLNFENSTLLAGWDLNKEKDNTSIILKKDGLYYLAIMRKEFNKVFQNTPQLTSGEDSFEKMEYKLLPGANKMLPKVFFSKSRISEFAPSDVLIEKYKKGTHKKGSNFNIDDCHNLIDFFKSSIQKHDDWSKFNFKFSPTDSYEDMSGFYREVEKMGYKITFKKISADYIEELVTSGKIFLFKIYNKDFSQYSKGTPNLHTLYWKMVFDENNLKDVVFKLNGEAEIFYRKKSLSYKSPTHPAHQPIRNKNPYNAKEESVFAYDLIKDKRYTLDKFHFHIPITINFKSEGVNNINTLVCNYIRNNDDIHFIGIDRGERHLLYVSVIDSKGRIKEQFSLNQIINEYKGNSYSTDYHKLLEERDEKRTKERQSWDSIESIKELKQGYLSQVIHKIASLVVKYNAIVVLEDLNIGFKRGRQKVESSIYQQFEKALIDKFNYLVDKNVAPEQPGGLMKGYQLTNKFSSFRDMGKQNGFLFYIPAWNTSKIDPVTGFVDMLHPKYESVEKAREFFTKFNKISYNQEKGWFEFLFDYNDFTTKAEGTRTVWTLCTFGKRIEKFRNKDKNSMWDNKEIDLTSAFISLCEKYNVPLSCDMKNDIVAQTEKDFYVELIRILRLTLQMRNSITGTDIDHLISPVADENGNFYDSRNADSTLPENADANGAYNIARKGLWAAMQIRSCTDPDLKVNLAISNKEWLTFAQTKPYIK

SEQ ID NO: 151 - protein, 916 aa, unidentified
  REGION 1..916: note = Cas Enzyme sequence
SIKKYTSLANIKIALEKEENANGLSGDVFRDKYYDDKDGLKLKRGESLGKRFGQFLKIWKFEFDNLFRDKELSNCRGYDFCLEEAEKINWAGLSRKDRKEVERVKQYSDISLDIYQMIKYFFLGSGKDVPLGSELFYGEFNAFYQIFEFIRYYNALRNYITKKAFNPDKIKLNFENPQLLGGWDKNKEKEKFGIVIRKNGVYYLAVLTDQYKKIFEKIEADTTGDFYEKMNYKFFPDPKRMIPKIAFATKNISVFKLTEEIKKIKREYENFQKDKKDTANWEKSFNKGKCSKLIRYYQDCLEIGGYKKEFGLTWKKPEEYSGVGSFNDHIEKQNYKVFFQKVSTKCIDDYVDNGKMYLFQIYSKDFSERSCGKGKNIHTLYFTNLFSPNNLNNPILKLSGGAEIFHRTLSISKKEKIITQKNQKILEKGEKAFRLNRYSEDKIFIHIPIKINRGETRLFNQKLNSAVLFNNKSINIIGIDRGEKNLLYYSVINQKGEILDQGSLNEINGINYFAKLHWRAKEREADRKSWNQVEQIKDLKKGYLSAVVHKICVLIIEYNAIVVLEDLNMRFKQIRGGIEKSVYQQFEKSLIDKLGYMVFKDREPEEVGGVLKGYQLAARFESFEKMYKQTGILFYTQADYTSVTDPVSGFRKNIYIGNSWSQEKIKKSIDRFESIKWDSEIGSYAFTYDPADFIFENYKKSKKRPQEIISREWTVYSKTSRIERFKNESGYWEYGSIDLNKEFEKLFQLWDFDPRGDILSQIREKESVNQLIGYKLIDKKERDFYHRFIYLFNIILQLRNSFSKKAVKDKNGNEILIGDDIDFIASPVYPFFQMEARSEKEGIISKLNLAGFDKRIISGNKDKIIKTLDADANGAYNIARKGIITLGKIKKNPEKPDLFITKNEWDKFTQKDWQEK

SEQ ID NO: 152 - protein, 918 aa, unidentified
  REGION 1..918: note = Cas Enzyme sequence
MFGNWGVIQNAIMQNIKHVAPARKHKESEEDYEKRIAGIFKKADSFSISYINDCLNEADPNNAYFVENYFATFGAVNTPTMQRENLFALVQNAYTEVAALLHSDYPTVKHLAQDKANVSKIKALLDAIKSLQHFVKPLLGKGDESDKDERFYGELASLWAELDTVTPLYNMIRNYMTRKPYSQKKIKLNFENPQLLGGWDANKEKDYATIILRRNGLYYLAIMDKDSRKLLGKAMPSDGECYEKMVYKFFKDVTTMIPKCSTQLKDVQAYFKVNTDDYVLNSKAFNRPLTITKEVFDLNNVLYGKYKKFQKGYLTATGDNVGYTHAVNVWIKFCMDFLDSYDSTCIYDFSSLKPESYLSLDSFYQDVNLLLYKLSFTDVSASFIDQLVEEGKMYLFQIYNKDFSEYSKGTPNMHTLYWKALFDERNLADVVYKLNGQAEMFYRKKSIENTHPTHPANHPILNKNKDNKKKESLFEYDLIKDRRYTVDKFMFHVPITMNFKSSGSENINQDVKAYLRHADDMHIIGIDRGERHLLYLVVIDLQGNIKEQFSLNEIVNDYNGNTYHTNYHDLLDVREDERLKARQSWQTIENIKELKEGYLSQVIHKITQLMVRYHAIVVLEDLSKGFMRSRQKVEKQVYQKFEKMLIDKLNYLVDKKTDVSTPGGLLNAYQLTCKSDSSQKLGKQSGFLFYIPAWNTSKIDPVTGFVNLLDTHSLNSKEKIKAFFSKFDAIRYNKDKKWFEFNLDYDKFGKKAEDTRTKWTLCTRGMRIDTFRNKEKNSQWDNQEVDLTTEMKSLLEHYYIDIHGNLKDAISTQTDKAFFTGLLHILKLTLQMRNSITGTETDYLVSPVADENGIFYDSRSCGDQLPENADANGAYNIARKGLMLVEQIKDAEDLDNVKFDISNKAWLNFAQQKPYKNG

SEQ ID NO: 153 - protein, 919 aa, unidentified
  REGION 1..919: note = Cas Enzyme sequence
AEDPLTAWLQYKELQADLADKERAIRFTPAHPKYSPRFFIFPKKSEAQPKTANHHHTKPGLLSRHDPGQLSFTGGVILRTEHGLAPTIVRIHYAAPRICRDQLRSSGDTNLYEAPWLQPMMAALGLDKSPERVNFANCRITLQPTNESDIHLTFPIEVNSEKIKAGVSRETVWENQFNLYPDGENFYNASLRWPHEKQRAKPPLPWHEQLDSFRCIATDLGQRDAGAFARMSVLGGSDFDKRPSRFIGEAGGKKWRAALERSGLFRLPGEDAQVWREKSSKDEKNPEDSGKPFDFREELWGERGRPARSWEADDTAELMRLLEVPPDAKELSLLAEGWRSLLSFPEQNDKLLVAMRRYQSRIARLHRWCWFLKGDDKQQKSAWDEIADCEDTRLISGEQIAQAKKHDPRLQTELASQLQKRLELAPVLLVRIANRILPLCSRSWHWEKHPASKAQNTLHHLTQNGPKLDSKERPVWLRGQRGLSLERIEQVEELRKRFQSLNQTLRREVGGKPPIRRDESVPDPCRDLLDKLDNLKEQRVNQTAHMILAEALGLCLAPPPADKKTLRQQRDLHGTYEKITDKSGKWIGPVAFIIIEDLSRYRASQGRAPRENSRLMKWCHRAVRDKLKQLCEIFGIPVVETPAAYSSRFCSRSGIPGFRAEEIAPGFEKTAPWSWIKEKKDDRGQPTTEAAHIQELIQQMAEAQKIPTRSDKPLAKPRTLFAPLAGGPVFIPIVDSIPGAELAPKLVQADINAAINLALRAIADPRLWTIHPRLRTQREGGNKPGKAKNQKTQQTASGTPTEVKLLTREKRKFGELGKPLVIKRASSAKPDDTRQPNFFADLAGLNELAEQLAKKNPREYSWLTKEWTSAEISGGNTTPPLVHGKSFWGTVKAKQWDRIRAINSARLAAWRSKGDDVSM

SEQ ID NO: 154 - protein, 919 aa, unidentified
  REGION 1..919: note = Cas Enzyme sequence
EKGTSIEQLVENLDSYDMDGIFIANDASITNISQYLFDDWSVIKNAISYCYDQEHLIIKAKKPAEKYEELKAKDLKKITVYSIQKLNQMTESYTGEVCAVERYFVGQISEKIAAIQNAYERAWELLKSEYDSNKALNKNQLAIDKLKGLLDAVKELQQLLKPLVKGQKEATKDEMFYGEFAGICDEINIIDRLYNQVRNYVTQKPYSLEKIKLNFDKSTLLDGWDRNKEKDNLGILLIKDGLYYLGIMNRKCNRVMDDAPVAHTKDIYQKVEYKLLPGANKMLPKVFFSKSRIEEFAPSDEILENYKRGTHTKGENFCLSDCHRLIDFFKESIQKHEEWSQFDFHFSETETYEDISGFYREVEQQGYKITFRDIDSKYIDELVENGQLYLFQIYNKDFSPYSKGTPNLHTLYWKMLFSPENLEKVVYKLNGQAEIFYRKKSIEDEEIITHKANVPIANRYPDAEKKTSVFPYELTKDRRFTVDKFQFHVPITINFRSEGETHINQRVRTAIHKEKDMHIIGIDRGERNLLYLVVIDMQGKIKEQISLNQIDKKDYHLLLDEREKDNKAARQDWQTINTIKELKEGYLSQVIHQIAQLMVKYNAILVLEDLNMGFMRSRQKIEKQVYQKFEKMLIDKLNYLVDKHVNPEEMGGLLNGYQLTDKFDSFQKLGKQSGFLFYVPAWNTSKIDPTTGFVNLFYTKYESKEKTRAFIKKFDKIMYNAVENYFEFSFDYSNFTYKANGGKTKWKICSVGKRIVAFRNPQKNSQWDRSTINLTQEMIKLLEQYQVVLNQSDLIDSIIAVEDADFYRGFMRFMSLLLQMRNSNSQTGEDWMISPVKNQDGYFFRTLGYPYEINDGFDFCLMDENNIIKDADANGAYNIAKKGLWIVEKLQQTEADQLNKANLAISNKEWLCYAQEHTL

SEQ ID NO: 155 - protein, 919 aa, unidentified
  REGION 1..919: note = Cas Enzyme sequence
AILIGSISNYTPDGIFLSAKQITDVSQKVFGHWSIINDKLQELAIEKFGDIEVAKNRKKIDSYLAKAAFSLSELPFDDEHKVSDYFATLPQAVNNIHSYWLQYKEWCKGESKQLFLNNSDGTEIVKNLLDSMMDVLHKASILLAPEEYDVDKDFYNEYIPLYAEFSNIIFLYNKVRNFLTKKPSDVKKFKLNFGVPSLGDGWDLNKERDNKAILLFKDGLSYLGIMNAKNQPKIVGIDKKENESYSKMIYKFLPGPNKMLPKVFFSRKGLETFKPSKQILDIYESGSFKKGSSQFSLINLHALIDFYKDAISKHEDWSKFGFKFSPTKSYEDISSFYSEIAKQSYKISFINISAQQVDDWIENGQLYLFQLYNKDYAKGAHGRKNLHTLYWENLFSPENLNHLVLKLNGQAELFYRPQSIKQPVTHKMGSKMLNRRDKSGMPIPESIYRNLYQYFNGRKQETELTDTEKAYINEVVVKDVTHEITKDRRYTKPEFFFHVPITFNLNADGSDYINEKVQDYLKDNPDVNIIGIDRGERHLIYLTLINQRGEILKQKTFNVVGDYNYQAKLTQREQERDEARKSWQSVGKIKELKEGFLSAVIHEIAKMMIDYNAIVVLEDLNFGFKRGRFKVERQVYQKFEKMLIDKLNYLSFKDYKADDEGGILRGYQLAQQFTSFQRLGKQSGFLFYIPAAYTSKIDPVTGFVNHFNFNDITNAEKRKDFFMKMERIEMRNGNIEFEFDYRKFKTYQTDYQNLWTVSTFGKRIIMQPDEMGHKTMKDFYPTQQIVQSFESKGKTIKDGTDIKALLSSIEANSANASLYSTLFFAFQKTLQMRNSNAATEEDYILSPVAVKGKYFCSTDEANKGRDANGNWISRLPVDADANGAYHIALKGLYLLMNPLMKNIENEKWLQFMVEKPYLE

SEQ ID NO: 156 - protein, 920 aa, unidentified
  REGION 1..920: note = Cas Enzyme sequence
KDLLYSDGENSLKYLLTHIGDYDTEHIYISNDLGLTDISQQIFGQYDVYTSGIKTELCNQIKQSAKEKREPELYKERINKLFKSAKSFSINYLNSFAEGDKTIQAYYARLGAHDLEGEQSTNLFTQIEMASIAASDILAGKHTNINQSEEDTKLIKDLLDTYKALQHFIKPLLGNGDEADKDNEFDARLRNAWDALSVVTPLYNKVRNWLTRKPYSTEKIKLNFDNAQLLGGWDLNKEPDCTSVLLRKDDMFYLAIMDKKYNHAFDIDELPCEGECYEKVDYKLLPGANKMLPKVFFSKSRISEFAPSLAIQKSYNEGTHKKGSNFSISDCHRLIDFFKQSIAKHEDWSKFPFSFSDTKRYEDISGFYREVEQQGYMLSYRNVSVSFINQLVDEGKLYLFQIWNKDFSKYSKGTPNMHTLYWKMLFDEVNLADTVYKLNGQAEVFYRKSSLKLENTTIHKANQTIKNKNVQNEKKTSTFDYDIVKNRRYTVDKFQFHVPITLNFKATGGDNINANVQDIIRNNGIEHIIGIDRGERHLLYLSLIDLKGNIVKQMTLNDIINEYKGNIYKTNYKDLLVTREGDRTEARRNWHKIENIKDLKEGYLSQVVHIIARMMAEYKAIVVLEDLNMGFMRGRQKIERNVYEQFERMLIDKLNYYVDKQKKATENGGLLHALQLANKFESFKKLGKQSGCLFYIPAWNTSKIDPVTGFVNLFEIHYENVDKARCFFSKFDIIQYNEERDWFEFAFDYNDFGTKAEGTKSKWTLCTYGTRIKTFRNPNKLNQWDNEEVVLTEEFKKIFNEAGIDINGNIKDAICQLKEKKHLESLMHLMKLLLQMRNSVSNSEIDYLLSPVADENGEFYDSRTCAPTLPKDADANGAYNIARKGLWVIEQIKQTADKPRLAMTNKEWLKFAQDKPYLNE

SEQ ID NO: 157 - protein, 921 aa, unidentified
  REGION 1..921: note = Cas Enzyme sequence
MTNYTDFIGLYPVQKTLRFELRPQGKTAEKMRESGLLEQDREKAKNYIVMKALIDDYHRRFINELLEKASFDWQPLFEALNNVKVNKDDKSKKELEKEQLHMRKELIGLFEKDERFKYLFSEKLFSELLNKEISERNDPDEMEAMRSFDRFSGYFIGFHENRRNIYSNEDKHNSLAYRVVAENFPKFADNCRKYSLIKENMQEAVVEFKKEIASVVDIDVDQMFDISYFNKVLTQKGIDDYNTMLGGVSEEGSVKIRGLNEFLNLYYQKVTDNKRIKMAPLYKQILCESKTKSFIPYMFENDEEVISSINQYYDSVKYDILQRSVYLLSNYKEYDASKIFIDQKSISSISIVLFGSWETLGGLMQIYKADQIGDPGLEKTRKKVDKWLSSSYFTLKEVFEAIGEQDPFRVYVEKLSLVLKNIEEFDKSCLLEGTHFSGDELLTQDIKGFLDLLMEVQHLMKPFNAKEDLDKDAAFYSEYNEIYEALSEIIPLYNKVRNYATKKKYSTYKIKMNFGNPTLAAGWDLNKERDNTAVILLRGNNYYLGIMNPKKKTKFEELPSGEDNDCYRKMVYKLLPGPNKMLPKVFFSKKGIGTFNPSKEILEGYETGKHKLGDSFDIDYCHSLIDFFKENIPKYGDWGTYEFKFSPTEEYSDISQFYKEVSEQGYKITFQNISRKAIDDLVNNGALFLYQIYNKDFSEHSKGKNNLHTMYWKAAFSEENLRNVVIKINGEAELFYRDKSDISKTEHSAGTILVNRTDRKDNPIPNSIYYELFKYKTGQIKSVSDEAKQYLDDLVTHEAKYPITKDRRYTEDRMFFHIPITLNFGSSGNTNINKAVIDHVLNSKDVHIIGIDRGERNLLYVSVIDRKGNIIKQRSLNVIDGIDYHEKLDQREKENISARKSWSNVEKIKDLKEGYLSYVIH

SEQ ID NO: 158 - protein, 924 aa, unidentified
  REGION 1..924: note = Cas Enzyme sequence
MANDKDNSLKPACLKSTNLRFRFIPDEVRKDIAATHICHNDLVAQLFDLFMTLNNQPYTTTKGEQVSQELLDQKRTNYAKHMDPDQAFPLFDQLIDGIQKDPNPFYYQAMLARRFKENGSLIESGGKENASPPLKALRKLWDENIFPLTNTNNTKQLPFKLHKSAYCAAIALFRNWRANDENTQKEYQALKEDTQKIVDHANQFPTQENLYQEWKQQAEQDPKFKANAKFLARWQKTRQKLIKGQAPNQTPYNLLQDQYQDLWLNLQEIDFIALFTERDEAVRYLNEDAKQNASVPTPHTHNLPQDAHFGENYLGFSIKQTNSKLYATLELLDHRNITQLKSHTLELLPSRYFIDLEIQPIKGTKNFQFQYKTGNLRQTPTTAILKEPYLRFNNQLLRTIDPTNFANGYLGQVYLSLPLNVQTKFNDPLYENYKTDKKGNQALDFKPLKNTITYFNTAANDKKADQYLPDIKVGLKAISVDLNINPTLALTTYQLKDNHTATKDDYQVPNLGQATKIEEIKIGTIHSQEFVDQIKNLDDKIYAAKKLIYLYKDLQKNQDEDLKPYDKAFKLAGINPTSQPYDLLNELNSTIGNIARHFRNLRTYTHRHTGVSADSIKYIMVYKKYISLMKSWRYKDQEPLQPGLRRDPRHFSRHLRTLRNIKKDQIKKIAAAIAHYALYQQAHVVLIEDLENFKFSLARTKQENQLLEVWSAREIKNYLVDFLTPHGIALQLIDPRDSSQIDAQTGEYGFRDENEKEILYVQREGNVTTVDSDLNAAQNLQRRFWTRYQDANSIWMRTVVKDGIEPRSLYVPDQEGKRFKAAMTRLGYNTFVLKLGKNLVGELEEVTAKKLKEYASHAQGTNRRPFYRHYDEWLPWKQHQLLRKELKESWTSQQQQPNDDKSHLTLWQTPTSSNITPQEMLDSA

SEQ ID NO: 159 - protein, 926 aa, unidentified
  REGION 1..926: note = Cas Enzyme sequence
LLENLYSFDTTKIFIKNDTNLTTISQQLFGDFSVFASALNRRYETVVNPKFESEYSKANEKKRENLDKAKAVFTKQEYFSIAFLQEVVSDYIKTLDKDAEIVQKFNPTTVVDYFKNHFNAKKENETDKSFDFISNITAKYQCIQGILENVDLYEEELKQDQKLIDNVKFFLDSILEVLHFIKPLHLKSETITEKDTAFYEIFEKYYEELSLLTPLYNMVRNYVTQKPYSTEKIKLNFENAQLLNGWDANKETDYLTTILRKNGNYFLAIMDKKHNKAFQNYPKGDHNYEKMVYKLLPGVNKMLPKVFFSDKNIAFFNPSTELLENYKNDSHKKGDNFNMNHCHQLIDFFKDSLNKHEDWKHFNFDFSETKSYKDLSGFYREVEHQGYKIKFDEIDSQYINTLVEEGKLFLFQIYNKDFSPHSKGKPNLHTLYWKALFEEKNLENVMYKLNGQAEVFFRKASIQKKNIITHPANQPIQAKNPLTPDSKSTFAYDIVKDKRYTIDKFQFHVPITLNFKATGGNYINPSVLEYLKNNPEVKIIGLDRGERHLVYLTMIDQQGNILQQESLNNITDSKITTPYHTLLDNKEAARDIARKNWGSIESIKELKEGYISQVVHKITTMMVEHNAIVVMEDLNFGFKRGRFKVEKQVYQKLEKMLIDKLNYLVEKDKQPHETGGLYNALQLSNKFESFQKMGKQSGFLFYVPAWNTSKIDPNTGFVNYFYTKYENLDKAKNFFEAFESIRFNGNYFEFKVDQYSKFNPKAVETQQEWTICTYGQRIETKRDVKQNNNFVSREVELTTLFEDFFGKHRITYGDGNCLKKDIDIQEDKKFFEELMHLFKLTLQMRNSVTGTDEDYLISPVKNQDGYFYDSRKADETLPKDADANGAYNIARKGWMLIDKIKKADLSKKIDLSISNKDWLNFAQKNI

SEQ ID NO: 160 - protein, 928 aa, unidentified
  REGION 1..928: note = Cas Enzyme sequence
SLKQSGEKKAGFDKNSEEYKFPDFVSWQILKVALESLVGSNKSVWKEHYFKDISDLSSKDIWCQFLMLFQHEYARLRQNGHEKTGKDFFELAIAIEEKLSQVNFNVDDPTKEAIKLFADRVLRIYQFAKYFSIEKSRQWNPDGLETDDFYVMYQQYYDESYEVIVKTYDKIRNYLTRKPFNQNKWKLNFENPTLAAGWDQNKETDNTAIILRRNGRYLLAIMDRRNNTIFKNVSSKHGGYEKVVYKLFPDPSKMMPKVCFSAKGRDFFKPSEEILRIYNNAEFKKGDTFSVTSMQKLIAFYKQALNLYPGWSMYRFGHVKDSDKYRENIGEFYRDVAVDGYQLSFENVDEHYIQDANANGKLYLFEIHNKDWNLASRDGVEKISTKNVHTLYFEQAFSSKNVAENFVVKLNGEAELFFRPATSAERLGHRQDKNGKIITNKNGDPVVRNKRYAQDKIFFHVPLTFNRTALPVTSNQFNRSINQILADNPEINIIGIDRGEKHLAYLSVINQKSEILEIKSLNTVNGVAYAELLDERMKSREAARRDWKNVEQIKDLKKGYISSVVRVIADLIIKHNAIVVFEDLNMRFKQVRGGIEKSVYQQLEKALIDKLNFLVDKHEIDPRKAGHILHAYQLTAPFSTFKEMGKQAGLLFYTQAEYTSQTDPITGFRKNIYISNSETVSKIREFIQNFDNIGWDEERQSYYFVYNPINFVAKEYKDSTLSRIWKIYADVPRVRRENKNGYWTATALNPNEKFEELFKLWGFDNAHGSGIKEQIKSKDLNGTKEFDGKPRNFWHSFVYLFNLMMQVRNSTATEYKRDSQGDVVDIIEGVDFIASPVEPFFTTDGGRYTQGRVNLAFLEKKFIGGTENKEQFKKEFNGDANGAYNIARKGVIILNKITSNREKPDLFISKNEWDEFVTSGQGGEKANE

SEQ ID NO: 161 - protein, 928 aa, unidentified
  REGION 1..928: note = Cas Enzyme sequence
KQLLENLYSFDTTKIFIKNDTNLTTISQQLFGDFSVFASALNRRYETVVNPKFESEYSKANEKKRENLDKAKAVFTKQEYFSIAFLQEVVSDYIKTLDKDAEIVQKFNPTTVVDYFKNHFNAKKENETDKSFDFISNITAKYQCIQGILENVDLYEEELKQDQKLIDNVKFFLDSILEVLHFIKPLHLKSETITEKDTAFYEIFEKYYEELSLLTPLYNMVRNYVTQKPYSTEKIKLNFENAQLLNGWDANKETDYLTTILRKNGNYFLAIMDKKHNKAFQNYPKGDHNYEKMVYKLLPGVNKMLPKVFFSDKNIAFFNPSTELLENYKNDSHKKGDNFNMNHCHQLIDFFKDSLNKHEDWKHFNFDFSETKSYKDLSGFYREVEHQGYKIKFDEIDSQYINTLVEEGKLFLFQIYNKDFSPHSKGKPNLHTLYWKALFEEKNLENVMYKLNGQAEVFFRKASIQKKNIITHPANQPIQAKNPLTPDSKSTFAYDIVKDKRYTIDKFQFHVPITLNFKATGGNYINPSVLEYLKNNPEVKIIGLDRGERHLVYLTMIDQQGNILQQESLNNITDSKITTPYHTLLDNKEAARDIARKNWGSIESIKELKEGYISQVVHKITTMMVEHNAIVVMEDLNFGFKRGRFKVEKQVYQKLEKMLIDKLNYLVEKDKQPHETGGLYNALQLSNKFESFQKMGKQSGFLFYVPAWNTSKIDPNTGFVNYFYTKYENLDKAKNFFEAFESIRFNGNYFEFKVDQYSKFNPKAVETQQEWTICTYGQRIETKRDVKQNNNFVSREVELTTLFEDFFGKHRITYGDGNCLKKDIDIQEDKKFFEELMHLFKLTLQMRNSVTGTDEDYLISPVKNQDGYFYDSRKADETLPKDADANGAYNIARKGWMLIDKIKKADLSKKIDLSISNKDWLNFAQKNI

SEQ ID NO: 162 - protein, 929 aa, unidentified
  REGION 1..929: note = Cas Enzyme sequence
MEKPGDIQLFEALAADDATCVWRSEGGKGDSSILTDYVRAAVADQNAVRFKVPAYRHPDPLRSPSFIGFGNSQWAIAYSAQAEVRERKKQLERAGKSEKDADRAREALAREPVLQQVSLDLWGLGEMRPVEYRWQSTRLLNDLALGSVRYLKGEKVSRATRFGAAGTAGGPFLLNGIDDDSPWNGRLQAPRRELEDLARSLDAQDLPYDDETKWPGKLQARLQRIGWFLSHSAKLTPSGPWLDYVAKGLSDGWEWASGRSGSYLFREDNKARKGRAKLILSRLPGLRVLSVDLGLRTSAAAAVWHVVSKRELNAARDAADSMTEGDLYCLVRRGNRTQVFRRIGPSAWARLDRQFLIRLDGEQSAARPATNDEWNALQNLHAWLGVSRENKPDRLPPVDRLQQQAERLCRLGLRRLSDLALVAFLLSAKTRPIIGGRTVPLDDEGRIEAAQDALTIWHALASSEEFQDSQLRQLWRARVSDGPPLVGRLTKKQRQEVREALRPVAERLSGNAAVSDELASLWQQRSAEWGKRLRWLRDWVIPRFSKRTKGERVRLARKVGGLSLDRIATIRGVYQVMRAYASRPEPTNLRAGVERLEKAAAQKLRPEFGRRMLAKMERLRENRVKQIASRIVEAALGVGSEDRLHWDKGRKRPSATIADPRFAPCHAVVIENLENYRPDDKRTRRENRGLMNWAARAVHKYLVEGCELHGLYLRQVSPSYTSRQDSRTGSPGLRCNDIPVKELTNPEGWIGKLVARAEEAAKEGAASPRQKLLVTLAEAARSGELTSSAVRILAPGGQLFVAADSSSSAAQGIHADMNAAANIGLVSLLDPDWPAAWWRLPCKAATGEVDETKVGGSGAVPIGRTILDPSAEAGKGYVNAWSDPQEKAVSRREWVDTKAYWRGIEERVVEILLAWNRSGGRDRQEKVPF

SEQ ID NO: 163 - protein, 931 aa, unidentified
  REGION 1..931: note = Cas Enzyme sequence
EIYQDAILPLKDILLHLAHYDLNRVYLKNDTGITNISQKIFGDWGVITKAIVKSFTKQYKGKAKPGTEKWDSELNKYQKGFESFSINFINESLLLLESPEYHFSIEKYFIIGGKCKSGANMFQAVEDKYSIARQLLNNVYPEDKNLSQQQGDVDKIKQLLDSIKDLQWFLKPLLGSGKEPEKDERFYGEFSTLMDLLDQVTPLYDKVRNYMTAKPYSTEKIKLNFDNSLFLSGWARDYDTKAGLLFFKDGKYYLGINNKKLTVDEKNELNSSNSALSGKRIILDFQKPDNKNIPRLFIRSKGDSFAPAVAKYNLPINEVIDIYDSGKFKTEYRKTNEADYKKSLSRLIDYFKEGFSKHESYNHYSFCWKETSQYKDISEFYKDVEVSCYQVLEETINWESLMEFVETGKIYLFQIYNKDFSSYSSGTPNLHTLYWKILFDKENTQDVVYKLNGQAEMFFRKASIQHKNRILHKANRPVDNKNELNPKRQNVFQYDLIKDKRYTVDKFQFHVPITMNFKATGINNINPLVNEFIRDNNDVHIIGINRAENHLLYIVVIDSKGHIVKQFSLNEIINEYNGNKYHTNYSQLLNKREAERNEARLNWSTIEGIKTLKEGYLSQVIHQICQLIVQYNGIVVLEDLNMEFKQGRQKVEKSVYQQFEKKLIDKLNYLVDKKKSLSEVGGTLKALQLTNKFESFQKMGRQSGFLFYVPAWFTSNIDPATGFVNMIDTRYQNIEKSKELFSRFADIRYNAEKEYFEFEIKDYTQFNPKSEGTRQNWIICTFGTRIEKFRNPDKNNQWDSREIDVTECFKALFEQYNVNFNENLKEQIVNINDKAFFEQMLDFLYLTLQMRNSEIGNAGSDYIISPVCDPNGRFFDSRTAGHQYPENASANGAYNIARKGLYYVNQIKQADDIRALRLGLTNNEWLKFVQD

SEQ ID NO: 164 - protein, 932 aa, unidentified
  REGION 1..932: note = Cas Enzyme sequence
DICFDVHKNVQTPFPRALCLTLWTGSEMKPVPLCWQSKRLACDLALGNNERNAGASAVTRADRLGRAASNVTKNDEVNIAGLFEQADWNGRLQAPRQQFEAIAAVRDNLSLSAKEREQRMSGMKDRIRWLVTFSARLQPQGPWCDFAETNQLRIDPQYWPHADANKTRKGQARLILSRLPGLRVLSVDLGHRYAAACAVWEALSAEKVKEACHAAGRKEPTENDLYLHLKKKVKKQKKAKAVEVEETTVYRRIGADTLLGGTQHPAPWARLDRQFLIKLQGEEEGVREASNEEVWKVYQLEAELGRTSPIIDRLVKAGWGQSNKQQTRLDALRELGWKPASGAGVSDGTDEDEAEVRKPSLSIDELMSSAVRTMRLALKRHGDRARIAFAMTAEYKPMPGDRKYYFTEAKELSANDDQATRDNKHIEFIQDALVLWHGLASSRGWRDDAAKQLWDDHVAKLSGYKAPEEIGEDASGVERKKKQKENRERLHDVAKALAEDTTLRKTLHDAWETRWEDDDEQWRKQLRWFKDWILPRGKAVDDPAIRKVGGLSLTRLATLTEFRRKVQVGFFTRLHPDGTRAETKEQFGQSALDALEHLREQRVKQLASRIAEAALGIGRMRRPMGGKDPKRPDVRIDEPCQAIVIEDLTHYRPEETRTRRENRQLMTWSSSKVKKYLAEACQLHGLHLREVSASYTSRQDSRTGTPGIRCQDVPVKEFMRSPFWRKQIAQAERKQAEGKGDSRERFLCDLNVMWKDKAVADWEKAGVARVPLKGGEIFVSADPASPAAKGLQADLNAAANIGLRALTDPDWPGKWWYVPCEPGSFSPVKDKVEGSAAVKPDQALRQPAPAQSSDAKDKKKRGKKGAGKSKEVVNLWRDISSSPLECIEFGEWKEYAAYQNEVQCRVVRVLEEEIKGRDKQPHDGAKEDDILF

SEQ ID NO: 165 - protein, 932 aa, unidentified
  REGION 1..932: note = Cas Enzyme sequence
IKSALEFYYENEIDPEFEEKLKNAKSINKSKKISKEKDSWMKDYVTIATVQKALDVYIESLDTKHDLRDVYSESLITKYFTNYFKTRLTSGEEVDYIYNIGQKYKAISGILKTKDEDVLKKESVVDQLKDFLDSMIDLNRFVQPLNLPSEDLESLSCKDEIFYSDFAPLMEQLNKIIRLYNMARNFITKKKSDEKNIKINFENATLMFGFDINKQYDNSAFILRKNGLYYMGIISKTCKKFIFDDMPRIKDESNAYEKMNYKLINNAYMSLPHVFFSKSRAQEFKPSEEIERIHLTKTFKKGDNFNIKDCHKMIDFFKESIKKNHDWNVFNFKFSPTESYNDISEFYREVDIQAYKVWFDEKISDSYINTLVEEGDVYLFKIYGKDFSEHSKGMPNLHTMYFKSLFTEENLKDVVYKLCGNGEIFYRKVLIKKEDTITHPANEEIKNKNPLSENKVAIFNYEMKKDKRFTVEKYFLNIPIELNFKADGHENINNKINNIIRNNEYANKLSMDRGERNLIHIIVRNQKGETLESIRLNIINNADYKRLLKERENERKTARKGWKTIENIRNIKKGYLSQAVNVVVSLVRKHNAVIFMEDLSFGFKNGRKHIETQIYQGFEKALIDKLSYLVFKDKGMDSKEPGGTLNALQLCNKFKTFKEMGKQNGIIFFVPAGYTSKICPATGFVNLLKTKYESNKKAKFFFSNFDYIKYNKDKDYFEFSFDYNNFIKSNDENSLRNTKGAITKWVACTYGDLRYKYNRNTKASDEINVTQNIKSILDKFNIPYKNGKCFKSSLIEKDEKDLFCEILQMLSLTLSLRYSKTGTDIDFILSPVANKNGVFFDSRNATNAMPKDGDENGTYHINLKGDWVFEQINKTEDSKKPNLYLRNNEWFAYAQSKCNEIDNAPNWNYRIKKEVSKKKTSKKNKKEVVVKK

SEQ ID NO: 166 - protein, 937 aa, unidentified
  REGION 1..937: note = Cas Enzyme sequence
PHFQPIWREDRAKLWHAPDPLRAWRDYTDLRFELADVERPIRFTPAHAVHSPRYFIIPKQGRYGSEHEAGLLALTTGIVLKTERGSEPAKVRIHYAAPRLFRDQLRRVGDSGLESVPWLQPMMQALGLPEPDRTDFSNCRVTLQPESEDNIQLTFPVPVEPVKLQALLGHKDKWNYQPSGKGGEKNFGQFNYSASEPRVETSLRWASDIAFAKEAGQPRKREPEPWYRKMDSFACLSVDLGQRGAGAYARIEARCDGKFGTNKQGQPVPTRFVGETEGKQWCAALASAGLFRLPGEDAKVWREQTELDARKRKPKDSGKPFDMREEFWGDHGRPAEPSEADETAKLMREFEAVEKDAEGREQFPLLPANWRDALTALTFPEQNDKLLIAARRAQSRVARLHRWCWFLADETKRSEAFKEMSDCEDERLLSAAERERAKQNDPRLADNIRTRLEQKQNVLPPLLLQLANRILPLRGRVWAWNPHPDPKAREGRCHRLEMADSPAHKPMIRGQRGLSFPRIEQIEELRKRFQSLNQTLRRELGAAPPKRRDDSIPDPCPALLDKLDEIKTQRVNQTAHMILAAALGLKLAPPPENKAELRSTRDVHGQYVRERPPVDFIVIEDLRAYRASQGRGRKENWRLMRWCIGHVRDKLRELCEPFGIPLVETPAAYSSRFCARSGVAGFRAVEVTPGFTKHGHWAWLAAKKDDEGNPAADVKWLLELDAQLCMSQTDLEANWKVKHPGQPCPKRTALVPQAGGPVFVPVSAAAEGAELVPKVTQADINAAINLALRAIADPKLWSIHPRLRTKRPGESTAKPSKGKATRNKRPASASTDGSPATPMLLTREKRKFGEIGIELKLGQPAKGSALEDTTNPNYFRDFAGVAKWDKAEVQDPVSGQSVTLASGKALWSAVKELQRERCRGINDARLAAWGNKLDPFP

SEQ ID NO: 167 - protein, 939 aa, unidentified
  REGION 1..939: note = Cas Enzyme sequence
FYNNEIVNFNCYDGVINILDKLKDHFLDTLLFDKEKIYIRNDLSLTNISKDIFGDWSVIKGAIEEKYKLDNPREVKAKDGLDKIEKKIEKIKYFSIAYMEEALQSYLSDKDELRAKMSSDVMFNYFNNWDKKIADNIFNKISDSFIAIRQLLTSEYSLDKKLANDQDSKDLIKNFMDAIINLQRFIKPLHAKIDSELDIAFYANFDTYFERLSFGVKLYDMVRNYLTKKPFNANKFKLNFENSTLLDGWDVNKEADNTSVILRKNGLYYLGIMDKKHNKIFKNVNSEINLEYYEKIEYKLLPGANKMLPKVFFAKSRIADFAPSEELLENYKNETHKKGKSFNINHCHQLIDFFKTSIAKHEDWKHFGFKFSPTASYEDLSGFYREVEHQGYKISYKKIDISYINSLVELGKLYLFQIYNKDFSLYSKGTPNMHTLYWKMLFDEDNLSNVIYKLNGQAEIFFRKKSITNDIIVHNANEPIDNKNSDNPKKLSIFDYDIIKDKRYTVDKFGFHVPITMNFKANGNDNINQQANQVIKESNDIKVIGIDRGERHLLYLSLIDSRGKIIEQYSLNEIVNEHNGATYKTNYHKLLDAKEKERGDARVNWGVVENIKELKEGYMSQVIHKVATLMVEHNAIVILEDLNSGFKRGRFKVEKQVYQKFEKALIDKLNYFVDKKKDVNKLGGVLNALQLTSKFISFEKIRKQSGFLYYVPAWNTSKIDPVTGFVNMFDTRYTSVEKAKEFFGKFESIIYDASKEYFEFKLTNYTAFNPKADCTRQNWTICSYGDRILTFRNKDKNSQWDNKEVKPTDDFKKLFDDNEIVYMNGQNIKDFISTKDEKAFFKPLLDCFKLTLQMRNSKTNSDIDYLISPVCDKNGIFYDSRMADDTLPKDADANGAYNIARKGLWVIEQIKKSDDIKKIKLAISNKEWLNYVQTNDNAK

SEQ ID NO: 168 - protein, 939 aa, unidentified
  REGION 1..939: note = Cas Enzyme sequence
MEDRYMDFTKFQKLNSIIKTCSFEMIPIGKTRETMEKHNVIEEDAERKSNAELTKEVSDSFIREFIADYKEDMDWKDLYDAYGEDRARFTDIMNQKAEKLAKRFSDSFNEYINTFLKANGINDKKSKWSDSGYVDVVLPLYVSIHPDFSNDKYERAVASLLHCSNSLFKKYTTSYARIIAGTKKGSFADRSMENFQTACANSVMFDLISRNLSSVGSHDAFKEVFADAPLNMNEYLSQKGISRYNELVGDSFDESGQVIRYGVNHYINEWNQTHPDERMPKMHKLKKQILSIVEPSFRIRTINDETELFGTFDNIRTAEQRYAGMLESILENMNTADIYDKSGILVTSAERDSLANAITGEWSYFRRQIKEEEENRIREEYLQKKNRVKTKLTQKDNKQIEDALNKSIYSVADLNKMLGSDFGTIEEKLLDEYIRNKSKKESAYAQLVKTDFYDKKTIPAGDDVQRIQQYLDKVLSLTHIVRGLCADSQDPRTDFVFSDDVSSLEDDRVQIISCYNLIRNFVTKKREKTAKEKQIQLCFGRPAHFEQVWNNKQEGKFGNVDAALLEYAGKYYYMVPAAKNEAKLNFPVTDEPQMGECYNYLATKKAIGFAKAFAKFYIKSPEAMEGFEKTEEPFEISVGNDTMIISRKVYEDYEAKTFRESEEAKNKLIDCAKEFLSKNLSYCIYDWSVLKEANDYVNYGEFCNEVDSIAFRVINRYVSKKLVDDAVERGNLYMFEISSLDMYKDSSRMKNIMALRFNQIMNAMFTGDKSIIINNAPQIRYRPVVIEKKDVHPVGSRLVNKNTTDGRTIPGDVYLELCAYYNGKKDSLSPEASLYNEKVSVKDSDRAHIKDKHYTEEKFLITFSYTANKNVASATSGYQLNEMVRKEIRENGCNIMAVIRGIDNLLYYAVVDENGNRIEAGDLNVVGDTDFYEKLTILV

SEQ ID NO: 169 - protein, 939 aa, unidentified
  REGION 1..939: note = Cas Enzyme sequence
DPWKEVDKRRREVEKAKNAAQRCSNDGEKKIKAEEKLRLAEMLLHEAERELEFLASPKRVCMKLWNGINLQEVQMLWRSKRLDKDLAIRCGNRGPHAIQVSRADRLGRAAVNASKSDSLQIAGPFEQRCWNGRLQAPREQLARIGRRVERHGWDKKSQMMKRDIKWLLTFSPKLRPLGPWLEYGGKEKIKERQEVEEKGGRGNDARLLLCRLPRLRVLSVDLGHRYAAACAVWETLGEEDFKREIKGRKVLCGGSSGECMYCHTLHRDREGKVLKTIYRRIGADTLPDGRPHPAPWARLDRQFLIKLQGEREGAREASVEEIWKVHELEARLGRTKPLIDRLVAAGWGQTPGQKKRLRILEGLGWKQTQGVVDVTKDNEMSYKPSLSVDELMFSTVRTLCLALGRHGDRARIAHALTADYKKMPGGQRYYFNRAEDASVGDDESVRHEKHVEYILDALLRWHDLFEAKGWQDEEARELWDKYIANLSCCLEVSEMDDSLTDAELKKRRKDFKERLRPVAEAIVKDGKLRKKIQQEWKRRWERDDEKWREDIRWFKHWIFPRKKQAGPSIYRMGGLSLTRLATMTEFRRKVQVGFFTRLHPDGTTGEIGEDFGRKVLEDLEVMREQRVKQLVSRLVEAALGIGSEDLSHWEGQKRPQQRIEDPRFSPCHAIIIEDLTHYRPDETRTRRENRQLMTWSSSKVKKYLAEACELHGLYLLEVPARYTSRQDSRTGAPGIRCSDVSVAEFKNSPYWRKEVARAKAKNEKNQGDARDRYLCELDAQLAGSGRLKNVRVPIAGGEIFVSADTGSPATKGIQADLNAAANIGLRALVDPDWPGKWWYVPCDSSSFKPINDRVKGCKVIDTQESLKEASPGLAVKGEKNSEKKRQRRAKHREVVNLWRDISAKPVSAAYGPWDEYSVYWNRVQDQVVKILRNNLALSK

SEQ ID NO: 170 - protein, 942 aa, unidentified
  REGION 1..942: note = Cas Enzyme sequence
MKRIYQGRASRVEIADGKDEHGKAKWKELPDWSLALWRHHEIFQDAVNYYIVALAALGNSPQSKLTRLRGLLEKVWTSFDKKGQRRSGMGESLKRAWQMAEPPTLAEAVERFTKPLFSNGVREVEMELAGESLAFDLGGEGSIQQGGIEYWPYFCQSGFKRGVTFPREAAQLAKEKALHQLPRVIWNPRVEAHTSLLQRALKQAYFCNLSGGGKTLPEIRVKEVFQTALTALEGAGHITANQRQALAAKLETKRPDVFEYAGGSINKDALKKRFFGFLVFKHLAPDLAGLEILRRIYARPKQKLKQKRSDSPQQGDLEVRLLSLGEDPIKLVRAKAGIIFRAFTALPGWRCGSTSDELHERSAYAHEISAGECHQVAWKDFDVAAFKEALKVYNQFQKNVEDREAKLDRLALKLLVMDGERAAEGYSGQSELERGIRERLANLWQVAKGKPKPPADAAGEEPALPRFAGDPRIERLRKIVNDDLAEEYRLTDGRRTPYGLRRRTMKGWGEVKRKWQQIVRSGERFSEEKRRKLKAALDELRGGEKREQIGSHKLFEALIADEEAWGIWREPDDMHQEQINKHEWASDPLEAFREYCEIREALEEVSSRPLNFTPADARYSRRLFMFTDVCSFGKDRGEFKHDAKALAVTVPVALSDSDGKISMRPCRLRYSAPRLVRDRIRAEDGAYLQDWTQPMMRALLGEKDDRINPQELQDAAVQLMPDFDAKGKLRILLNFPLDLNEEKIRERVGKAGLWDKQFVSWKKGAQLPFLRWEQEFDGKESHRWWDRVSSFRVLAADLGTRHAASIAIVECGTKRDGCSRPIGSAGGKDWFARYRTGSIVRLPGENAEVLRPESPLDKDGLGKAFREELYGERGRTADDAECAETFAMLSALGQSDLLNDIPDAAALKQRLSFPEQNDKLLVALRRAQNWIATCVSWHWKLT

SEQ ID NO: 171 - protein, 942 aa, unidentified
  REGION 1..942: note = Cas Enzyme sequence
DEVARKMRDRLKWLVTFSAKLECRGPWYRFFNGQGDRSPFRKIVTSGPRKGQTYESVNGWPHAIPNDDREGHAKLILSRLPGLRVLSVDLGHRFAAACAVWEAISREQFERECRAADEKPGWDVRRDADLYATIEEPERETNRVSAKARAQGRIKRFRPATLYRRIGEDFIRDPKTGEPTETPHPAPWARLDRQFFIKLQGEERPARAASNKPEHGINETAMVAGLAKALGLLREDTDTSGSRSVDELMRWAVSMATLGLKRHGRRAKIAYAFKPDCPGIPGMGGTLTTITRGDDAHIRFLTDALMDWHALAVDTDWDGSAARQLWNQRIKPLPNGFEIGEPTPPDPNAERPTRQHRRNSEDELREKLKPIAKHFAQADPTSNQGIHEEWATAWNTDDGTERTKDDFEHTLIRNESGRVIGSRTTPTKGKESPGGWHEHLRAITDWIMGWHCPGAESKRWNRNVGGLSLTRIATMRALYQLHKSFAMRPRPDKVQGAPERGESNVGIAQSILDAMERMRVQRVKQLASRIAEAALGVGIERDRVWDDEKKKWRYPKRPRGLLYHEDGEGNAHGDPRFKTCHAVVIENLRNYKFADTQPRRENRALMSWSAGKVRKYLEEACQLHGLHLREVMPNYTSRQCSRTGLPGIRCADVAVDPKTGEPQAFWWKKALIAAKKKTGAGNDTKTTGDAESRFIVALDKHLSELKRQGKPLPKTVRLPRKGGDQFVAAPPWSCRADDHQPCPQCDAGRAVQADLNAAANIGLRALLDPDFPGKWWYIPATMDAGWRVPAPKSCAGSACLHGWKVAPKDGYLTADGQPLTATDDETVKQAEEAVNAAKNELDAAKKAAKKPGADQTSLNAAKDRHEKAKEALKEAKKAASQKEIVNIWQDPCARRTSPASGRWQETTAYWACVRKWAIGALRVKSGLVKRIDPSGLEAEVVG

SEQ ID NO: 172 - protein, 945 aa, unidentified
  REGION 1..945: note = Cas Enzyme sequence
ADSEEAIHVLHEIRSLLKHIASYDTERIHVRNDTQLTHISQKLFGSYAVLGDALSYYHDVVLAPSHQEDYQKAKTESKRGKLEKEKEKFTKQPYISLALLQKALDYYVLSLDDTHEVRKRYSTNCISDYFHIHFTAQKRADSDKEFDLIANIEAKYSCVKGVLEHYPSDRKLHQDKKTIDDIKLFLDSLMELLHFVKPLVLPPDSTLEKDNVFYGQLEPLYTQLELIIPLYNKVRNYATQKPYSTAKFKLNFENAQLLNGWDENKESDYLTSIMRKDGNYYLAIMDKQHNKVLKKAPKAEYGRGAYEKMVYKLLPGVNKMLPKVFFSKKNIDYFAPSTQLLENYKKETHKKGENFSLHDCHTLIDFFKASIEKHEDWRNFGFQFSETATYDDLSDFYREVSHQGYKVTFQPIAENYIHELVDEGKLYLFQIYNKDFSTYSKGRPNLHTLYWKALFDPDNLQDVVYKLNGQAELFYRTASIRAEDRVIHTRGQAIDNKNPLTIKQQSTFEYDLIKDKRYTVDKFQFHVPITMNFKAGGRDNINQEVLAFLKNNPHVNIIGIDRGERHLIYLTLIDQQGNILKQETLNTIVSERYPNETPYHTLLATKEKERDAARKNWGTIENIKELKEGYLSQVVHKIAKMMVEHNAIVVMEDLNFGFKRGRFKVEKQVYQKLEKMLIDKLNYLVFKDKDAHEPGGLYKALQLTSKFISFKDLGKQSGFLFYVPAWNTSKIDPTTGFVNLFDTRYESIGKAQDFFGKFDTIHFNGAKGYFEFVFDYDAFTTRAEGTRTKWTVCTYGSRIMTFRNPDANNQWDNKEIDVTQEMEDLFGTYGITYGDGSDIRGELLRQTDKGFYERLLHLFKLTLQMRNSKTGTDIDYLISPVMNARGEFYDSRRADSTQPKDADANGAYHIAKKGLWLLEQINQADDLKKVKLAVSNKEWLRFVQK

SEQ ID NO: 173 - protein, 947 aa, unidentified
  REGION 1..947: note = Cas Enzyme sequence
DKNNAPEKSLKELLSSIEEYYLDKIYLKNDASLTDISQKLCGSWSFITSAIEADYEEKNPRKAKESEEKYNTRKEKYIKSFTSFSLNELDTYIKKVYPEGNEIKISDYYKQKHPDLFKEISQSYDNIKNILNTKYPEDKNLSQDEENIEKIKRFLDSLKELQHFIKPLLGHGNEPEKDERFYSDFVKLWDILNKLTPLYNKVRNYLTRKPYSQEKIKLNFENSTLLDGWDVNKEPANSCVLLRKEGLYYLGIMDKKHTHVFMEDFETFNEPCFEKMEYKFFKDITTMIPKCSTQMKDVKHHFENSNDDYLIENDKYSVPFKITKEIYELNNVLYEGKKKFQIDYLRQSGDEQGYKTAVKQWIEFCLSFLQSYKSTDSYGYDKIETFLTYDRIDRFYEEINKILYNISFRKIPESYINNLVDSGKLYFFQIYNKDFSPHSKGTPNMHTLYWKMLFDPDNLKDVVYKLNGQAEIFYRKAGIKKNDIIIHPANTPVKNKNKNNPKPESIFEYDIIKNRRYTVDKFQFHVPITLNFKAPNIKNINEKVNIFIKESTAPFVIGIDRGERHLLYLTLIDFNGNIVQQFSLNEIINEYQGNVYKTDFRNLLDKKESGRDEARKSWKTIENIKELKEGYLSQVVHKITELMIKYNALVILEDLNMGFKRGRQKVEKQVYQKFEKMLIDKLNYLADKKKNPGSEGGLLNAYQLSNRFESFQAMRKQNGFLFYIPAWNTSKIDPVTGFVNLFDTRYESIDKSREFFSKFESIRFNNEKNYFEFLVSDYSKFNGKAEGTRLNWKICTHGTRIESFRNPTKNNQWDSREINLTEEFEELFKDKIDINNSLKKSIAAQTDKAFFSKILHLFKLTVQMRNSKTGTDIDYMLSPVADSKGTFYDSRTALEHLPQNADANGAYNIARKGLWVIEQIKKADDPGKINIAISNREWLQFAQKEQQ

SEQ ID NO: 174 - protein, 948 aa, unidentified
  REGION 1..948: note = Cas Enzyme sequence
GDPRIERLEAILKTDLAAEYEMVEGESVSYGLQKRTIRGFREIKKRWQKIVKAGEPFSGEKRELLLSILKDYQTENPEGIGSVLLFEKLTERNNWLIWQEPPEATRQAWQEQQFAEDPLDAMVRRSEYQERIEKLSQPVRLTPADPDYSGRQYLFSDWKAGCKHEPGVSAVKVACAMVDADTCRWQYRMIRLAYSAPRMVRDGMKSVDETDAGGAVWMQPMVEALLPSRQIPMDFTKTAVGLMPVVGLSGKKKTLLNFPVEIEDRIVAEQLKKQRFTEADFIKFKDSKRYIRWFTDKVKDTPAWTNNDTFTCLAADLGQRDAAAFAIVEASTKKNHGARYIGDYEGDFWYARLRQTGLLRLPGEDARVWRNNRLRTELSGERGRSATETEQLDAFAICRELEQDPRLFGEDISRLSYPELNDKLLVIMRRAQSRLARLHTWAWMIESGKNKQKKNAFEGIIKEDSFSESFRKLAEQNDAVKVKTKLIQEIKLIRPLLVKNLQEIANRILPRRDAVWVWRERNETGSGCVLALERRKDRDGTVLIRGQRGLSLERIEQVEELRRRCQSLNRTLLHEPGTKPLMGRAARGIELPDPCPEILGKMEALREQRVNQTAHLIVAEALGVRLCNHNKTKQQRQLRDIHGEYERIPGREPVDLVVLEDLSRYLSSQDRPRRENSRLMKWCHRAILAKVKELCEPYGIAVLETPAAWSSRFSSRDGKPGFRAVELVPGHKYKFPWNRDLQKYADVTDGKKKVDATERTRLQKVHHFFEILEKVNADKKKKGTKQRSLLAPLAGGPLFIPFQGPAMQADINAALNLALRAIAAPWVHDIHPRIRTERAPDTGLRVRRDNILEKRRWKEAYPVRLAQDSESIRLAADRNPNFFVDLDKCSLYGRAEINGIMVASGSGLWGTMNQKAWEIVNRLNADRLKNWGFDRMLEEKADEEEIPF

SEQ ID NO: 175 - protein, 951 aa, unidentified
  REGION 1..951: note = Cas Enzyme sequence
KLAVARLLSWESWNLRCAKQREERHLRVEELKARLAQRPDLAIHLRAFEAWRRMDLNKAGALTSDVPYALGRRSARNFERLAEAWRGAQDNPVALRNAAATLQKKDPRAFPDPALVGWLLEHPEARALWQDEGGLAYIQLWALHTEAKRRLDRTKPTATLTLIHPTRHPNWVEFESASSNLKNFKLLQAEDGGLSVELPLLAREDAGFREIQSSFKLAPSAQVAVPSGGLQEPDQGKPRLRFVQAPALHRVAARAGWETWEGAVGSAFLQFDRDRLPDDPRALDGGRIGAAFLKLSLDLDPVDVPGCLREEPGAWSREGPKWVHHLGTALEGGQKTPHQSALRAGQRVLCVDLGVRTLGAALAFELTDQPPAPGAVSHPVPAYGATWWGVEVPGSARLLALPGEQGWESAVAWEERRKRQKNLQEPLWLFRQALRRRRILARQLPMDSWDASKILEALPELDGADPIRSRIEMALAALLGTDEPPHGQPAVEIRDRPRWEPVLRECLGLMPLRPLGGAAELGPRRREWDWALEALLGVWRGRSRRRDPRRQDVFGKSIQGIEHLEAIRALLRRWQNRARTGQIKRADRDREGTFASDLLNHINALRDDRLKEGANLLVNAARGLGFDRETGTWKQVHPPCHVLLLEDLNRYRTLKDRPRHENSQLMVWNHRSLAAKVGEMAQLFGIQVVSTGADYSSRFHAASGAPGVRVRQVKPEDPDAAWFKQELESLHLEAGAVKPGDWIPWPGGEAFATLGPEGTLVLEQGPLAADLNAAGSLGRRYLRRHGEAFKVAARQEDGGTWITVSAGVRVQGALRQTYSEVGGRLVPVSGSGGGFRLEPLPEKDWRKATGLQKAKAPKKVSGQGEEDGFGDDELMDEAEAKDALEAEAIHEAHGRPVNFFRDPSGFVLPKDRWYDGKTFWGSVRSRIQRELMLANARSTGGPAWSPDADAF

SEQ ID NO: 176 - protein, 951 aa, unidentified
  REGION 1..951: note = Cas Enzyme sequence
TWDRDMFQQAIERLMSWESWNIRVKKERKYLEDQIASIYQKHFDPEPDWFISLKKYEKERKEDLDGNTLPSDHDYRLLRRSIRGWDRLCERWQNSSDKTPDALWLIASELQTELKGGFGDPTFFRWLTKSENHFIWDRDKDVINLFVSFNGLQDKFERSKTHADFTIPDPVFHPLWVRYGGQESQTHKYRITPCGKDAKFEISIKTLAKQGNTIIENQLECLLADSKQFSTVEVLTYKDVPDSIYSQYKSQKNDKKAQWVKWSDPGSGHKFYGKTGGAKLQFDRPTLEKNSKKPACLTAGSFGSAFINITMDLIPIVQDFSQVDKAFKKYKPKEENSPRMVSNFNEDQLSTFVQTQADFGINGLESGLRVMTVDLGLRSFAACSIFELSNEKPNKKGLIFPVADTSSPVWAIHQRSFLLRLSGEETDKNIDEKRKQVSSERLELRSAIRRQSNLLSLTGKGNDERQESLNHLLQEIQWKREAGLKQTDDITGFMDNLKQLESIVLSNDEDWYKTVIELHRKWEQNIGVAFSEWRAKYRRRTKENQNLGGLSFWWINELTETRRLINSWSAHARTPGEIVRARETFGQRKDEQAREVDLDKRLLNHLNNMKEDRLKKGADLLVMSALGYVYDEENKKWIAKYPPCRLVLFEDLSRYRFRTDRPKNENSMLMKWGHRAIPKEVAMQGDLFGIRVGTVGAGFTSRFHAATGSPGVRVRVVKEDDLNQSWFINSCLSDWARRKKISQNLYKELMESSEQAKSEFISRKIKPGSHIAWAGGELFATLSKAKKPIIVHADINAAQNLQRRFWTRYADPERLPCIKMEVQGHDDDVFYIPEKIGKRLEYAMGYGRLVPTDYENSYKWEKLTQKQWQKQCGHHQDNIEDDEKDNDDMGEIEEIGNLTGERLTFFRDPSGVFFNKDHWIPSDKFWGTVHSTISQALSLISPFDDDSDVPL

SEQ ID NO: 177 - protein, 952 aa, unidentified
  REGION 1..952: note = Cas Enzyme sequence
MKEIKELTGLYSLTKTIGVELKPVGKTQELIEAKKLIEQDDQRAEDYKIVKDIIDRYHKDFIDKCLNCVKIKKDDLEKYVSLAENSNRDAEDFDNIKTKMRNQITEAFRKNSLFTNLFKKNLIKEYLPAFVSEEEKSVVNKFSKFTTYFDAFNDNRKNLYSSDAKSGTIAYRLIHENLPMFLDNIASFNAISGTGVNECFSSIETDFADTLEGKRLTEFFQIGFFNNTLTQKKIDNYNYIVGAVNKAVNLYKQQHKTVRVPLLKPLYKMILSDRIAPSWLPECFKSDNDMLTAIKAAYESLRNVLVGDNDDSLRNLLLNIDHYDLEHIYIANDSGLTSISQKIFGCYDTYTLAIKDQLQRDYPATKKQKEAPDLYDERIDKLYKKVGSFSIAYLNRLVDAKGHFTINEYYKQLGSYCREEVKEKDDFFKQIDGAYSAISHLFFGEHGEIAQSDSDVELVQKLLDAYKGVQRFIKPLLGHGDEADKDNEFDAKLRKVWDELDIITPLYDKVRNWLSRKIYNPEKIKLCFENNGKLLSGWVDSRTKSDNGTQYGGYIFRKKNEIGEYDFYLGISADTKLFRRDAAISYDDGMYERLDYYQLKSKTLLGNSYAGDYGLDSMNLLSAFKNAAAKFQFEKEVVPKDKENVPKYLKRLKLDYAGFYQILMNDDKVVDAYKSMKQHILATLASSIRVPAAIELATQTELGIDELIDEIMNLPSKSFGYFPIVTAAIEEANKRENKPLFLFKMSNKDLSYAATASKGLRKDRGTENLHTMYLKALLGMTQSVFDIGSGMVFFRHQTKGLAETTARHKANEFVANKNKLNDKKKSIFGYEIVKDKRFTVDKYLFKLSMNLNYSQPNKFDVNSKVREIISNGGIKHIIGIDRGERNLLYLSLIDLKGNIVMQKSLNILKNDHNVKGTDYKGLLTEREGERKDARHNIIGRRLRISKILNEVI

SEQ ID NO: 178 - protein, 953 aa, unidentified
  REGION 1..953: note = Cas Enzyme sequence
KEVYQVLNEFLSDLASKKILERVKKIGENVSEYEINKIYIQSKNFENFSSFMCGNWQIINDSLKAYYNETIKSKGKAKEEKVKKAIKAIEYKSLEDIDELVEKYNKDELNRKAEEYISAINEKIKDLDVNEIEYDEKINLIENETKSEEIKSKLDSIMEIMHWTKMFIIEEEIEKDVNFYNEIEEIYDELQPLVTIYNRIRNYVTQKPYSEEKIKLNFGIPTLANGWSKTKEYDNNAIIMIRDGKYYLGIFNAKNKPDKKIMEGHQSEENGDYKKMIYRLLPGPNKMLPKVFMSKTGIAEYKPSQYILEGYGQNKHIKSNKNFDIKFCRDLIDFFKTSINRHPEWSKFNFKFSETSEYEDISTFYREVEKQGYKIEWTYIGEKEIKELDENGQLYLFQIYNKDFSEKSKGKENLHTMYLKNLFSEENLKNIVLKLNGEAEVFFRKSSIKKPIIHKKGSVLVNKTYNENGERKSIPEEQYTEIYKYLNSIGTNELSEKSKKLMEEGKVEYYKANYDIVKDYRYSVDKFFIHLPMTINFKAAGFSPINNIALKNIALKDDMHIIGIDRGERNLIYVSVIDTKGNIVEQRNFNIVNGIDYKEKLKQKELDRDNARKNWKEIGKIKDLKEGYLSLVVHEIAKLVVKYKAIITMEDLNQGFKRGRFKVERQVYQKFETMLINKLNYLVDKDLAVDQEGGLLRGYQLTYIPESLKVLGRQCGYIFYVPAAYTSKIDPTTGFVAIFNYKGMTDKDFVTSFDSIKYDDERGLFAFEFDYENFVTHKVEMARNKWTVYTYGERIKRKFKNGSWDTAEKVDLTYQMRSILEKYEIEYNKGQDILEQIEELDEKAQNGICKEIKYLVKDIVQMRNSLPDNAAEDYDAIISPVINNNGEFFDSTRGDEDKPLDADANGAYCIALKGLYEVMQIKKNWNEETEFPRKELKIRHQDWFDFIQNKRYL

SEQ ID NO: 179 - protein, 958 aa, unidentified
  REGION 1..958: note = Cas Enzyme sequence
MHEFYEEVERVSTIAKELVTILAQGGFENEYGGIYLHNRAINTIARKWFVSAYEFENCLPQKGKKKEGSVRVAPFVSFAEIKDALGEKLAEDLLKEKLFEEKAYRLVKRTLAYSQFLALFAKDLEILLNEYNEKKNNFSKKDLRIFERGENDENVDALKDALDAGLHIVQFMKYFVLSSKKADDKPTHTSAEFYNHYDELYGDPDQKHDIVRYYDAFRNFLTKKPADQKKIKLNFENGALLTGFDKDKESEKLGIILRKNSIYYLGIINKEHNKIFDDKKHQDAFDVVDATSYEKMEYKLFPDPKRMVPKIAFAKKNRERFGWTQEIQDIKDEYARFQDDRGDRSNWSKQFDKIKLTKLIAYYQHALDRGGYKNTFDFQWNNPVDYSGIGEFNDHLTSQNYKIGFRQVRQRYIDDKVAQGELYLFKIHNKDFGEKSKGTQNTHTLYFLNLFSQHNLTHIKLRLAGNAEVFYRKSSTQRKEEQRKFIRPIVKNKRFTEDKYFFHIPIKIGASVNSISETKFNRTLNEKLRQSACLIIGIDRGEKHLAYYSVINQKGEIVDQASLNKINDVDYCEKLRTREKERLEQRKSWKAISQIKDLKRGYISQVIHKLSELVIKHNAIIVFEDLNMRFKEVRGGIERSAYQQLEKALIEKFGYLVFKDKGPLEAGGVLNGYQLSAPFESFEKMGKQNGVIFYTNPEYTSTTDPVTGWRQHIYIKSDATDNEALKVFTEKIGIGWSDDKQSYTFSYDQKDFWGDSPARKWVLYANAPRLERYRNDAGYWTTRETNSNDLLRELFEVWDFDQPEGDISEQIAMMYEEGKLKGEKIISEKSQRFFKALRYALNLTQQIRNSDSIRYVYERDAQGDIVEDSQGKMVVKEIGENVDFIASPVVPFFTTPNPYTKENLCGLVIENGDANGAYNIARKGIMMLERIKQTQANPDLYISKSDWDEWLMKDIKQK

SEQ ID NO: 180 - protein, 958 aa, unidentified
  REGION 1..958: note = Cas Enzyme sequence
MHEFYEEVERVSTIAKELVTILAQGGFENEYGGIYLHNRAINTIARKWFVSAYEFENCLPQKGKKKEGSVRVAPFVSFAEIKDALGEKLAEDLLKEKLFEEKAYRLVKRTLAYSQFLALFAKDLEILLNEYNEKKNNFSKKDLRIFERGENDENVDALKDALDAGLHIVQFMKYFVLSSKKADDKPTHTSAEFYNHYDELYGDPDQKHDIVRYYDAFRNFLTKKPADQKKIKLNFENGALLTGFDKDKESEKLGIILRKNSIYYLGIINKEHNKIFDDKKHQDAFDVVDATSYEKMEYKLFPDPKRMVPKIAFAKKNRERFGWTQEIQDIKDEYARFQDDRGDRSNWSKQFDKIKLTKLIAYYQHALDRGGYKNTFDFQWNNPVDYSGIGEFNDHLTSQNYKIGFRQVRQRYIDDKVAQGELYLFKIHNKDFGEKSKGTQNTHTLYFLNLFSQHNLTHIKLRLAGNAEVFYRKSSTQRKEEQRKFIRPIVKNKRFTEDKYFFHIPIKIGASVNSISETKFNRTLNEKLRQSACLIIGIDRGEKHLAYYSVINQKGEIVDQASLNKINDVDYCEKLRTREKERLEQRKSWKAISQIKDLKRGYISQVIHKLSELVIKHNAIIVFEDLNMRFKEVRGGIERSAYQQLEKALIEKFGYLVFKDKGPLEAGGVLNGYQLSAPFESFEKMGKQNGVIFYTNPEYTSTTDPVTGWRQHIYIKSDATDNEALKVFTEKIGIGWSDDKQSYTFSYDQKDFWEDSPARKWVLYANAPRLERYRNDAGYWTTRETNSNDLLRELFEVWDFDQPEGDISEQIAMMYEEGKLKGEKIISEKSQRFFKALRYALNLTQQIRNSDSIRYVYERDAQGDIVEDSQGKMVVKEIGENVDFIASPVVPFFTTPNPYTKENLCGLVIENGDANGAYNIARKGIMMLERIKQTQANPDLYISKSDWDEWLMKDIKQK

SEQ ID NO: 181 - protein, 959 aa, unidentified
  REGION 1..959: note = Cas Enzyme sequence
MNSFIVELTHYLLDDSEIANHSLVKLLKGLKEFDLNGVFLKNDLSLTEISQKMFGDWGIIQKALDKWYAEKYYEGKLKPESEKYQEEMKKYFRNRDSYSIQFLNECLLLLDQNYHKKIEDYFAGLGDFGDEEKKSGNLFEKYKNLYQSISSLLVEPYDENKDLSQNQKDVEKIKGFLDAIKSIQWFVKPLHGQGDEAEKDDKFYGEFSALCSILDNITPLYNKVRNYMTQKPYSTEKIKLNFENSYFLNGWAQDYETKAGLLFIKDGNYYLGINNKKLSVEEKESIKKNYQLSPAKRIILDFQKPDNKNIPRLFIRSKGENFAPAVNKYNLPINRIIDVYDKGKFKTEFRKVNEEEYEKSLHALIDYFKEGFTKHESYKHYPFSWKETSKYKDIAEFYKDVEVSCYQIFEENINWDILMDFVDKGKLYLFQIYNKDFSPYSKGTPNLHTIYWKMLFDEKNLQNVVYKLNGQAEVFFRKSSIKNENIIVHKANQSIENKNSLNKKAESVFDYDIIKDRRYTMDKFQFHVPITMNFKAEGLNNINQKVNEAIKESEENHVIGIDRGERHLLYLTLIDSKGRIKEQYSLNEIINTYNGETYRTNYHDLLDRKEGDRDEARKNWKTIETIKELKEGYLSQVIHKIAELIVKYNAIVVLEDLNFGFMRGRQKVEKQVYQKFEQMLIDKLNYLVDKKKPINEMGGSLNAYQLTNKFESFQKLGKQSGFLFYIPAWNTSKMDPVTGFVNLFSLKYENMEKAKTFFGKFDSIRYNARNNWFEFSFDYLNFTNKAEGTKTNWVVCTNKTRVETFRNPEKNSSWDNREILLTDEFVHLFDANKIEWKSGECVKENIVNQTDKSFFEKLLHLLKLTLQMRNSITNTEIDYLISPVANEQGEFYDSREELAKGKDSANRWKSVLPVDADANGAYNIARKGLWAIEQIKKAEDLKKVKLAISNKEWLSYVQG

SEQ ID NO: 182 - protein, 961 aa, unidentified
  REGION 1..961: note = Cas Enzyme sequence
KTSNEVIVAIEQFYDRDIDTFNLDNTTVNVVTEICRLLKERFNKEEYDLSHIFVRNASMTAISQQLFGDWSIITDALGHSFRKSKKESKKPDDDTKRYLKKIYFSVSEIEEALKLYSQEIDDEGLKAKLSPTNPIIKYFSAAMMNMETSPGQNEQKDIFEYFIESKQQAGEYLKNEYQTLELIGSKEVTEAIKHYLDAYLYILHFIRPLYVTPPRKDNAVMPTKDTSFYNEFDKLYRQLEKSLIPLYNKVRSFVTQKPYSVEKFKLNFENVTLLDGWDVNKEKDNTAVILRKDYLYYLGIMDKNNNRIFENAYIPEIRMGEKTYEKMMYKLIPGASKSLPHVFLSAKGIKLFEPTKELLENYEKGTHKKGDNFSIDDCHRLIDYFKKCIAKHEWKQFEFKFSQTKQYDDISAFYHEVDSQGYKLTFTKIPAGYVEKLVEEGRLYLFKIYNKDFSEYSKGKPNLHTMYWKSVFDSQNLQNVVFKLNGEAEVFYRYASIPLSSVVKHSKNQQIGTKNENNGKHYSQFDYDIIKDKRFTQDKFHFHVPITLNFKCGNAVKFNDAVNNEIRTHEKINVIGLDRGERNLVYFSVIDSNGKLIDQVSFNTIVNVHNGTKYGTDYRNILSRKEIARDKARKSWAAIGKIKELKEGYVSQVVHQIASLMIKHNAVVALEDLNFGFKRGRMKVEKQVYQKLEKMLIDKLNYLVFKEVAPNEAGGILGGYQLAAPFESFRSMGKQTGFIFYVPAANTSKIDFATGFVNVLYPKYENVNQAKNFLEKFDEIRFNAVKQYFEFKADINKFREAGEGLLKSEWTICTFGEDRYVYQPPTKTYTHINVTERLTDLFQYNRIDINDEMKDQILQSNDANLFKDLIYYLRVVLQLRYSDGQGKDFILSPVADDDGRFFCTEEAGANQPKDADANGAYHIALKGLLQLKKIREGKRGKDLAISNKEWYDFVQAKPCQA

SEQ ID NO: 183 - protein, 965 aa, unidentified
  REGION 1..965: note = Cas Enzyme sequence
KQILSDTETASFVLEQFENDNQLLEKIEQFYNTELINYETEGKTQSVFLQFEQLFKNMQNYDASKIYISNLSIANISKIIFGDWSIICNALAEWYDKHNTKGKKINEYKKENFLKQDFSIQQIEDAVLEYKNDTLNKEINFLLNYFASFLNEKSKKNIIQRIETEYSKVKDLLNTDYPEKKKLASDKDNVSKIKAFLDSLMDFLHFVKPFNIKKDTGLEKEENFYSIYVPLFEQIDKIIPLYNKVRNYLTKKPYSTEKIKLNFENSTLLDGWDLNKESDNTSVVLRKDDLYYLGIMDKKHNRIFKELPSQNGNESSYEKMIYKLLPGPNKMLPKVFFSKKGKKQFKPSKKLLKKYEDGTHLKGDNFNINDCHNLIDFFKESIAEHEDWKQFDFKFSSTSSYKDLSNFYKEVEKQGYKITFQNISENYINQLIDEGKLYLFQIYNKDFSKYSKGTPNLHTLYWKMLFDNDNLKNIVYKLNGKAEVFYRKSSLILGDNIVHKAGEAIINKNPDNEKKHSTFDYDLIKDKRFTLDKFQFHVPITLNFKSEGRQNLNEDVRKFLKNNPDINIIGIDRGERHLLYLTLINQKGKILFQKSLNEITNEYNNKNGKSQIKSTNYHSLLDKKEKKRDEARKNWGIIENIKELKEGYMSQIVHYISKLMIEKNAILSLEDLNFGFKRGRQKVEKQVYQKFEKMMIDKLNYLVFKDKKANETGGLLNALQLTNKFESFAKLYNQSGFIFYVPAWNTSKIDPITGFVNLLKPYYENLNKSQEFFKKFNNIKYNPKQEYFEFNFDYKNFTNKAEGSKNVWEICTTNNERFMWDKTLNSGKGAQKAVDVTQELKKLFDSSKINYLNGNDIKEDIINQNSADFFRKLMKLLSVVLSLRHNNGLKGKDEKDFILSPVEPFFNSLNAKMEEPKDADANGAYNIALKGLLILKQINESEDLRKIKFNLSNKEWLKFAQSKSF

SEQ ID NO: 184 - protein, 965 aa, unidentified
  REGION 1..965: note = Cas Enzyme sequence
MKQKKTQNPFNQFTGLYPLSKTLRFELRPYNEKTKNNIISAGILAEDNHRAESYKEVKKIIDEYHKAFIERVLKDLVLEEKPLQAFYECYKKSSKEEKREEALQEIGNNLRTQISNAFKKDPKYSSLAGKDLINKELPRIATTEEERTLLEEFHGFSTYFVGFHQNRENMYSKEEKATSIAYRLINENLPKFIDNIRSFQKIADSPIADKLESIYDEYAKEGYMNVNTLNEMFEISFYNRVLTQTQIDLYNAIIGGKTEKDGHKTQGINEYINLHNQRGEVQKKDRLPLLKPLFKQILSDREHISWFEEGFADDQAMLNAIKDFYLELTETGPTTTESILDRTKSLLRNIADYDLTKIYLEYSSLSKISQQIFGEWDRIKRALEAEYDATHLQRKKAKTYEEQKEKHFSSLKSVSIGFIDECLKAFETDKQLSLSIIEYIAQLGKKNDDPDLIDRITASYQAVKAILTTEWPKESNIAQEKDLVALIKDLLDRIKDLQSFIKPLLGSGKESDKDNLFYGELASIWEVINIVTPLYDKVRNRMTRKPYSTQKFKVNFRNSHFLSYWSQDYETKGGVLFEKEGLYYLAIIDKKLKAKDIEKLHCTKSNAFRIIIDTQKPDNKNTPRLFIRSKGENYAPAINEYNLPIHEIIDLYDRKLFKKPPKGASQEDTEIFKASLTKLIDYFKLGFSRHESYRHYKFNWKKSDEYKDIDEFYQDTIESCYQIIHQPINWDVVEEYTKEGKIYLFQIYNKDFSPHSKGTPNMHTLYWKTLFDERNLANVVYKLNGEAEIFFRKASLERKVTHPANETIKTKNPKTSIREKTFAYDLIKDKRYTEDKFQLHVPITMNFKSPMEEDINSRVNNYIKTAEDLHFIGIDRGERNLLYVCVIDSKGNIKKQYSLNEIVNQYNRTDYKYLLEKREEERDKERKSWQTIENIKDLKQGYLSQVVHSPQDSATYSSIPCYRCA

SEQ ID NO: 185 - protein, 965 aa, unidentified
  REGION 1..965: note = Cas Enzyme sequence
MKPLYKQILSDRESASFILEKFETDQEVLDAVKSFYEYLKENVLDNKNEISLVKLICDLNTYQLDQIYISNDKSLNDISSYLFGDWDMIKSAIEDAYDKEHAIEKKKKHPEKYLEMKEKALKKQTVYSIEYLNTVLEDYLEEKCSIETYFTDQIMERCSVIQDIYAECSCLYGEYPQEQKLCQDKKNTNQIKKLLDAIKNLQQLMKPLEKGSSESIKDELFYVEFIRNDDAVNQINSLYNKVRNYVTQKPYSLEKVKLNFAKSTLLAGWDRNKEKDNLGVILIREGNYYLGIMNRKSNQVIEKAPIAVTKQVYQKMEYKLLPNPSKMLPKVFFSKSRIEEFAPDQELIKHYKEGTHKKGEKFSLEDCHRLIDFFKKSIEKHEEWREFHFQFSDTENYKDISEFYREVERQGYKITFKDIDESYINELVDNGQLYLFWIYNKDFSPYSKGMPNLHTLYWKMLFSPENLQHPSYRLNGGAEVFYRKASIKKEDIISHEAGVNLENKYPLAPKKESQFKHDLIKDNRFTVDKFQFHVPITMNTMSQNENYLNHNVRKLIHNNKNMHVIGIDRGERNLLYISVIDMAGNIIEQKSLNTIIMKNREEEIYEKDYQKILLKREAKNDDARKNWKEIGGIKELKEGYLSQVIHVIAQMMIQYDAIVVLEDLSPGFKRSRQKVERQVYQKFEKMLIDKLNFLVDKNKNFNEVGGLLQAYQLTEKFKSFQKLGKQSGFLFYVPAWNTSKIDPTTGFANLLNARYVNKNKAQRFIKKFESISYSHKWNCFEFYFDYSNFTERAAGSQEKWCICSEGKRLEGYRNPEKNMSYDVRDCDLTKAFIDLFEEYHIEWEEGNLIEGLIKVDATEFYRNFMHLMSLTLKMRNSRPNTEEDWLISPVRNRSGKCFNTENVENEAQENKQYPCDPDANGAYNIARKGLWIVEQLQKTPEDKLDKVKLAMSNKEWLAYAQEHKI

SEQ ID NO: 186 - protein, 967 aa, unidentified
  REGION 1..967: note = Cas Enzyme sequence
LSDRETSSFVLDKFEDDNELLEIIEKFYKGFLNYKLDGKTQSIFVRFKDLFEDAKIAETSKIYLKNDSLTDLSKRLFGDWSIIKSALSEWYDKHKLEGKKKITKKDVNNKEKWLKGNYFSIQIIEQALEEYESDAVNREDDVGLLKYFSSFKTKNDDEKNIVQKIENRYSDIKDLLNTKYPKDKNLALEKDEVAKIKSFLDTLLEFFHFVKPLNLKEDAAIEKDEGFYGTYHPLFKQMSELIPLYNKVRNYLTRKPYSTEKIKLNFENSTLLAGWDLNKETDNTAVLLRKNNLYYLAIMDKNHNKIFKSIPKTKQDKSVYEKMVYKLLPGPNKMLPKVFLSKKGIQEFKPSEELLEKYKKGTHKKGDNFNLSDCHRLINFFKTSIAKHADWRRFGFKFSDTSSYEDLSEFYREVANQGYKITFQDVPASHIYQLVDEGKLYLFQIYNKDFSPKSKGRPNLHTLYWKMLFDPKNLKDVIYKLNGQAEVFYRKASLNPKNVTVHKANKPIENKNPKNEKKQSVFEYDIIKDKRFTVDKFQFHVPITLNFKSEGRQNLNIKARELIKKNSGINVIGIDRGERHLLYLTLIDSEGKILLQKSLNEIVNFYKDKDGKKQEKHTDYHSLLNKKEAIRDEARKNWGIIENIKELKAGYLSQVVHQITTLMLEYNAVVVMEDLNFGFKRGRQKVEKQVYQKFEKALIDKLNYLVFKEKNAEEKGGILNALQLTSQFKSFKKLGKQSGFIFYVPAYYTSKIDPITGFVDLLKPRYESVVKSQSFFEKFKAITYNPKNNWFEFSFDYNDFTDKASGKTKWVVCTTNHERYRWNKTLNGGKGGQKLVDVTFELKELFEKLGIEYKDGKDLKEKIKSQNSAEFFRKLMWLLSVVLSLRHNNGLKKEEEKDYILSPVKPFFNSLKANKNQPMDADANGAYNIAKKGLWLFNQIRKADDLWKVKLAMSNKEWFEFAQKNTI

SEQ ID NO: 187 - protein, 968 aa, unidentified
  REGION 1..968: note = Cas Enzyme sequence
DSEGAGKPVKLVKTNAKLPKKPKPGKAKATEPPSYTDAEGNALYPLTLSYRRLKRDRIANTDGSSVEAEYAPPLVVGTAPAFQEQGNKALLESSASLLPPVDNRGCWHFMFSFKIEQEMQKMLMNEAAKIPGEKSVCIVKKSGKWVGVNLRWPIDLKTETTLKRTDSLVVSSESDEIEEIDARFSVKKIWCSGDFKPFDILSVDLGVRYAGAWCRGSVKVGHDAGRLNERVISPIGHVQEIVFDAYDFGTFRLQGEDAKIWRKNKGRGFSEEPVLEKCGSRGRIASESECQEFAELASIVFPATERFPIPDDPAEIKYFPDLGDHLTYRLRRRLGRIRFLFKLRWQISGTKKKVGHEYLTPTGDELKTFRGEQRFNVIAALTFIPKESDSKESEDDFMRGLRLKLASEGLWSKLVYEHEGKVYPLFAKIKGGQTSEAKEKSKQKKEAQKAGLAKLKSDLQSDSVSAWDWTGLREAVEMEIENAMKLFAGEQSLIATVARFVWPLHDKKWKWHCCTITTEGKIAQSYLDRDESSNEPKRFIHGMRGLSMKRIRLMQEFRQCCQSLAKIERRFYTEYNHGLEPSPVLIGDTVHEPVLVFLNKINELREQRVNQTAHMILAEALGLELMNPAEVDIAGKTKSQLKSERDLHGQYKQKKPRVAAIVLEDLSRYRTSQDRSRYENSQLMEWSHRAVIAKLQDMAQVFDMQIITVDARFSSRFGSRTGVPGIRCAQVSKGFESVYPWKKWVEDKDERAKQIKTTSDILNKCDAPKFTLVLPIDGGSAFFPVTPHAPGKEGLEANADINAAVNIGLRAVAHPDRLDVFPVLRTEAKSDGTLEVKNRRGSLSELATKADKRTTSPVKPQMKEKAGKGEAIAHEDASGDEELESGKFPYLYAVVRNSLTINDENRYQLQCSLDGREVTADSRASVSAAKGKIYWSRVKQDCWKRIKQINVERLQKQGIEPPVEWLNI

SEQ ID NO: 188 - protein, 976 aa, unidentified
  REGION 1..976: note = Cas Enzyme sequence
KKPAAPTVWLSPNHRKELSDAIDMMLKSEKFQPMQKSLGKLKQNFLTRSTNYLPIVHRYFRLAARLKKLGADERKKLRTLANKFQSISASASLLPPGNDGCWHFMFSFKLETDEQKKLVDENAKIPGDREGSVRKVKKNGKWIGLNLRWPIDLKTENPQKKEEETTVLPDGEEIEETDAKFSVKKIWCSKDFEPFDILSVDLGVRYAGAWCRGRVKIGQDAERPNQRKISPDGQGQEIFFDAYDFGTFRLQGEDAKIWRKDKHKGFSDKPEPEKCGSRGRIASGAEKTEFAQLAGLVFPSTKRLPIPDDPAELKFFPDLGDHLTYRLRRRLGRIRFLFKLRWQISGTKKKVGHDYKDLTGDELKTFRSEQRFNVIASLAFTPKDDEPEEGEDDFMRELRLKLASDELWTELVFECEGEAHPLFSKIKGGGSKDEKVKAKKKKAAQKAAWAKLKGELESGSVNKWNWSALAKAAQSELMNTMTVFAGEQSLIAEVARFVWPLQDKKWKWTTCEAKKDGKQSVLERDKNSNEPKRFIHGMRGLNMKRIRLMQDFRQCCQSLAKLERRFYREDDFGLEPSPVRPGDRVHEPAPAFLDKINELREQRVNQTAHMILAEALGLELMNPAKVTMEGKSKWELKSERDLHGRYKHKNQRVAAIILEDLSRYRTSQDRSRYENSQLMEWSHRAIIGKLQDMAQVFGVQIITVDARFSSRFCSRTGVPGIRCAQVAKGFENDYPWKKWKEETAGKADADGKQKLTERANMILLAAKKLTLCENLKATLLLPMDGGPAFLPIVSHDPKKEGLQENADIGAAVNIGLRPIAHPDRLDVFPVLRTEAKADGRLEIKNRRGSLSEAATVNARDRTVQPVEIPAKNADEKTEDEVGADEELESGKFPYLYAAVRVGNSFSLPIDAKERYQLPLTSGGREVAVNDPDSTSAAKGKDFWWRVKRDCWTRIRQINSQRLKNLGIEPPKEWTNP

SEQ ID NO: 189 - protein, 977 aa, unidentified
  REGION 1..977: note = Cas Enzyme sequence
WLTPSAREVYDEELFEVLKKAKKVNNKDKQKVSGYVPDFVEVLYIKQALENIDAKLIWSDRYYSDGENEGIIDKGFSSWKQFLVILNHEYRQLLSFEDHVIIDKELDFDKEVKQLTDTVEIVSQDKNARTVTYRGGYDVYKAKLAELGQSFEKDTCTKKVIKNFADSVLSMYHFAMMFAVWDDTYPLDVFYTNNEFGYLLYYEDAYKNIVQEYNKLRNYLTKKPYSTEKWKLNFENPTLAAGFDKNKESDNSTVILRQGDKYFLGVMKKGFNKIFDNSQISQTGNSPEAYFEKMVYKYTKDVVTGIPKSSTQVKEVQEHFRNSDEDFFLEECSSVGNFIVPLKITKEIFDLNNKVYAKEDISQAMYRWALNTDEEKNYVKSFQKSYLSLGGSPELYCKSVTLWIGFCLNFLKSYPSAAYFDYSQLRQASDYESVDECYQELNNAGYTILFQNVSEKYVRVKNKNGELYLFQIKNKDWNEGSTGKKNLHTLYFESLFSKENAKQGFPFKLSGNAELFFRPGSIEQTYERRNFPREIPLKRRYSKDGIFFHIPVQVNRTKVGSPNQFNKEVNDFLAGNPNINIIGVDRGEKHLVYYSVISQNGEKIDGGSFNEINGQDYHDKLEKRAKEREQQRRDWETVEGIKDLKKGYISQVVKKLADLAIEHNAIIVMEDLNMRFKQIRGGIEKSVYQQLEKALIDKLSFLVNKGEVDPQKAGHLLKAYQLTAPIDAFKDMGKQTGIMFYTQAAYTSKIDPVTGWRPHLYLKYSSVEKAKDDISRFTKIAYKNDRFEFTYNITDFRTQKEWPLKTEWTVCSCVERFRWNKKLVNGKGDYEHYPNVTDDFKKLFDSVGINYLQENIKSQVVNLDENTNVEFFREFIKLFALVCQIRNTNSEEAGNLNDFILSPVEPFFDSRSAEDFGKGLPSNGDENGAYNIARKGMIILNTLSTFKNDHGSCEGLSWGDLYISDTQWDDFAQSFHG

SEQ ID NO: 190 - protein, 978 aa, unidentified
  REGION 1..978: note = Cas Enzyme sequence
DKGVKIQGINEYINLYNQQVDEKNKRLPLMKKLYKQILIEKESISFIPEKFESDNIVINAISDYYHNNVENLFDDFNKLFNEFSEYDDNGIFVTSGLAVTDISNAVFGSWNIISDSWNEEYKDSHPMKKTTNAEKYYEDMKKEYKKNLSFTIAELQRLGEAGCNDECKGDIKEYYKTTVAEKIENIKNAYEISKDLLASDYEKSNDKKLCKNDSAISLLKNLLDSIKDLEKTIKPLLGTGKEENKDDVFYGKFTNLYEMISEIDRLYDKVRNYVTQKPYSKDKIKLNFENPQHLGGWDKNKERDYRSVLLKKEDKYYLAIMDKSNNKAFIDFPDDGECYEKIEYKLLPGPNKMLPKVFFASSNIEYFAPSKKILEIRSRESFKKGDMFNLKDCHEFIDFFKESIKKHEDWSQFGFEFSPTEKYNDISEFYNEVKIQGYSLKYKNVSKKYIDELIECGQLYLFQIYNKDFSVYAKGNPNLHTMYFKMLFDERNLANVVYQLNGGAEMFYRKASIKDSEKIVHHANQPIKNKNADNVKKESVFEYDIIKDKRFTKRQFSIHIPITLNFKAKGQNFINNDVRMALKKADENYVIGIDRGERNLLYICVINSKGEIVEQKSLNEIIGDNGYRVDYHKLLDKKEAERDEARKSWGTIENIKELKEGYLSQIVHEISKLVIKYDAVIAIEDLNSGFKKGRFKVEKQVYQKFENMLCTKLNYLVDKNADANECGGLLKAYQLTNKEDGANRGRQNGIIFSVPAWLTSKIDPVTGFADLLRPKYKSVSESVEFISKIDNIRYNSKEDYFEFDIDYSKFPNSTASYKKKWTVCTYGERIINVRNKEKNNMWDNKTIVLTDEFKKLFADFGVDVSKNIKESVLAIDSKDFYYRFINLLANTLQLRNSEVGNVDVDYLISPVKGVDGSFYDSRLVKEKTLPENADANGAYNIARKALWAIDVLKQTKDEELKNANLSIKNAEWLEYVQK

SEQ ID NO: 191 - protein, 982 aa, unidentified
  REGION 1..982: note = Cas Enzyme sequence
NKDKKLPLLKPLYKQILSEENSASFIVPAFEKDNEVLQSIFDFWNKCIIDAKGPISGKKYNLLSKIQSLLQNLDKLKNNQLEEMYFENENLSTISNDVYGQWNLIRDALGNFYNSIDAKKNKKDYYSWKEIQDALVYYKQTNDEYKDIDQKAFLIYFKEMKVNDGEENTNNNIINLINERYKRIEPLLKEDRDNRKDLHQDKGKVAIIKEFLDSLKLLQNTIKLLYVDDSLDNMNYDFYNQLTDYYETLRPLNTLYNRVRNYMTRKPFSEEKFVLTFNSPTLLDGWDLNKEEANLGVILRKDNKYYLGIMNKGDNKIFKKYDEEPGDDYYEKMVYKLLPGPNRMLRKVFFSNKNIEYYKPNQDIQNLYNKGEFKKGESLNKESLHKLIDFYKNSISKNGDWSVFNFKFKKTTAYDDISQFYKDVENQGYKLFFKTIKTSYIDQLVNEGKLYLFQIYNKDFSENKKRKDESNPNLHTIYFKNLFSEDNLKNVVYKLNGKAEVFYRKKSIEYPEEIRRKGHHYNELKDKFDYPIIKDKRYSEDKFLFHVPITLNFLAKSDEKVNEMVKNYIAATNEKIHIIGIDRGERNLLYLSLIDSNGNIVKQQSLNIIELPKYQKQIDYHAKLNEKEKQRLAARQNWDVIENIKELKEGYLSQVIHQIARLMVDYKAILVMEDLNFGFKRGRFKVEKQVYQKFEKMLIDKLSYLVFKEKNLCEPGGSLRAYQLSAPFKSFKALGKQSGMIFYVPAQYTSKIDPTTGFYNFLNIDVSNLARSKETFSKFDKIVYNKKEDYFEFYCKMINFESANQLTKKSQNKANAELKEFQWILCSTHHDRFKVERKNNQINYCKINVNEELKKLLNSKGINYEKSNDLKSEILNIDESKFFKELGYLLKILVSLRYNNGKKGSEEQDFILSPVKNASGKFFCTLDNNNTLPLDADANGAYNIALKGLMIVQRVKAGGKLDLSISKDDWINFLIMNKKLPK

SEQ ID NO: 192 - protein, 983 aa, unidentified
  REGION 1..983: note = Cas Enzyme sequence
AEDDAVCVWHKDGDAAKAPDPQSLIDYALAAEAEFKKRHFKVPAYRHPDALLHPIFCDFGKSRWDICFDVHKNVQTPFPRALCLTLWTGSGMVSVPLCWQSKRLARDLAIGSNATNAGYVEVARADRLGRAASNVTKSDEVKISGLFEQADWNGRLQAPRQQLEAIAVVRDNLSLSAQERERRMSSMKDRIRWLVTFSAKLQPQGPWCEFAKTNQLRIDPQYWPHADSNKTRKGQARLILSRLPGLRVLSVDLGHRYAAACAVWEAVNAEQVKKACQVAGHEAPKASDLYLHLKRKATKRKKGNQVVVEETTIYRRIGADTLPDGTQHPAPWARLDRQFLIKLQGEEEGVREASNEEVLKVYHLEAELGRTAPIIDRLVKAGWGQSGKQRTRLEALRELGWKPASEAVVSDGMGADEGEVRKPSLSVDELMSSAVRTMRLALKRHGDRARIAHYLITDEKTRPGGVKEKLNENGRIDLLQDALLMWHDLFSSRGWRDDVARQLWDNHVAKLSGYKAPEEIGEESSGPERKKRQKENREKLHDVAKALAQDVTLREALHDAWKKRWKDDDERWKKQLRWFKDWVLPRGKHASDPAIRKVGGLSLPRLATLTEFRRKVQVGFFTRLQPDGTRAETKEQFGQSALDALEHLREQRVKQLASRIAEAALGIGRMRRPMGGKDPKRPNGRVDEPCHAIVIEDLTHYRPEETRTRRENRQLMTWSSSKVKKYLAEACQLHGLHLREVSASYTSRQDSRTGAPGIRCQDVPVKEFMRLPFWRKQIAQTEKKQAEGKGDARERFLCDLNAKWKGKSEADWEKAGVIRVPVRGGEIFVSASRDSQGAKSLQADLNAAANIGLRALTDPDWPGKWWYVPCDPASFRPIKDKVEGSAAVKPDQALRQSAQAQSGDAAKDKKKRGNKSAGKSKEVINLWRNISSSPLECIEFGEWKEYAAYQNEVQCRVIRILEEQIKGRDKQLHEGAKEDDISF

SEQ ID NO: 193 - protein, 984 aa, unidentified
  REGION 1..984: note = Cas Enzyme sequence
LLSSANLEYNQQHKDEKLPKLKALFKQILSDRNAISWLPEEFNSDQEVLNAIDDCYKRLSENVLGDKVLKSLLCSLDDYNLDGIFVRNDLQLTDISQKMFGNWSVIQNAIMQNIKNVAPARKRKESEEDYEKRISDIFKKADSFSIQYINDCLNEMDDNNLHAVDGYFATLGAVNTPAMQRENLFALIQNAYTDISNLLETPYPENKNLAQDKTNVAKVKALLDAIKSLQHFVKPLLGKGDESDKDERFYGELASLWTELDTVTPLYNMIRNYMTRKPYSEKKIKLNFENPQLLGGWDANKEKDYATIILRRNGMYYLAIMDKDSKKLLGKTMPSDGECYEKMVYKLLPGANKMLPKVFFAKSRINDFKPSKLIVENYNNGTHKKGKNFNINDCHNLIDYFKQSIDKHEDWSKFGFNFSDTSTYEDLSGFYREVEQQGYKLSFTNVSVSFIDKLVDEGKMYLFQIYNKDFSDFSKGTPNMHTLYWKALFDERNLADVVYKLNGQAEMFYRKKSINNTHPTHPANHPIQNKNKDNKKKESVFEYDLIKDRRYTVDKFLFHVPITMNFKSVGSENINQQVREYLQQADDTHIIGIDRGERHLLYLVVIDMQGNIKEQFTLNEIVNEYNGNTYRTNYHDLLDTREEERLTARQSWQTIENIKELKEGYLSQVIHKITQLMVKYHAVVVLEDLNKGFMRGRQKVEKQVYQKFEKMLIDKLNYLIDKKADAAQSGGLLNAYQLTSKFDSFQKLGKQSGFLFYIPAWNTSKIDPVTGFVNLLDTRYQNTEKAKAFFSRFDAIRYNANKDWFEFYLDYDKFCTKAEGTRTRWTLCTQGSRISTFRNAEKNSQWDNLEVDLTREMKSLFERYHINICGNLKEEICLQTDKAFFTGLLHMLKLTLQMRNSITGTETDYLISPVADENGTFYDSRSCGATLPKNADANGAYNIARKGLMFIGQIKETKDLANFKYDISNKAWLNFAQQKPYKNE

SEQ ID NO: 194 - protein, 986 aa, unidentified
  REGION 1..986: note = Cas Enzyme sequence
VQETEQSSFVEIVDDSKVFDVLNNFIDENEKQLPQARKIFENFVNDQLADLKDENKNFDISQIYISGGAINTISNKWFADWNTIRSLFIEKEKKKLPDFVSLQEIKEKLRGIENTKEKSDFFRAEYGDFFEKEDDYYKIFLLIWQKEFFAIFDKYKKSLNNVEKMIKDDRKYTNKKGFRKNNNEKFILDDNGEKKKFEIQKDIIREYAESALSIYQMMKYFALESGEKRNWNADKLEEDSAFYNPFIEYYENSHTWQYFNVFRNYLTQKPYKRDKIKLNFENGTLLDGWPDSPEGNTQYKSFIFKNKNKYFLGITDYSRILDREKFPKIYNLYDKSYEKMIYKQLDGKTIYGSLYSGEFGTKYSDDKEVVSNNELMSRVCVILEKRVFIFPQLQGIIDKIKSNQYDDPKKIATDISKLNLYSIVFVNVSADYIEQGEYKIGNDLKHLYLFEIHNKDFAEKTSGSKNLHTMYWEEIFSDENLKNPIIKLNGQAEIFFRKASLKKEIDEKRKAPHAVTKNKRYTEDRIFFHCPLTLNFTKDELKKDKEKYKGKADSFSIKVREYLANNKDINIIGIDRGEKHLAYYSVINQDGEIIDTGSFNEINGKDYHKILDDMEKDRGEARLTWQAIGKIKEMKKGYVSQVVKKICDLMVEHNAIVVFEDLNVGFKRGRFAIEKQVYQNLELALAKKLNYLVFKDKKRGESGHYTKALQLTPEIANFKDIYKQCGFMFYIPASYTSAMCPICGFRKNIPTPTENKEKNKEYLEKFDIVHEEKNNRFRFSYILKNVIDEKNKKEQSDGFKLFEDVIEKNNLVFYSNVDRLQFQRNKDNRGGEMKWKNPHQELKDIFEKNNIDINDNINKQIQEGNFDDKSLYAPIIYNIRLILQLRNAITKKDSNGKIIESHDFISCPACGFHSEKNVSELQKRYIGKKSFEFNGDANGAYNIARKGGLVLKKISKFSEKFRDLSLMQNQDLTITQNEWDKYSMKN

SEQ ID NO: 195 - protein, 990 aa, unidentified
  REGION 1..990: note = Cas Enzyme sequence
MIGGYTCSDKTKIQGLNECINLYNQQVAKNEKSKRLPLMKPLYKQILSEKDSVSFIPEKFNSDNEVLLAIDDYYTGHIGYIDLLTELLQSLNTYNANGIFVKSGVAITDISNGAFNSWNVLRSAWNEKYEALHPVTSKTKIDKYIEKQDKIYKAIKSFSLFELQSLGNENGNEITDWYISSINECNSKIKEAYLQAQELLNSDYEKSYNKRLYKNEKATELVKNLLDAIKEFQKLIKPLNGTGKEENKDELFYGKFTSYYDSIADIDRLYDKVRNYITQKPYSKDKIKLNFDNPQLLGGWDKNKESDYRTVLLHKDGLYYLAVMDKSHSKAFVDAPEITSDDKDYYEKMEYKLLPGPNKMLPKVFFASKNIDTFQPSNRILDIRKRESFKKGATFNKSECHEFIDYFKDSIKKHDDWSQFRFEFSPTESYNDISEFYREISDQGYSVRFNKISKNYIDGLVNNGYIYLFQIYNKDFSKYSKGTPNLHTLYFKMLFDERNLSNVVYKLNGEAEMFYREASIGDKEKITHYANQPIKNKNPDNEKKESVFEYDIVKDKRFTKRQFSLHLPITINFKAHGQEFLNYDVRKAVKYKDDNYVIGIDRGERNLIYISVINSNGEIVEQMSLNEIISDNGHKVDYQKLLDTKEKERDKARKNWTSVENIKELKEGYISQVVHKICELVIKYDAVIAMEDLNFGFKRGRFPVEKQVYQKFENMLISKLNLLIDKKAEPTEDGGLLRAYQLTNKFDGVNKAKQNGIIFYVPAWDTSKIDPATGFVNLLKPKCNTSVPEAKKLFETINDIKYNANTDMFEFYIDYSKFPRCNSDFKKSWTVCTNSSRILTFRNKEKNNKWDNKQIVLTDEFKSLFNEFGIDYKGNLKDSILSISNADFYRRLIKLLSLTLQMRNSITGSTLPEDDYLISPVANKSGEFYDSRNYKGTNAALPCDADANGAYNIARKALWAINVLKDTPDDMLNKAKLSITNAEWLEYTQK

SEQ ID NO: 196 - protein, 990 aa, unidentified
  REGION 1..990: note = Cas Enzyme sequence
MPKQTEHVTRAIRTSLVVPKSKRKKLQALARCVEKAMQAWEYQLLCMRQDDVYLTEKKNKTPSIIPGDVWQRRLSKLTGITDPGTLAKVKVFYRRLVESYDKANAGSSQQAAGKLRPMISAGSQGGQLRMQVAKDFAWLAEAPINADTLERIERQAEEDPKCLCTAGTAPVWRKTYLQEDTDGVPIEKAKWPALMKKNVRDKKEELESDEGIALELSGSDVFPLFAPTMPESSRWETTVFSEVISHLLGWETQRHKMAARRVELRKAKDKLLGKPADSEAVRMIQAFEKSRKYQLKEREIKCWPDLRKWTKKNKNATTEEREKQVKDMQRRSKNFGSFETLHWLSDIPQQHLSACKGPDPVSWLAKLNHITKKLEEAEERPLPRFTYSSAKRGVGFDSTSSTNRPGYALIQKDGGPKYAKIQLYPKGYLTFKLAGTPQLGTIQTKGKNQLSYVKSQDKQSWHLDVLGGAHLHIDNGHAELIIATARAIDADVLALRKEAVGYLRCGPEKRALRSTPSLASPGLRVVAIDFGVRTSATVSVLFKDEDGNPAHERSLKLRLPGENRLSQAERLLRKRAGRDLYRTRQAIFKMQRIARYANLEDPEARKRHYDKVTSYTPGLPEPTNAPHPEWIKTVKPVFEVAESEARELVRWLRRQKYHNPDKPYLKMGGLSVWRIDYLKKLRNVYVSWADHARPGKPTYGKTREERGSVAKSLRDLTTNLSETRAKTLADLVVQTARGYAYRDGKWVKAYPECDIIIADGLKTYKTSKTKSPKENKQTTSMGHRKIAEYIGKQATEAAIACTDVRTEYSSRFHPWTGSPGVRCHRVTAQDVKLLQEDEARWLSWQLCFAGITKKEGLELKAGDLVPVDGGKFLVAIDENDQLITVDADITAAQNNGVRFLVGHSDYQNRWDQSEARGRRPGVKKDIMGVLRATQWGRNGGDCSQMNEFEDLGPEPSTAEVKQESKKRRRSRGARKVEGNCSETEEKNRVG

SEQ ID NO: 197 - protein, 999 aa, unidentified
  REGION 1..999: note = Cas Enzyme sequence
KDAKKSDYPLLKKLYNQILAEKKIESDKVFDIESNEEVPVRMHEFYEEVERVSTIAKELVTILAQGGFENEYGGIYLHNRAINTIARKWFVSAYEFENCLPQKGKKKEGSVRVAPFVSFAEIKDALGEKLAEDLLKEKLFEEKAYRLVKRTLAYSQFLALFAKDLEILLNEYNEKKNNFSKKDLRIFERGENDENVDALKDALDAGLHIVQFMKYFVLSSKKADDKPTHTSAEFYNHYDELYGDPDQKHDIVRYYDAFRNFLTKKPADQKKIKLNFENGALLTGFDKDKESEKLGIILRKNSIYYLGIINKEHNKIFDDKKHQDAFDVVDATSYEKMEYKLFPDPKRMVPKIAFAKKNRERFGWTQEIQDIKDEYARFQDDRGDRSNWSKQFDKIKLTKLIAYYQHALDRGGYKNTFDFQWNNPVDYSGIGEFNDHLTSQNYKIGFRQVRQRYIDDKVAQGELYLFKIHNKDFGEKSKGTQNTHTLYFLNLFSQHNLTHIKLRLAGNAEVFYRKSSTQRKEEQRKFIRPIVKNKRFTEDKYFFHIPIKIGASVNSISETKFNRTLNEKLRQSACLIIGIDRGEKHLAYYSVINQKGEIVDQASLNKINDVDYCEKLRTREKERLEQRKSWKAISQIKDLKRGYISQVIHKLSELVIKHNAIIVFEDLNMRFKEVRGGIERSAYQQLEKALIEKFGYLVFKDKDPLEAGGVLNGYQLSAPFESFEKMGKQNGVIFYTNPEYTSTTDPVTGWRQHIYIKSDATDNEALKVFTEKIGIGWSDDKQSYTFSYDQKDFWGDSPARKWVLYANAPRLERYRNDAGYWTTRETNSNDLLRELFEVWDFDQPEGDISEQIAMMYEEGKLKGEKIISEKSQRFFKALRYALNLTQQIRNSDSIRYVYERDAQGDIVEDSQGKMAVKEIGENVDFIASPVVPFFTTPNPYTKENLCGLVIENGDANGAYNIARKGIMMLERIKQTQANPDLYISKSDWDEWLMKDIKQK

SEQ ID NO: 198 - protein, 999 aa, unidentified
  REGION 1..999: note = Cas Enzyme sequence
MENIYKNFEQQYPVNKTLRFELKPVGETSEYIRNNNLLNEDKDRAGDFERVKGILDRYYKNYISKNLKNLKLQDLKAYAKEYLSVYRDKKKLDSLAKHLRNDVATCLSKSSEYSILFKEKVITSELEKMIQKENTDKSQKDADLEAIKKFQGFTTYFSGFFKNRENMFSAEPKATAISNRLITENLPRFLDNVQIYTSVKDIIDFEEIVQEVINDSGTKAMDFFSASTYTNFVCNEDIEKYNAVIGGKENIQGINEKINLYNQQHEKRQHIPRMFPLYKQILADREGVSDRFVSFTSDTELLKAVNTELKRIAGIVEKDLSPLFSRITDYDLDRIYIQNGSGLTKICQSQYGSWKIVSDCISKEYDELFPKKAKKKNDAYFDSVKKYKKREKSISVGRIDGLIKKYTTESSGIEQYFIDQVESTEGAVHQFLEVYNQNIECLKNYQGKGHGLQADKGMTGVIKTVMDSVASIEQMMRPLHIKDIALQKDQAFYTEFESIYASVEPAISLYNKVRNYLTKKPYSTEKIKLNFGNPQFLGGWSQSKERDYLSVLLRKDGLYYLGVMDKSSNTLFRGELPEDNTDNYEKMDYKLLPDPKKMLPKVFFAKSRIDDFHPSQDILEIKTKEKYKKSLSDMYKLVDFYKKALNEHEDWKNFHFNFSDTKQYKTINDFYAEVEQQGYMLSFRKVSCEFINDAVKSGKLYLFQIYNKDFSPYAKGNPNLHTLYWKAVFDEKNLKHVVYKLNGGAEIFFRKASIDPENRVVHPKNQPIKKKNALAESQDKVSLFPYDLVKDKRYTIDKMLFYVPITMNFGVSQKKINEQVIDTIRKKSDIYVIGIDRGERNLLYLSLIDFQGRIIKQQSLNVIHNDKGYNQDYHQLLERREKEMMDARRSWSIIESIKELKEGYLSQAIHIITEWMMSYPSIVVLEDLNSGFKNSRKKVDKQVYQKFEKMLIDKLNYLIDKNLPADVDGGIYHAYQLTDQFKSFQSMKKQSGFLFYIPA

SEQ ID NO: 199 - protein, 999 aa, unidentified
  REGION 1..999: note = Cas Enzyme sequence
MKDLNQFIGKYKVEKTLRFELAPIGKTEAWMESKGVIANDKRRADNYTIVKSLIDRYHKVCIRESLTGCNLNWTRLSEAVETYRRCQDTESRKALLKCQDEYRTEIAKRFLSFEDFAELTAPSPSALIKDTLPHHVTNKVHPEFSDIDDVDNAKQALSLFEGFAMYFESYQKNRSNLYTAKNIASSVAHRIVNDNFSKFLANIKVFENLRVIYPEIIEQCSNELRQLLKGKQLEEVFRVESFNNVLTQEGIDFYNTIIGGVSVQEGEKKFQGINELVNITLHKENQGRGKRTALTMVPLFKQILSDRNTYSYIPERINDEEELISVLRAFHAHLASFYLNGKEVNVMEELLKIVENINHFDPNGIFVDAKKLNGISKKLYDDLFELRAKMTSHLEEQKQTKKSIEKFFQKEAFSITELCLDKKHSLAKYFTGLKGVLKAIDQKWEQFETRNNKDGQKKYKDSHTGIELVRILLDGYKEFFAVCSVLDVDGENDLDNNFYGIFTPLLAELRGIIPLYNQVRNFLSQKPSDEKKYLLKFDNSKCSDGWDAPQTKSVRIFRRQGKFLLGVTDSENRSCLNDLSSYTPISPDDQIDFLDYSQGGHMGQNLLTLVVRDGKTVMVKGRKENGKNPGLERQLKELLPPDIYRIRKSQSYKNESPNFSKEDLLLFVDYYKQRAKEYYSHFSFTFKDSCDYASFTELVEDIDEKAYQIKFVPTSYKNLLRLVNEGKLYLFDIRNKDYEPGAHGKKNLHTLYWEQLFSQENLDNLTIKLNAKSTLFCRPQVVANPMTHKKGSMLLNRKDKNGQPIPESIYQQLYKYVNGKMTESKLSDEAKGYLDKIVAKEVQYVITKDKRYTKQKYFIHFSATLNANAPKTADINKDVLDYIKDNPDVNIIGIDRGERNLLYVTLINQKGEILYPKSLNVINDFDYHAKLKQRENERDEARKSWQTVGNITDLKEGYLSAAIHEITTMMIENNAIIVLEDLNRKGFMPKRFKFEKQVY

SEQ ID NO: 200 - protein, 1001 aa, unidentified
  REGION 1..1001: note = Cas Enzyme sequence
ILGEHEKKLLFEQIKDEVDAQERLAKVVNESYEHFNLLRYLFKKLADDSLAIEDESGIYFSNRAINTLSRRFLNDAFSFEQALPQRVGKKDPEGTKVAYFVSLADVREALEKQEAEFVFKDESSESTITKEDRLFHLLSLISHEFQQLFTDRSRGDEVVIGFNEAHAQINKLLSGKNKDVRDQENRKIIKTFFDAGMPIFQIGKYFSLAINNKRGAEKPTKINAEFYNAYDEYTKEDFNFAKQFDLFRNYISKKPGDDEGKVKLNFEKPNLLKGFSIQKEGKVPYCGYILRKLGTYYLGIAEDDYFLSVEKYPEELEPKDGDDTYEMLEPYQLNWGKNIAGGRVYESYTKEKLGESVTYQTHKATLGKKEHVDFVKALIHDRYLDRRPFLKEYLEREFENIDEMREAFDDQDVAGMEFVPVKADRIDKQQFTQKKKTKNLYLFTISNKDLRQGRRKPKNIHSQYWLAMFSDENMKRLAIKLSGGAEVFLRRSKAQELKERKVKKRTKWQHTVLEHRRYADDKTFLHIPIVLNYGEYSISSKQLPWYIKQFNEETRKFLAEHPETCIIGIDRGEKHLLYYSVINQKKEILEQGSMNELEVAGKKVNFHKKLTELEKERIRNRQSWELVRAIKDLKKGYVSHAIHKITQLIDKHKAIVVLEDLNMRFKQVRGGVERSVYQQFEKALIDKLGYLVFKNREPDVSGGVRHGYQLAAPFESFERLGKQTGIIFYTQADYTSITDPISGFRKNVYISNSESVNKLSNEIFGVDNPKIRIGWDEERKSYTFTYNQADFVKDKKSAIQPKEWTLYADVHRIKRSKENGYWQYIRVNPNEMLENLFKKWDIQNPHKGTWDKIVESENLLGHKEFDGKKRNFWQALIFIFNLILQIRNSSSVRYIRDDKGELVSDGEDVDFIASPVEPFFRTLFTWEGIKFEGNLDALKDRIVGEGVQDILASYNGDANGAYNIARKGNMILERIRANPEIEEKDLFIRKEEWDKYSQKSL

SEQ ID NO: 201 - protein, 1002 aa, unidentified
  REGION 1..1002: note = Cas Enzyme sequence
AARRENPNKQFDSVEEILERARTAGEKYFQPNKTADMDTLSEFIRYLKERKDYSGFYWSKNALNTISNKYFANWHALKDRLKETGVFKKGGKDDEEYVKIPDAIELQPFFELLDVTKDWRKTLFKLSQRNGSEEIEKMRIIDNAKTPHEALLGMLTLDVADRAEKFVNGAAGVMRVTREYFANADKMKEERRRVWKEEIKQWMDHALAVNRMLKYFKVRESKVKGAPIDATLTKALGILLYGKDGDAEWFKWYDTLRNFLTKKPQDDAKENKLKLNFENGSLLGGWSDGQEKNKAAVLLRKDGLYYLGILKKKSLFDTKQENNPMYEHFTQGCERLILTNLKFQTLAGKGFSRKFRIAYGAMGKQDPQKAIISLQDIMKERYLNKYPLLSPIASASYTDKKKFDKEVQEALKESYDCKFRKINWNEIEQYTKSGDMYLFQIHSKDFAPGASGKKDLQTIYWQSLFDSNGSHQLNGGGEIFYRKQALRDKHVKKGYEQKPWIIESRRFTLESGKFMFHCPIKLNYKSSAQSDPKYAFPFVNKYINEHFAGNADICFLGIDRGEKHLAYYSLVDSRGTIVDQGTLNIPFTDSKGNPRTVRAIKRTLDKNGHEWVEEVECSNYNDLLAARAGDRDYARKNWQTIGTIKELKEGYISQVIHKIVRLAALDSDKPMFIVLEDLSIGFMRGRQKIEKSVYKQFEVALAKKLSFLVDKSKDGKYGEVGSVTAALQLTPPIKNFDELKERGKQAGVMLFVRPDYTSQTDPVTGWRKRIYIDSGSELTIRKKVTESFEDIAFDGKDYVFVYKDVVTGKCWSMYSGKDGESLKRFHRVRSVDKDEWKSEPQNLAEMLDCLFKDFDKDRSLLSQIVDEGMQPKKVNEHSAWESFRFVIKLIQQIRNTDGGDGGRESDFLLSPVREHGNHFDSRPYWDEEQRTGHPALLPSCGDANGAYNIARKGIILHEHMKRDFKLYVRDEEWDSWLAGKETWDNWLRNHEKDLRKTPRKGG

SEQ ID NO: 202 - protein, 1003 aa, unidentified
  REGION 1..1003: note = Cas Enzyme sequence
LKRDKLVLPDGSSMESYYDTPLAEGLNKKPAAPTVWLSPNHRKELSDAIDMMLKSEKFQPMQKSLGKLKQNFLTRSTNYLPIVHRYFRLAARLKKLGADERKKLRTLANKFQSISASASLLPPGNDGCWHFMFSFKLETDEQKKLVDENAKIPGDREGSVRKVKKNGKWIGLNLRWPIDLKTENPQKKEEETTVLPDGEEIEETDAKFSVKKIWCSKDFEPFDILSVDLGVRYAGAWCRGRVKIGQDAERPNQRKISPDGQGQEIFFDAYDFGTFRLQGEDAKIWRKDKHKGFSDKPEPEKCGSRGRIASGAEKTEFAQLAGLVFPSTKRLPIPDDPAELKFFPDLGDHLTYRLRRRLGRIRFLFKLRWQISGTKKKVGHDYKDLTGDELKTFRSEQRFNVIASLAFTPKDDEPEEGEDDFMRELRLKLASDELWTELVFECEGEAHPLFSKIKGGGSKDEKVKAKKKKAAQKAAWAKLKGELESGSVNKWNWSALAKAAQSELMNTMTVFAGEQSLIAEVARFVWPLQDKKWKWTTCEAKKDGKQSVLERDKNSNEPKRFIHGMRGLNMKRIRLMQDFRQCCQSLAKLERRFYREDDFGLEPSPVRPGDRVHEPAPAFLDKINELREQRVNQTAHMILAEALGLELMNPAKVTMEGKSKWELKSERDLHGRYKHKNQRVAAIILEDLSRYRTSQDRSRYENSQLMEWSHRAIIGKLQDMAQVFGVQIITVDARFSSRFCSRTGVPGIRCAQVAKGFENDYPWKKWKEETAGKADADGKQKLTERANMILLAAKKLTLCENLKATLLLPMDGGPAFLPIVSHDPKKEGLQENADIGAAVNIGLRPIAHPDRLDVFPVLRTEAKADGRLEIKNRRGSLSEAATVNARDRTVQPVEIPAKNADEKTEDEVGADEELESGKFPYLYAAVRVGNSFSLPIDAKERYQLPLTSGGREVAVNDPDSTSAAKGKDFWWRVKRDCWTRIRQINSQRLKNLGIEPPKEWTNP

SEQ ID NO: 203 - protein, 1003 aa, unidentified
  REGION 1..1003: note = Cas Enzyme sequence
DINYYNDVLTQKGIECYNIIISGKTKDEGTKIKEINEYINEYNQTHTNKIPKLRELYKQILSDIDTASFKFDVIEDDIQLLDSINLYYQQIFPIISKVNELFSKINNYNLDLIYINNDGTLSNVSNEIYSDWSYIRNHISEKYDTEYTGRLKVGTEQYSKQKQEYLRKQRNYSLRFLINCMKDDKIIEYLSNNMQQTEIVEKIKMDFDNFKSIQIQEDYKCLIKSENSIAKIKKLLDDTKLLQVFMKTLIPKDKTIEKDNEFYSELISYYDVFRDIIPLYNKTRNYLTQKPYSNEKIKINFACPTLLNGWDLNKEEANLGVILLKDEKYYLGIMNPYCKKIFNVDNRDSDTNNNYKKMEYKLLPGPNKMLPKVFFSKSRINEFAPSDELLEKYNKGYHKKGKDFDINFCHELIDFYKKSLNKHEDWRNFNFKFKNTVEYNDISEFYREVEEQGYKIEYKEYSEKYINELVERGELYLFQIYNKDFSEYSKGKQNLHTMYWKAVFDPENIKDTIYKLNGNAEIFYRKKSIDEKITHPANIPVANKNENTIKAGKITSLFKYNLIKDKRYTVDKFQFHVPITMNFKSEKILNINQIVNKYLKYNDDIHVIGIDRGERNLLYVCVIDKDEKIVYQKSLNEIYNEYQGIQYSTNYHRLLNEKENKREQAREDWKNIENIKELKEGYMSQIIHILCELMRKYNAIIVIEDLNKGFKNSRIKVEKQIYQKFEQMFINKLNYVVFKDVPKLEEGGILNAYQLTNKFESFTKLGKQSGILYYIPAWCTSKIDPTTGFINRFYIKYENLEKSKEFVNRMDNIRYNLDEELFEFDIDYSKFSDRLNDTKNKWTLCSYGERVYTHKNNKEIWVDDKIQLTDEFIKLFEKYKIDLNNIKNEIIEKADIEFFKGGENSLGFLQLFKLMVQMRNSITGQEEDNLISPVRNNEGIFFDTKAKIKGLPEDADANGAYNIARKGLMLIEQMKRTDDDKLNKIKYDITEKEWLNYIQNRGV

SEQ ID NO: 204 - protein, 1003 aa, unidentified
  REGION 1..1003: note = Cas Enzyme sequence
MWKEFDIAAFKEALKTLNQIRLKTKERKEEQARLQKVVNYMLGQGHDLKGTPYGEDGDLDSPGILAGDPRLSRLEDILNNDLAVFNEFTEGEGVAYSLRRRTLRGLDQLCPQWERVLKAGNPTSPEALEAQLVEVLNEFQSAHPDSVGSATFMRALCRPENWIIWREAIPADAPEDASEHFLSDYLRLQEHKADIERLKEPVRFTPADPVNSRRQYLFSDIPGSQGIKFLPGGQQVEVSIIVAETGGTLAVRRLALAFSAPRLLRDDLDPVVCAAGGGPWAPPMVIALGVGEEGQPSMQKSPALALMPDMDRQGHRRFLLNLPVSIEVDALNRALGHSERWAKAFNGAGNTVRIHLHWPDTQDSTVAGPRWWETTEPFRVLGVDLGQRHAAAAAVIQVEPEGKGPWFLGQAGGHEWCGRLESTRLLKLPGEDAQVIREGVFVEEWYGSSGRNPVGPETGEAMDMIRRLGMDPDLWSMERLSFPEQNDKLLVALRRAQKRLAECHRWAWMLGEEDRRAKGLEELRSQEVWPDWAVLAGEGSVEPLRTAITEEAERLRNLIPRELTRLADRILPLRQRRWAWIVHPSGSGTFQLVKGERRAGEPSPHIRGQRGLSMARLEQLEELRKRCQALNRVLQRQVGQEPIRLSEMRNRPVPDPCPDLLDKLDEIRIQRVNQTAHLIVVEALGLKLRAPSAPPKERLSEDRHGEYERTRSPVDFVVLEDLSRYLTSQGRAPRENSRLMKWSHRAILDKVKQLLEPFGIPVLETPAAYSSLFCSRSGVAGFRAVEVGLKDLKRFPRWTRHLAPDKEGIKPSEETLLVREVYGQLQQAEATRQDTESRVPRTLLLPIPGGPIFVPADAATRDKAHTTQADLNAAINLALRAVASPQAWSIRNKVRAKWAKDAWVPVIGNKVEKARFRGSERFEPTRESDTRDRKRQVNLFVDVGQVAVFGVVKAPPGLPRLATGQGLWGSVKQAQTAAVRALNQRRLAKWEQDALPPVEEMPF

SEQ ID NO: 205 - protein, 1004 aa, unidentified
  REGION 1..1004: note = Cas Enzyme sequence
ECLSQKGIEAYNAVLGGINTPNGHIKGLKEYIYLYNKETKEKKFYLPSLTSLKKQILSDHDSLSWIDTKYKNSHEMLQDIRTFHETYRKNVAHPLQALMAHIHEYDLHRIYIANKENLAPISLRLYAQWNALRDTIFNEYSAKIQRKRKETFEKYEKRVNKAIDDCGSFSLAEVNRFLMPFDKNVADYFTKMGAVDNHKEQRENLFATIENKWTDLLSLMEQDEKYEKVLQLTEHHITKIKAYLDAVRDLHHFVLPLQGEGNENDREPVFYDTLGNCLEVLQEIKYLYNRVRAFLTRKPFSTKKLKLNFGSSTLLSGWNTDNEKANRCTMLRKDGRNYLVIFEKGQGELFQDESMTLSKDEPYYEKFDFNIFGDPVKSLPHTCFAACNADFYKPSAEILQIREKGSYKAGKNFNLPDLHKMIDFYKACVKKMPKWGEVQFNWKETTEYENLTEFMESFIVKGYFIDFLKVSERTVNKWVDEGRIYLFRLDKRDYSPFSKGKKSLHTMYLDMLFHPDNLEKMVYKLSGGCEMFFRKASIKPSGPTHPAGQPIANKSPEVAEKKPVSTFAYHLIKDKRYTEDMFMIHLPVAVNYHVPDSKGMKVTAQVRHLIRQGLFKHVIGIHRGERNLLYVTVTDMQGHIVEQKSLNVIEDSYAGVTHAKDYNELLHRKGEQRTQSRKDWQTIDKIRDIKQGYLSQAINVITNMILQYEALVVLESLDDCFKRGRQKIEKNIYARFEQQLVDKLNFLVKKDRDLNEPGGLLNALQLTDRVEPGYKAFQNGIIFYVPAAYTANACPVTGFVNLFNFKKGSIEETKAFFSKFDGIRFNKQTGEFDFTFDYVNFTDKAEGIQTEWTMSSHGCRSHWTDIAGRKICKMVELTEEFKNLFIGHGVDFTGNLKEAIATVNKRSFYEGLSDLFNLLLQMRNVVPGVCDYFVSPVKDREGKYFISTPEHEHLPSDTDAVTAYNIARKGLLMVDSIATTHESDKLSLGVTNQIWMNHIQNQDN

SEQ ID NO: 206 - protein, 1005 aa, unidentified
  REGION 1..1005: note = Cas Enzyme sequence
IEDVFTDIKNYSLFLCQKDITLYNALLGGKAEDGVKIKGLNEYINLYNQQNKARLPKFVMLYKQILSDRESLSWQQGQFSNDAELLAAIENFYQEFHSVVFEGNEDVVSLKSLLVSIRDYDLDGIYIKNDVDLTGVVKSCYGDWYLLTRAMEEKYDCMFPCKNSKTLEKHLEKREKYIRSFKSLSLLDIDIYLGERRKIENYFELLGAEDGQPSLFEILETRYTAVKDLLNTEPSGKLSQNDAAIEGIKDLLDSIKAIQHFIRPLAGTGTEGGRDGRFYSDYEGIWSVVDKITPLYNMVRNYLTRKPYSEEKFKLNFDNSTLLNGWDVNKERDNSGVILRKDGLYYLAIMDKKSNKVFDLKEFSGDGDCYEKMDYKLLPGPNKMLPKVFFSKSRIDEFAPSEDLLKHYEKGTHKKGPDFNIEHCHELIDFFKKSINIHNDWKNFGFEFSDTDSYSDLSGFYREVEQQGYKVSFRKVSTAYIDSLVETGKIYLFQIYNKDFSQFSKGTPNLHTMYWRALFSDENLNNIVYKLNGEAEVFYRKKSLEYSEEKMSKGFHYETLKDKFSYPIIKDRRYAFDKFQFHVPITMNFKSYGMDSIDQQVREFIKDGEVEHIIGIDRGERNLLYLSMIDMDGNIVAQNSLNEIMNGYKDPIDYHKILDAKEADRLKARRNWKTIESIKDIKEGYLSQVVHIISQMMVEYKAIVVLEDLNMGFMRGRQKVEKQVYQKFERMLIEKLNYLVDKQASEGEPGSVMKAYQLTSKFDSFQKLGKQSGFLFYVPAWNTSKIDPVTGFANFISTKYENVGKARNLFGKFADIRYNPDKQYFEFVIDSYSSFNSKLEGTRQDWTVCTYGDRIKTFRNAEKNNEWDNETVDVTAEMKKLFEKNCIDYSSNLLASILLQDRKEFFEELLHLLGLALQMRNSRTGTDEDYLISPVADKNGEFFDSRNYDYDDAILPRDADANGAYNIARKGLWAIHQIQKAEDLRKVSLAISNSDWLRFVQYGKW

SEQ ID NO: 207 - protein, 1007 aa, unidentified
  REGION 1..1007: note = Cas Enzyme sequence
  VARIANT 318..334: note = X can be any amino acid
ISWLPDEFESDNEMLESIEKCYQDLTIQVFCGENSLKSLLINIRDYDLDHIYLPNDSSISTISQKLYGGWSIVGNAITEDIKVSNPQKKKETDEEYEERISKIRKGIECYSVGYLNGVLRDKIKIDNFKPIEDYFLLMGATDDKSDQKPNLFVRIEDAYAKARAILTSPYPEKRNLSQDEESIEKIKNLLDTIKELQHFIKPLLGSGSESDRDNNFYGEFIPLWESLDQITALYNMVRNRMTQKPSTDEKIKLYFENNATFLKGWVDSKTEKSDNGTQYGGYLFRKKNGIGEYDYYLGVSKDIKLFRSFEEVKESDKXXXXXXXXXXXXXXXXXYERHNYYQLKSKTFYGTLYKGNYEIESANIKRAIDNVVYLIGSAATKEKVNNEKGKRQPKINTAIGYLKFLQQQDKDLFNILLKDKSFQECNKAIIASMKSTLLSLNRIPSAKDYAQKNYVLFSVMMDDIDTLLQEKIFTYFSVSKCELDNAVGRDLRPLYLFKITNKDLSFAETYENGLRKNRGTENLHTMYFKALMSGTQNVFDIGSGAIYFREHKISYTEEQLKRGHHYEMLKGKFSYPIISNKRYAFDKFQFHLSVNLNYNANKNVDINTLVNSYLKESNLTHIIGIDRGERNLLYLSLIDLHGNIVEQYSLNEIGDEYNRTNYHELLNKKENQRKEARPSWQTIESIKELKEGYMSQVIHKIVELMVKYNAIVVLEDLNMGFKRGRQKVEKQVYQKFEKMLIDKLNYLVNKKLAVTEPGGVLKAYQLANKFESFQKMGKQNGFLFYVPAWNTSKMDPTTGFVNLFDTGYENMDKAKVFFSKFKSIRYNAEKGWLEFAFDYNDFTTKALGTRTRWTLCTHGTRIETKRDPNQKNQFVSEEFDLTSRFVEFFSKYKIDLDGNLMEQISSQAEAAFYKELFHLLHLTLQMRNSKTGTDVDYLISPVMNSHGEFYDSRHCGKDLPNNADANGAYNIARKGLWIIEQIKQSEDFAHLKLAISNKEWLQYAQKE

SEQ ID NO: 208 - protein, 1007 aa, unidentified
  REGION 1..1007: note = Cas Enzyme sequence
DVYNYIIGKKVQEDGTEIKGINEYVNLYNQQQKDKSKRLPFLVPLYKQILCDREKLSWLSEEFDSDEKMLEAINGTYSHLHDILMGEDNDSLRSLLLHLKDYDLSQINIKNDLSLTNISQHLFGRYDVYLSGIREQLKIKTPRKKEESEEDYEDRITKKFKSQKSFSISYLNTLPYPEVETGKPQSVEEYFMSMGAINTDATQKENIFIQIVNAHEDARTVLQMRDIGDTLSQNKEAVSKIKTLLDSYKDLQHFIKPLLGSGEEIEKDENFYGCFQMIWEELETVTLLYNKVRNRLTRKPYSTEKVKLNFDNSQLLGGWDVNKERDCAGVLLLKDGYYYLGIMDKKSNRVFETDVMTSDTDFYDKIDYKLLPGANKMLPKVFFSKSRISEFAPSEAVVLSYKRGTHKKGKDFNLSDCHRLIDFFKESIQKHEDWRKFGFHFSDTQTYEDISGFYREVEEQGYMLSSHPVSSAYINKLVEEGKLYLFRIWNKDFSAYSKGTPNLHTLYWKMLFDKRNLSDVVYKLNGQAEVFYRKASIKSENRIVHKANQPIINKNALNKNPTSTFGYDIIKDRRYTVDKFQFHVPITINFKALGQGNINPIVQNTIRKGGFRHIIGIDRGERHLLYLSLIDLKGNIVKQMTLNEIVSEYKGQTFKTNYHELLTRREGDRTEARRSWDTIERIKDLKEGYLSQVVHVISKMMVEYKAIVVLEDLKPGFMRERQKIERQVYEKFEKMLIEKLNCYTDKQADATEPTGLLHPLQLTCEAKKWKRSHQCGCLFYIPAWNTSKIDPVTGFVNLFDTRYDTREKARLFFSKFQRIGFNSKKGWFEFVFDYNDFTTKAEGSRTLWTICTFGDRIRTFRNSQKNNQWDNERVSLTDEFKKIFEERDIDICGNLKEAICGQTDAKFFKDLLGLMKLLVQMRNSITNSEEDYLLSPVADENGHFYDSRERISNLPVDADANGAYNIARKGLWVIRQIQKSKENEKVSLAITNKEWLWFAQTKPYLKE

SEQ ID NO: 209 - protein, 1009 aa, unidentified
  REGION 1..1009: note = Cas Enzyme sequence
MDFTKFQKLNSIIKTCSFEMIPIGKTRETMEKHNVIEEDAERKSNAELTKEVSDSFIREFIADYKEDMDWKDLYDAYGEDRARFTDIMNQKAEKLAKRFSDSFNEYINTFLKANGIKDKKSKWSDSGYVDVVLPLYVSIHPDFSNDKYERAVASLLHCSNSLFKKYTTSYARIIAGTKKGSFADRSMENFQTACANSVMFDLISINLSNVGSHDAFKEVFADAPLNMNEYLSQKGISRYNEFVGDSFDESGQVIRYGVNHYINEWNQTHPDERMPKMHKLKKQILSIVEPSFRIRTINDETELFGTFDNIRTAEQRYAGMLESILENMNTADIYDKSGILVTSAERDSLANAITGEWSYFRRQIKEEEENRIREEYLQKKNRVKTKLTQKDNKQIEDALNKSIYSVADLNKMLGSDFGTIEEKLLDEYIRNKSKKESAYAQLVKTDFYDKKTIPAGDDVQRIQQYLDKVLGLTHIVRGLCADSQDPRTDFVFSDDVSSLEDDRVQIISCYNLIRNFVTKKREKTAKEKQIQLCFGRPAHFEQVWNNKQEGKFGNVDAALLEYAGKYYYMVPAAKNEAKLNFPVTDEPQRGECYNYLATKKAIGFAKAFAKFYIKSPEAMEGFEKTEEPFEISVGNDTMIISRKVYEDYEAKTFRESEEAKNKLIDCAKEFLSKNLSYCIYDWSGLKETKDYVNYGEFCNEVDSIAFRVINRYVSKKLVDDAVERGNLYMFEISSLDMYKDSSRMKNIMALRFNQIMNGMFTGDKSIIINNAPQIRYRPVVIEKKDVHPVGSRLVNKNTTDGRTIPGDVYLELCAYYNGKKDSLSPEASLYNEKVSVKDSDRAHIKDKHYTEEKFLITFSYTANKNVASATSGYQLNEMVRKEIRENGCNIMAVIRGIDNLLYYAVVDENGNRIEAGDLNVVGDTDFYEKLTILGKQRYTDQKNWKHENKVADLKDTYLGQVCRKIASISVKNNAVIVIDKINERTKRKNAAFDNNMYRKFENALVNSLT

SEQ ID NO: 210 - protein, 1016 aa, unidentified
  REGION 1..1016: note = Cas Enzyme sequence
ILGGETKENGEKLKGLNEYINKYRQDHKGDKPLFFKTLDKQILSEKESFIVDEIIEETLLENLQNFYESAERKTKLLKELFKDFIQNQEKYDLSQIYLSKESLNTIAHKWTNETVIFEESLYEVLKKEKIVSTSAKKKEGGYSFPDFIALSVIQEALTKISAANFWKERYYELAGFPEMPHWEQFLEMFYFEFSSLFERKVTNTEKREGSKVGYDFFKKDFKNLLQNLTPDHLSSEDKAVIKNFADCVLTIYQMAKYFAVVKKRAWNMDYELGIFYTDPENGYLLFYENAYEEIVQSYNKLRNYLTRKPYSEEKWKLNFENPTLADGWDKNKESDNSAVILRKDGKYFLGLMSRGNNKIFDDRNKEKFSQNIQQGNYEKVVYKFFPDQAKMFPKVCFSAKGLEFFQPSEEIWNIYKNAEFKKGDTFSVQSMQKMIDFYKVCLNEYEGWKGYDFKHLKSTKDYKENIGEFFRDTAEDGYKITFQNISESYVDKKNENGELYLFQIKNKDWNEGSNGAKNLHTIYFESLFSVDNISQNFPIKLNGQAEIFYRPKTEKEKLGTKKDKSGKEVVNHKRYNENKIFFHVPLTLNRTKPDMSSKQFNAKVNNFLANNPDVNVIGVDRGEKHLAYYSVISQKSEILDSGTLNEINGVDYSQKLEEKAKNREQARKDWQTVEGIKDLKKGYISQVVRKLADLAIEHNAIIVFEDLNMRFKQIRGGIEKSVYQQLEKALIDKLSFLVKKGEKNPEEVGHLLSAYQLSAPFTTFKDMGKQTGIVFYTQAAYTSKIDPITGWRPHLYLKYKSSKKDGPLATKEDILNFSKIEFVNGRFEFNYDIKKFQPNNKEYSEKTVWTVCSSVERFRWNRHLNNQKGGYEHYQDLTDNFKALFEENEIDFESGDILGKIEVLEPKGNEKFFKNFIFFFNLICQIRNTNDQAKNLDQQDFILSPVQPFFDSRIPEKFGDNLPENGDDNGAYNIARKGIVILNKISNHSQTDPKFKKYPELFVSNIEWDNFIKTES

SEQ ID NO: 211 - protein, 1016 aa, unidentified
  REGION 1..1016: note = Cas Enzyme sequence
SFIPEQFSQGTAGEKQLVDAIDSFVNCANGQDLLGKAKAVFAQMLTDKVNLDNVYVSGKHISELSQMLYGNWNKLGEALRSKTTKSKKELEKDISEWIEKKTYSVNEILTLEKNGKLVEEHNISLADFIKGAKVPMWYSDIKAWKDYAFLDECNISYCTEFKAIKEKVAIGESIRENDDAKEVIKSFLDKWLLCLHCLEIFRVDDCKKEKDPIYYDYDALFETDDDKNITFRDIVPLYNKVRSFLTRKIKDEKKISLRFDCATLAKGWDENKENANNATILIDEGKYYLLILNPTNKPILDEARTGNGGFKKIVYHQIGNVAADIPNLMVENGKTVIKRGRKDENGENKKLKEYKKKLLPDDIYRIGDSGSYKRSSSIFNEYDLHKYVAYYMQRVIEYKNGEIEFHFKSPEEYDSYDAFLEDVSQQNFSLSFVDFDGEVVRQWIDDNKVMLFQISNKDFNENAHGTANMHTLYWKEIFSKRNLDDIVFQLNGETVKLYYRKNALKNPYVHKESSVLVNKTYTDGTIVQQEDYMAFLKYYNSGGDLTDKQKKLLPNVCTKKAKMDIVKDKRFAEHKFLFHVPITINFKSPQAPTLSEFNSRTIEILRRCKDKINIIGIDRGERNLIYVSVIDKNGNVIRDENGVPLIRDYNIIESKLYEDFVRKYNYLEKLKQVESDRDKARKNWDVINGIKDLKSGYLAQVVHEISKLVVKYNAIIVLEDLNYGFKRGRFNVERQVYQNFEKALIQKLNYLVFKTDAPSPRYGNVHNGLQLTAPFTSFKDLGKQSGWLFYVPAEYTSKIDAETGFVNLFNMKEAAKDPKNFFEAFKSIEYKNGLFYFKFDYSNNKLPTVKSDYTNNWTLASYGNRIKITKESGSSKFVQKEVVLNDVFKSVFSDSKHQLSLDKISKENIIKHDKSDSLCKDLFNAFKLLLQMRNSMSNSSIDYLISPVESEHPFVTGENNQMCIKDADANGAYHIALKGLYLIEHDFPVEKGSLQRISTSQWLEFVQTKAYRKNNV

SEQ ID NO: 212 - protein, 1016 aa, unidentified
  REGION 1..1016: note = Cas Enzyme sequence
NGLFEEKLFNIISAKETKKWYELRKQKNDSKIKKEEGIYHFPAFVQLRHIKQALDEMSEENSGLKIWKHKYYKEKEDQSQYAVLETGENNNDFWEQFLRVFRAEFNNLFSTQLTHNIPKDKDFDKECEKLSEVEEKLSVDKDKREVKTKAGYEVFLDKIEKSFSEKSKISLKHKIIIKNFVSSVLDIYRMTKYFSLEKKGKWLEEYDTADFYDGQEFGYQKFYRNSYDEIILPFNLVRNYLTKKDYEEEKWKLNFENPTLAAGWDKNKEKGNSAIILRKGGNYYLGIMKKGHNNIFDEDKLKKAEVENAGSDYYEKMVYKYYPGVAKMIPKSSTQVKEVKDYFRQGGEETYRLETDKLIAPLDITKEIFNLNNIQYSKNDLSKEVENGGIKKFQKSYLKLGGKPETYKEALQKWIAFCKDFMAKYKSTKSFDLTEVKEDDEYQSLDQFYKDIDRVTYKLTFRNVPEQYIKQENKKGNLYLFQIKNKDWNKGSVGRKNLHTLYFEALFSKENAENNFIAKLNGQAELFFRPKSDKIEKEKIITKKNKEVLEKGEKAFHKNRFRQKKFLFHVPITLNRVAGEASSRQLNNKINDYLADSDAVKIIGIDRGEKHLAYYSVIDQNGVIVDLGTLNVIDGVDYHEKLEKAAKARLAARKDWQKIEDIKNLKKGYISQVVRKVSDLATKNNAIVVLEDLNMRFKQIRGGIEKSVYQQMEKALIDKLGFLVNKREDNASNAGHVLRAFQLSAPFTTFENMGKQTGIIFYTQAGYTSKTCPKCGFRPNIKFKYGSIEQSKDLLKNLDLFEYDKNKDRFIIKYSLSNFKNKQNNKKEKENVLYKNIKPKDTFEIYSNVIRHKWKNKRIKSEVLPKGVIIHGSTEKGTILRYDITKFLKSLFDNNNIDYSRNLQKQLVDNKLDSRFFKDLLYGLFLMINIRDSISSETGPESDKISCPSCLFDSTDGFQSKEFNGDANGAYNVARKGKIILDKIKQYKHDHGSVEKLSWGDLYVDNEEWDKFTQKK

SEQ ID NO: 213 - protein, 1022 aa, unidentified
  REGION 1..1022: note = Cas Enzyme sequence
MDEIFPLEGFNAVMRQDGINRYNLAIGGYTQETGEHMQGLNEFLNLAHQNDHSIGKRISMTTLFKQILSDRESFSYIPDAFTEILQVKSSIESFFNDIKKSKEGNMFERALVLISSYQNYDKKAIYVRQTDLNMLSMEIFDSWKTLGELLREFKAESLGDPYIEKTGKKIDKWLGSEEFTLSDIILAITRSGAEKTFEEYIVKLRKAKGQIDIAERNVDSISWELPCNDDSKQKIKAVLDSVQGFFHLYSIFHVSLDLPRDGAFYAEFDDIFDRVSAITPLYNKVRNFLTKNDLSMSKIKLNFKNPTLAMGWDINKEYDNTAIILLRDGKYYLGIMDPKKKKNIKFEEGSGTGQFYQKMMYKLLPGPNKMLPKVFFSAKNIGYYNPSEEITEGYKAEKHKKGDKFDKEFCHKLIDFFKESIQKNEDWRVFDFKFSPTESYNDISEFYKEVEKQGYKMYFVNTPVDVIDGYVERGDLFLFQIYNKDFAEGTKGNKDMHTIYWEAAFSEKNLRDTVVKLNGEAELFYRDKSNIKMYSHRKGEMLVNRTCKDKKTPVPDKIHKELCDYHNKRITPSELSKDAKLYLDKVHAFEAKYDIIKDRRYREDKMYFHVPLTLNFKASGKSNVNQMVVKKFLSDKGSHIIGIDRGERNLLYVSVIDRTGKIVFQDSLNVIDGFDYREKLHQREMERKEAKQSWNSIGKIKDLKEGYLSRVIQKIATMVIEYNAIVILEDLNFGFKRGRFKVEKQIYQKFESMLIDKLNYLVFKGIIDGDVGSVLNAYQLTVPLESFKKLGKQSGILFYVPAAFTSKIDPTTGFIDLFNTSSITNLSKEREFLEHFDSISFSIRDGGVFSFTFDYRNFSKSVTDYRNIWTLYTHGERIRYVRGKGNEKRDPTKAMKDALLSAGIKYDDGRNIKDSIVQSGNNPLINEVFFSFKDTLQMRNTDGEKDYIISPVKNRKGEFFVTDPANRKFPVDADANGAYHIALKGELLMRMIAEDFDPESDKFTMPKMEHKDWFEFMQTREV

SEQ ID NO: 214 - protein, 1024 aa, unidentified
  REGION 1..1024: note = Cas Enzyme sequence
MADGAEKDEQIRKEGARKAERIRTASYVRLRALGILPLFPIATRVSERGSRREWRGEGSRKSKPGRVRTFDYDMLQQALERLNSWESWNHRVKKRRAELAEKQTNLRKQCDLDSPCHQRLIQYERSRTVRLNETALESERGYTIRSRSLRGWTELHERWLKISKADRSEAALRKIVAEMQTRLRGKFGDASDLYPWLAKPENHLAWDERAEKNALPIHARYNEAVAELEAAKEEANYTPPDALLHPLWARSGHSGDQNIHSYHITETDGNLSVEMRLLFEDPEGRVTERDEKIPLRPSGQWNRAQRGDTPPLRLVRFEDVPKEFHTGAKNDAKCTWVAFTDPGTGGLVHGSLGGARLQLERSDFRLGAVPARGKTKREMEFAEGNIGRAYLNLTVSLPNPPKNSAHLALVRPKPKSDTALAVSVDYYLRGSGKEDKRKKPFFLTDVVCGAGKMTDGLRIMAVDLGLRQLAACAVFELTREAPKVKLAFAVADADGLWMVQNRKFLIHLSGEAEDGDAASRRDKIREERFDLRAAVRRLSRLLSIGRLDEPEEKAEELGGMVGSSDWENSERRKKVDGILDPKLLESLKPFAEKPNDPRWPEAVKAVHRQWEASLGKAIAEWRRRGRMRGKQATERGYGGLSLWHVEELQETRRLLNSWSCHSRDYETMKDGSRRPAIVRAKKRWGLAPGEEPVGADLDERLLHHINNLKEDRQNVGADKIVMAALGFEYEGKAKGWVQHHPPCQFILFEDLSRYRFKTDRPRRENSMLMKWAHREIPRTVAMQGEVHGLVVGTVAAEFSSKFRAGAQALTPGVRCHEVTARDLQPGWFRSVMETDIAQKRRKELPGVGQLVPIDGGEWFCTLNADGSLYKTHADLNAAQNLARRFWTRYRDLYRLSCRKADLKGQEVWVPKTIGKRVGAALKQLIKAEACKLIPIDGDPEEGCRMESATLREIGAKKTGDEAPDQEGLADEMEEVAELRGEGMTFFRDPSGIICPADLWFPAKVFWGRVRSRVGAVLAGDDLKY

SEQ ID NO: 215 - protein, 1025 aa, unidentified
  REGION 1..1025: note = Cas Enzyme sequence
WKGDGERERERPSLLAGDTRVAALEKLLGSEDFRRKYEMTAGETVEYGLRERTIRGFRDLREQWRKEAQDAVFSPKLQERLRDKLREFQKDNPRIVGSVELFEALLEKDLWTVWRDEPSDPHFAKDPLKALVAERELKEEISNLDRPVRFTPANPVHSRRQYYFPGFDEGTKRKELGHDTGQLSCRVELALKENGKWKRLLARMHYEAPRFLRDGLRSGDGEKLVEVSWLQPMMEALGMNPGTLQSFVRCPVALMPEERELPGNVRDRRILLNFPISLETLEIQQKLRHDDKRMLFSTRKKGKEIVAENYWERQCAGADKEWLYFRWPKVAKEPENSNWWWNRVSQFRCLSVDLGQRDAGAFAILDARPGKPVRPVFRHIGNDGKKDWHSTVEDVGMFRLPGEDVNIYREKSSRDTDDKTGRALREELHGERGRSATKEEWIEGCEMIERLGLKPSEILGDDCHRHSFPELNSRLLRAFAIAQGRLAKLQSWSWRVKDEEAREKARVEITESKDSLSELTNYAANSAWPQLIEETKKQCETLRTKLSTEAQLLANRVVPLRDRHWEWVKRKDNTGCHVLCETEPKKNVPKRKIRGQRGLSLERLEQLDELRRRLLALNRALLHTPGERSKHGKGTKGRELPDPCPDLLRKMDHLREQRVKQTAHLILARALGVTLRSPEKSPDIRAARDIHGEYTRIIRKDKSVCPPVDFIVLENLDRYTASQGRGRNENSRLMKWCHRELLLRLKQMATEVYGIPIIEVHAAYSSRFCSRSGIAGFRAVELTPDSEHEWQWRKHLERLAKHDSGEKKLKPPALREVKRVAALLETLKHINSSRRRDPTTNRWIDAPRTLLAPMAGGPIFIPMAGAAMQADINAAINIGLRAIASPDCHNILHRIRSIASEGQFQVRAESKREKARWPSKTLNVEFRQSKSAEELAKGRNPNFFVDAGGVAKFDRARISDEGVSFSSTLAWPLASGRGLWGTVNRFEWLRVNQLNNERLKKKWGEIKLLEASPKSLAWPNAITSK

SEQ ID NO: 216 - protein, 1029 aa, unidentified
  REGION 1..1029: note = Cas Enzyme sequence
RAIDSWDKVVERWSHSRCETKEDRIAEARQLQDDPSIDKFGDIQLFEALADDDAFCIWNLPEGPNPQPLKDFVAATEADDKKRRFKVPAYRHPDALRNPVFVDFGNSRWHIDYSAHRRPVKSSQLREHLAVHNATVCEIREKMLRATEGRKASLMKRLEDAVAQQRECEQAVTELDDHYRVIMKLWTGQAVATVPMHWSCKRLTADLAIRNRPAVSSDQPDGVSRADRLGRAANHVGPEDSVTILGLFEQADWNGRLQAPRDQLDRIARHVDKHGWDAKAARLVGRLKWLVSFSAKLTQQGPWTKYCQLFDEDCQSLPFISRKGDCAVKHDTNDSRHGQARLILSRLPALRVLAVDLGHRYAAACAVWEAITTTQLQSECQSAGVKPPDSLAMSIHLKRTTAQGKTTTTVFRRIGSDQLPNGDPHPAPWARLDRQFLIKLQGESRSARAASVEEMHRVEEFETWTGLQRDQTTPPRTRAVDHLMNQTVRNARLALARHGRRSRIAFQLLSNVRILPGGRRQALSDVGEFDLLLDTLLEWHALATDARWSDSPARQLWNSSIATLDGGFAVAAVSSIDRTLGERRHEEEVLRRQLAPLAAQLQTNRDLRHKLHASWSERWTSDDQQWRRYLRWLARWLLPRGGSRQDGGRRHVGGLSLGRISTLTEFRRKVQVAYFTRLKPDGKCAEIGRFFGQSTLDAIQRLKDQRVKQLASRIVEAALGIGCEKKSANGRDLPRQASVGAAPRFAPCHAIVIEDLSHYRPEETRTRRENRNTMDWKSAETRKRLSDHCQLYGLCLRDVAPHYTSRQDSRTGAPGLRCVDVPVADFLSQPWWRKQVLLAQKRAVANQGDARDRYLLSLEQRWAGASEVDCAKAGALRIPMNGGELFVSADAQSPLAKGIQADLNAAANIGLRALTDPDFPGKWWYVPCDATTKEPHPEKVKGSILAGIGPLAPCDPKAAESGQSMRRKRSSKEKSIVNLWRDPHAGPIEGAAGLEVWTVTPAYWNLVKVRVIENLSKSVNGEPGELSGR

SEQ ID NO: 217 - protein, 1030 aa, unidentified
  REGION 1..1030: note = Cas Enzyme sequence
LGGISGAAGQKKIQGLNETINLFMQQHPQEADKLKKKKIHHRFIPLYKQILSDHTSFSFIPEAFSNSQEALDGIETFKKSLKKNDTFGALERLIQNLASLDLEHVYLSNKKVNEISQALYGEWHCIQDVLKQDFSLESLIQINPQNSSNGFLASLTDEGKKRISQCRNVLGNPLPVKLANDQDKAQVKNQLDTLLDAAHYLEWFKADPDLETDPNFTVPFEKIWEELVPLLSLYSKVRNFVTKKPYSTAKFKLNFANPTLADGWDIHKESDNGALLFEKGGLYYLGIMNPKDKPNFKSYQGAKPYYQKMVYRFFPDCSKTIPKCSTQRKDVKKYFEDHPQAISYQIHDPKKEKFRQDFFEIPREIYELNNTTYGTGKSKYKKFQTQYYQKTQDKSGYQKALRKWIDFSKKFLQTYVSTSIFDFKGLRPSKDYQDLGEFYKDVNSRCYRVTFEKIWVQDIHKAVKNGQLYLFQLYNKDFSPKSHGLPNLHTLYWKAVFDPENLKDPIVKLNGQAELFYRPKSNMQIIQHKTGEEIVNKKLKDGTPVPDDIYREISAYVQGKCQGNLSPEAEKWLPSVTIKKAAHDITKDRRFTEDKFFFHVPITLNYQSSGKPTAFNSQVNDFLTEHPETNIIGIDRGERNLIYAVVITPDGKILEQKSFNVIHDFDYHESLSQREKQRVAARQAWTAIGRIKDLKEGYLSLVVHEIAQMMIKYQSVVVLENLNTGFKRVRGGISEKAVYQQFEKMLIEKLNFLVFKDRAINQEGGVLKAYQLTDSFTSFAKLGNQSGFLFYIPSAYTSKIDPGTGFVDPFIWSHVTASEENRNEFLKGFDSLKYDAQSSAFVLHFKMKSNKQFQKNNVEGFMPEWDICFEKNEEKISLQGSKYTAGKRIIFDSKKKQYMECFPQNELMKALQDVGITWNTGNDIWQDVLNQASTDTGFRHRMIDLIRSLLQMRSSNGATGEDYINSPVMDLDGRFFDTRAGIQDLPLDADANGAYHIALKGRMVLERIRSQKNTAIKNTDWLYAIQKERN

SEQ ID NO: 218 - protein, 1031 aa, unidentified
  REGION 1..1031: note = Cas Enzyme sequence
DRIAAARALQDDPEIDKFGDIQLFEALAEDDAVCVWHKEGDAAKAPDPQPLIDYALAAEAEFKKRHFKVPAYRHPDALLHPIFCDFGKSRWDICFDVHKNAQTPFPRALCLTLWTGNGMVSVPLCWQSKRLAHDLALGQDVQNDGSSEVARADRLGRAASNVTKSDEVKISGLFEQADWNGRLQAPRQQLEAIAVVRDNLSLSDQERERRMSGMMDRIRWLVTFSAKLQPQGPWCEFAEKLQLRINPQYWPHADTNKDRKGHARLILSRLPGLRVLSVDLGHRYAAACAVWEAVAKGDFEKECSNAKGKGAEIHYGPDGCKPEDAIYAHLVWPEKASNSATKKAKTEGRDKFHPVTIYRRIGADTLPDGTQHPAPWARLDRQFLIRLQGEEEGVREASNEEVWKVHQMEAELGRTAPIIDRLVKAGWGQSGKQRTRLEALRELGWKPASEAAGVSDDMDADEGDDRKPSLSVDELMSSAVRTMRLALKRHGDRARIAHYLITDEKTKPGGTKEKLDENGRVDLLQDALVMWHDLFSSRGWRDDAARQLWDEHVAKLSGYKAPEEIGEEFSGPERKKKQKENREKLHDVAKAMAQDVTIREALHDAWKKRWKDDDERWKKQLRWFKDWVLPRGKHASDPTIRKVGGLSLPRLATLTEFRRKVQVGFFTRLQPDGTRAETKEQFGQSALDALEHLREQRVKQLASRIAEAALGIGSEGGKGWEGNKRPRQHINDPRFAPCHAIVIEDLTHYRPEETRTRRENRQLMTWSSSKVKKYLAEACQLHGLHLREVSASYTSRQDSRTGAPGIRCQDVPVKEFMRSPFWRKQIAQAEKKQAEGKGDACERFLRDLNAMWKDKTVADWEKAGVIRVPVRGGEIFVSASRDSQGAKSLQADLNAAANIGLRALTDPDWPGKWWYVPCDPAGFRPIKDKVEGSTAVKLDQALRQPAQAQSGDAAKDKKKRGNKGGGKSKEVVNLWRDISSSPLECIEFGEWKEYAAYQNEVQCRVIRILEEQIKGRHKQPHEGSEEDDISF

SEQ ID NO: 219 - protein, 1034 aa, unidentified
  REGION 1..1034: note = Cas Enzyme sequence
PEDKHGTVGKRLVNDNLPIYIDNITAADKALSAIPSLKETVEKDLKGILSEPLEDFLSLGNYSIFLTQFEIDRYNSIVGGYIAEDGSKVRGINEHISMHNQANKENRLPLLKKLKKQMLSDSASFSFSPDPFQTDEEVLEAIFEFDKSLESAENDIFSVLSNIGDYDTSGIYIKSSDLNTLSDKIFDSWRHIENLLSNKYDEDAGTSKRTKKYEEEKKKHLKDIRAYSLSALDMLPGIDGRVSEYIKGAAGFHKITIAEARKDLAKKAKLSEDRSLKRNSTAKAAIKGYLDAVTDLRRFVSILITTSPDKDNSFYSEIEPAYEVLANVTNLYNKTRNYLSGKLYTNEKIKLNFGSSVLLDGWSESVEKVKLGTILLKDGHYYLGIIAKGQGDLFAKIPEAETDDVYQKMRYNLISGANKSLPHVVFSKKGIETFNPSDEIMRIYKGGSFKKGKAFNLEDCRKLIDFYKFCISQIPSWNCFDFNFSDTNSYEDISGFFHEVENGGYSMDFKAIDSETVDALVKAGRLYLFEIWNKDFSVHSHGKPDLSTIYWRALFDPRNKESLTYKLNGGAEVFFRKASIKEQDIIRHKAGDIVNAKNPRTKNKSRKLDYDIIKDRRFTVDKFQLNVPITLNASAPGFTNINAEARRAIKKAKNPHVIGVSRGEKSLIHITVIDAKCDIVEQKSLNIIGNTDYTELLAKREAARYAERKSWESVEGIKQLKEGYIGNVVRVLSDLMIKYDAVLAIEDLNANFKRERQKIEKSVYQQLEEKLIRKLNFLVNKGAIAGECGEPFKAYQLTGDFQGFEKIGRQTGFIFYVSPWNTTAIDSKTGFVNMFDARYKSVAASQEFWRKFDRVVYDKKIGAYKFEFDYMNFVPEERKKILDGTKTEWSIYTKGEKIQSVKTDKGVKHQRVLLEDEINILFEEYDIGNSDNLVEDICTIHDKDFHERLMNIFGMTVNLRCGGEILSPVIGKDGTFFTAMLDANGSYNIARKGLMLVQRIKDAEDDAILAGGKGGISLNIMSNEWLSSVQKQLV

SEQ ID NO: 220 - protein, 1035 aa, unidentified
  REGION 1..1035: note = Cas Enzyme sequence
VLRNLGNTIIGGVSVQEGEKKFQGINELVNITLHKENQGRGKRTALTMVPLFKQILSDRNTYSYIPERINDEEELISVLRAFHAHLASFYLNGKEVNVMEELLKIVENINHFDPNGIFVDAKKLNGISKKLYDDLFELRAKMTSRLEEQKQTKKNIEKFFQKDAFSITELSLDKKHSLVKYFTGLKDVLKAIDQKWEQFETRNNKDGQKKYKDCHTGIELVRILLDGYKEFFAVCSVLDVDGENDLDNNFYGIFTPLLTELRGIIPLYNQVRNFLSQKPSDEKKYLLKFDNSKCSDGWDAPQTKSVRIFRRHGKFLLGVADSENRSCLNDLSSYTPISPDDQFDFLDYSQGGHMGQNLLTLVVRDGKTVMVKGRKENGENPGLERQLKELLPPDIYRIRKSQSYKNESPNFSKEDLLLFVDYYKQRAKEYYSHFSFTFKDSCDYASFTELVEDIDEKAYQIKFVPTSYKNLLRLVNEGKLYLFDIRNKDYEPGAHGKKNLHTLYWEQLFSQENLDNLTIKLNAKSTLFCRPQVVANTMTHKKGSMLLNRKDKNGQPIPESIYQQLYKYVNGKMTESKLSDEAKGYLDKIVAKEAQYAITKDKRYTKQKYFIHFSTTLNANAPKTADINKDVLDYIKDNPDVNIIGIDRGERNLLYVTLINQKGEILDQKSLNVINDFDYHAKLKQRENERDEARKSWQTVGNITDLKEGYLSAAIHEITTMMIENNAIIVLEDLNRKGFMPKRFKFEKQVYQLFEKKLIEKLNYLCSKDIPPTANGGVLRGYQLTEKFVSFEKMTKQNGILFYVRPDYTSALDPVTGFVSHFNFKDITNTKGRKDFFEKMESITYKNGYFEFTFDYRKYKPKVKDFKNIWTVCSSGKRVLWSKEIKEYTDYYPTTAISEAFAGRGITLDEGADVKALLSGIDDSISNADFYRILFEAFKRIVQLRNTNSNTGEDYIHSPAIQDGKQYCSLDELKKWKDNGESSIPSLPIDADANGAYHIALKGLYLMLSPQAKQIGNEKWFRFVVEKPFKEEKVM

SEQ ID NO: 221 - protein, 1038 aa, unidentified
  REGION 1..1038: note = Cas Enzyme sequence
LNSSEIESSFSEYLGVEHLEEMFQLDYFSETLTQEQIAVYNHIIGGRALEDGTKLKGINEYVNLYNQQHKDSRLPLLKPLYKMILSDRVALPWFPSEEFASDEEMIRAINETYNTLKEVLSIDGDSSLRSLLLNISSYDIKHIYIANDLGLTDISQQMFGQYDVYTSAIKQELRKKNAPTAKERRNPELYDERINKLFKSAKSFSIEHLNSLVDSEHTIQNYYKHLGAYDRNGEQRVNLFTQIEMAYVAAKEILSGKHGNISQSDAETAIIKGLLDAFKSLQRFIKPLLGNGEEADKDNEFDAKLREGWNTLDIVTPLYNKVRNWLTRKPYSTEKIKLNFENAQLLGGWDVNKEPDCTSILLRKNGLYYLAIMNKKYNHAFDIDNLPNDGKCYEKIDYKLLPGANKMLPKVFFSKSRIKEFAPSEIIVNAYKKGSHKKGANFSISDCRRLIDFFKASISKHEDWKNFPFSFSSTETYEDISGFYREVEQQGYMLGFRNVSESFIKQLVDEGKLYLFQIWNKDFSDFSKGTPNMHTLYWKMLFDEHNLANVVYKLNGQAEVFYRKSSLDVANTTIHKAHQPIMNKNQENKKRQSTFDYDIIKNRRYTVDKFQFHVPISINFKATGRDNVNDNVLDIIRNGGIKHIIGIDRGERHLLYLSLIDLKGNIVKQMTLNDIVNEYNGNTYATNYKNLLAEREGNRTEARKNWKKIENIKDIKKGYLSQVVHIISKMMVEYNAIVVLEDLNMGFMRGRQKIERSVYEQFEKMLIDKLNYYVDKQKDSDEAGGLLHALQLTSKFESFKKLGKQSGCLFYIPAWNTSKIDPVTGFVNLFDTRYTNADQARKFFSQFDSIRYNADKDWFEFAFDYNKFTAKAKDTRTKWTLCTYGTRIRTFRNPERLNQWDNEEVVLTDEFKKAFANADVNIHGNLKEAICSLQDKKYLKPLMHLMKLLLQMRNSITNSEVDYLLSPVADENGTFYDSRVCSASLPKDADANGAYNIARKGLWAIHQIQEAPAGNRLNLAIKNKDWLNFAQQKPYMNE

SEQ ID NO: 222 - protein, 1038 aa, unidentified
  REGION 1..1038: note = Cas Enzyme sequence
SEAEFKKRQFKVPAYRHPDALLHPVFCDFGNSRWDIAFAIHEADDDHLEKAKKDIQKKQKAVTKAEKTLMTAAGDVGRTAEAQRKLEKAKQDLESAEKAYHWLTGTRGLRMTLWTGSEMKPVPLCWQSKRLACDLALGNNPRNAGASAVTRADRLGRAASNVTKNDQVKISGLFEQEDWNGRLQAPRQQLEEIARYVEKHGWDQKAKKMRDGIQWLVTFSAKLQPQGPWLDYAKTNVLKLDQKNGDIVVAPSNSKNEWRGLAYPFWHSDNQDGRKGLAKHCLSRLPGLRVLSVDLGHRYAAACAVWEAVEKGDFEKECSKAKEKGAEIHYGPDRYKPEVAIYAHLVWPEKASNSATKKAKTEGRDKFHPVTIYRRIGADTLPDGPPHPAPWARLDRQFLIKLQGEEEEVREASNEEIWKVHQLESELGRRVPLIDRLVNAGWGWSDKQKARLEALCAWGWKRASEAGFSGGTDADEGEVRRPSLSVDELMSSAVRTMRLALKRHGDRARIAHYLITDEKTKPGGVKEKLDENGRVELLQDALIMWHDLFSSRGWRDDAAGQLWNDYVAKLSGYNAPEETDEESSGPERRKKQKENREKLYDAAKALAQDVTLRKALHDAWKKRWKDDDERWKKQLRWFKDWVLPRGKHASDPAIRKVGGLSLPRLATLTEFRRKVQVGFFTRLQPDGTRAETKEQFGQSALDALEHLREQRVKQLASRIAEAALGIGRMRRPMEGKDPKRPDVRVDAPCHAIVIEDLTHYRPEETRTRRENRQLMTWSSSKVKKYLAEACQLHGLHLREVSASYTSRQDSRTGAPGIRCQDVPVDEFMRSPFWRKQVKQAEAKQAENKGDARDRFLCNLNAMWKDKTVADWEKAGVIRIPLNGGEIFVSADCTSPAAKGLQADLNAAANIGLRALTDPDWPGKWWYVPCDPASFKPIKDKVEGSKAVNPDKPLPHSTQKQDGNAAKDTKKRGNKGAGKSKEVVNLWCDISSFPLQDKSREWKEYAAYQNEVQCRILEEQIKGRDKQPHEGSKEDDISF

SEQ ID NO: 223 - protein, 1039 aa, unidentified
  REGION 1..1039: note = Cas Enzyme sequence
MAETITKTIKLKIVLPKGSDGKQAIFDSHCALIEAVAEYEKCFMLIRQEEYYNSKRELVKQEAVLGEFCNRFSSIETDEQKQIIKTLYKKIVQDGNGNLGTSGRERLRSGNAHNVGAWNSSIFGTHQMEESKKGGRKPKDPSAVNPKKDELKTFKDSCNQNNILPLSAPLLTSGLSAQSTDKSSGKLKLSFWDKAAMRVTVAHLMSWNTWNNKAKVSYDEAKDKVNTEKTTYDSFDQNLRIKIEQYCQERKDDNAGFETDKEFYITGAMCGGLQKIIKDWKKKTNETERLQVVTDWQSDKKLKHKIGDVNFLHWLLKDDNKVVWETEDFLKTVKNYHSAKSKMERLIPGARYSPPHKIDSPRWLMYEYKGGGNLKNYEVVSENNALKLNLPLLKKNADEKFDESLYSFDLAKSEQFKVIETDGKNGKNIKFKTGDEEFTGKFGGADLLVKLDSTGNKVRSAYLKIAMEVDKKLPYDDFEKISSKVKYHFSSAYDKDATKHSDEVILPAIQAGRPIRVMSVDLGQRSFGACSVFQLALKSDENKGKFVLPVVLPKLNDTEWVAVHERSFLDKLPGEGVSDKVIENRKNAMNEVKDLRREVDILRDVLKIINQSNLAKKQKLIEQSKKYYENENYKSKLEELSKLTTADEISIKAQEIFNEYEKILADKIKTWRKETRGRHERDYYGGKSMWMIEYLTKVRTLLLKWSTHPRRAGKVVRQNKEKFGTVCKKLLTHIKNLKDDRAKTGADLLIQSARGFIYDEKTHSWVQKFEPCNAIAFEDLRRYNFNSGKTKQENSQLMKWAHRNIINKVTGQAALYGISIYDSTDPAYTSKFYAKTNAPGIRCRSLKNEDFTDSEYLKNRTAELYTEEEIAKLKADDVIPMEGGKLFATVDGGNLKIVHADINASWNLQRRFWGRHSDLLNFTPKLSDNKIQLESNDDGKRNDDGKRNNGKRWSGKLKMNNFKNCGLIKTDSGDYKITNNKADTVEKSNDSKYAPNLFRDVSGEFFKDPNIFMDKAKFENSVRSEIVKKLKEKSIAARN

SEQ ID NO: 224 - protein, 1044 aa, unidentified
  REGION 1..1044: note = Cas Enzyme sequence
MKKPTTTTTTRQVTYLPRLEEGQLDLIVRTHVVYNLMLAHYCREVRRVRLHARTTTDRVAGSAMEALFTSILSGEDPSQVARGFFGPLTDPSSKGKGLKDDAEGTAAMYEALEADPTTIMKKDVRQGVGMMGRRPAWAKRLLDGAPLDKDIQELCSKWVADKLAEMQGGYVSTLKSAGWLTQEHAGRIRTFTESSGLMEGGLKDMERYAFCQALAILAPHYKKRVERAAARIQQAIDVDHRFAEHMKASWWGQVEAYEVKRNAAIERDSGHTPKEPYKVGRGTELRGWYKVRALWLGRRWDGAMHPSQDELRSIFYAFRDENPEDCGDHALFEWLSEPSQWLLWDGGHVEPEKRGKRADDLIGHKAKYNRDSVPMKNVALTIPDPVAHPKPVNFGRSAAGDGMVDPVAKTAKLRLVSATGRDKPYIALYDNHRVSVVDGQVLLLDGSGRRGTGLPATMKGVGLRLNRAHLRTVPNRALYSEQYPTAERYEEMVRSLTEHLRKVEHPVYFTVALELPVPALRAPSRKTEAKFPMKSSCPAFLLRATVPSQVGLRVLGVDLGMRQSATVASGVLVDSKPTGLSRRIGENLWLKIESVKVLQLPEDHGSPILAGATDQDGKPISIVRNASNILYKAGRLISYQNRVAKELDGAFGGRAQSSKVLNPEIPLKLAEELGLASHAEGVRAVIGDPAKVHAAWDALAIAARDLVLQSLPPSKQAGAGGLSFDHMILLENFLRFERKFATRGRKVEKRKFEGTFHPRLRTRINRMREDRVKKVAASLIAEAIRVKADVIAVEDLNRYKMKWERPKRENGKLAQWSHRAVLDKLVLAAEIRGISVATTYANYANQMSAITGAPGIRVGRYQDWWAGRSGWMKQAPNFPNVVPGQLVPDFSGPMLVTVDAAVGASTEVVAPKVVRKNAAIMAAVRYFTYDECPARLILMPHKDGFKVVTVVPAWHGMLFAKQGDTYVPTGKRVNLDASGDDDVEVDSESSTTVAIIRDLTGTVRDGAWMETKPFWEAVAAIVTSKLQATGAIGDLLNELERGAA

SEQ ID NO: 225 - protein, 1046 aa, unidentified
  REGION 1..1046: note = Cas Enzyme sequence
  VARIANT 1036..1038: note = X can be any amino acid
MQEHKKISHLTHRNSVQKTIRMQLNPVGKTMDYFQAKQILENDEKLKEDYQKIKEIADRFYRNLNEDVLSKTGLDKLKDYADIYYHCNTDADRKRLDECASELRKEIVKNFKNRDEYNKLFNKKMIEIVLPKHLKNEDEKEVVASFKNFTTYFTGFFTNRKNMYSDGEESTAIAYRCINENLPKHLDNVKAFEKAISKLSKNAIDDLDATYSGLCGTNLYDVFTVDYFNFLLPQSGITEYNKIIGGYTTSDGTKVKGINEYINLYNQQVSKRDKIPNLKILYKQILSESEKVSFIPPKFEDDNELLSAVSEFYANDETFDGMPLKKAIDETKLLFGNLDNSSLNGIYIQNDRSVTNLSNSMFGSWSVIEDLWNKNYDSVNSNSRIKDIQKREDKRKKAYKAEKKLSLSFLQVLISNSGNDEIRKKSIVDYYKTSLMQLTDNLSDKYNEAAPLFSENYDNEKGLKNDDKSISLIKNFLDAIKEIEKFIKPLSETNITGEKNDLFYSQFTPLLDNISRIDILYDKVRNYVTQKPFSTDKIKLNFGNSQLLNGWDRNKEKDCGAVWLCKDEKYYLAIIDKSNNSILENIDFQDCDESDCYEKIIYKLLPGPNKMLPKVFFSEKCKKLLSPSDEILKIYKSGTFKKGDKFSLDDCHKLIDFYKESFKKYPNWLIYNFKFKNTNEYNDISEFYNDVALQGYNISKMKIPTTFIDKLVDEGKIYLFQLYNKDFSPHSKGTPNLHTLYFKMLFDERNLEDVVYKLNGEAEMFYRPASIKYDKPTHPKNTPIKNKNTLNDKKASTFPYDLIKDKRYTKWQFSLHFPITMNFKAPDKAMINDDVRNLLKSCNNNFIIGIDRGERNLLYVSVIDSNGAIIYQHSLNIIGNKFKGKTYETNYQEKLATREKERTEQRRNWKAIESIKELKEGYISQAVHVICQLVVKYDAIIVMEKLTDGFKRGRTKFEKQVYQKFEKMLIDKLNYYVDKKLNPDEEGGLLHAYQLTNKLESFDKLGTQSGFIFYVRPDFTSKIDPVTGFVNLLYPXXXKTLTKPKI

SEQ ID NO: 226 - protein, 1046 aa, unidentified
  REGION 1..1046: note = Cas Enzyme sequence
VQPFLEGVMIDDIFKIDFYNALMTQDGIDFFNQVLGGVAEEDKQKYRGINEFSNLYRQQHPELGGKKKALTMIPLFKQILSDRETLSYIPQQIESETQLTEVTNRFYSYITNYEKNGKTVNILSELVILIGNICNYKPDGIFLSSKYITDVSQKVFGHWGIINDKLQELAIEKFGSIEVVKNKKNIERYLAKDAFSLKELPFDDEHKLSDYFVDLPQAVNNIQSYWLQYKEWCKGESKQLFLNNPDGTEIVKNLLDSMMDVLHKVSVLLVSEENDVDKDFYNEFIPLYAEFSNIIILYNKVRNFLTKKPSDVKKFKLNFGVPSLGDGWDLNKEKDNKAIILFKDGFSYLGIMNAKNQPKIVGNDQPEGDSYSKMIYKFLPGPNKMLPKVFIKSQKGLETYKPSKQILDIFESGSFKKGSPQFSLINLHALIDYYKDAISRHEDWSKFGFKFSPTASYEDISSFFKDISKQSYIIRFTNISEKQVNEWIDNGQLYLFQLYNKDYAEGAHGRKNLHTLYWENLFSPDNLNDLVLKLNGQAELFYRPQSINTPVTHKMGSKMLNRRDKSGMPIPESIYRSLYQYFNGRKQESELTDAERAYISQVVVKDVTHEITKDRRYTKPEFFFHVPITFNLNADGNDYINEKVQEYIKDNPDVNIIGIDRGERHLIYLTLVNQKGEILKQKTFNMVGDYNYQAKLAQREQERDVARKSWQSVGKIKDLKEGFLSAVIHEIAKMMIENNAIVVLEDLNFGFKRGRFKVERQVYQKFEKMLIDKLNYLSFKDCKADKEGGILRGYQLAQQFTSFQRLGKQSGFLFYIPAAYTSKIDPVTGFVNHFNFNDITNAEKRKDFFMKMERIEMKNGDIEFEFDYRKFKTYQTDFKNVWTVSTFGKRIVMQPDEMGHKIMKDIYPTLQIIQAFESKGISLKDGTDIKALLSTIEANAANASLYSTLFYAFQKTLQMRNSNAATEEDYILSPVADNGAHFCSTDEANKGRDANGNWVSKLPVDADANGAYHIALKGLYLLMNPQTKRIENEKWLQFMVEKPYKE

SEQ ID NO: 227 - protein, 1052 aa, unidentified
  REGION 1..1052: note = Cas Enzyme sequence
MPTRSIKLKLVIPRDSSAAAVSVRRALWTTHAYVNAAVRYYTELLLELRQEDVLLREGNEEKVVEAATWTERLRARLHTTRIDPARIESALAMCKQLYREIIPSTVEGKKGNAQVANRYMSPLLDAKSRGQATENAGPLAELRRVEGLPLAAPYNAGQLEAVKRGAIHTFDRMAFALAAAHLNPWESSRHRTVKQYTTRKARRDSLAAWFRDNAPDAMLHLERFERSRLERLRLNGSLADEDTVYAVTLRELRAWDKLRAWLAKHPDADHSQRRTFVTELQAREGRGFGGAEVMQWLAQPEQQFLATHEAGDVVSRWGLLNRAKAVFERTKRDPALTHADARRHPRYVAFDAPPNTNAPQFDLKPGDAGIRLTLPLLVASTETGLLERTNVEFTLAPSRQVRDVKVRDEEQDGKRHLKLEFRSQDGLDQDTADVGGSVLLFDRPTVAGTRPHALEAGTIGPAWFKLSVSVGDANEAQLKENEAKGTWVNSGPQKRANSSRPTRVLAADLGVRTAASCAVFTFAARGRAGTPVTLATGDTVVHERSMKLALPGEQPDARTLAARAEADRAVRAIRAGIGMLKTLRKLARAADAETRATLLDALEHGRPGTTPPPITLPPESLAAWRAAASDSLAALVTGPWRDARMQLAVEIRRWRRETRRRRSSPLGGKSAWAVEYLERVRKTLLSWAAMRGPDQPDIKRFDRGRQGTYARRLLDHITALKKDRVKTTADLIVQAARGLVHVDGRWEQKHQPCEVIVLEDLGRYRFQTDRPRSENSQLMRWSHREVLAQVKQQAAVYGIAVIDTPAAFSSRFDAITRAPGLRCEHVDQPFLALVSSPEGERRRAELERLEIDCGRLQLGDLVPRAGGEQFVSVLGGRPVRVRVRHADINAAQNLALRALEAHQSPVRLTAAAIGDSFVTRPLGVRNQAVFAGQRVVLESASPGGKTLRATSLKNDREAAKRLGIKPGDLDNAKDDEQSSGPDDDDDDAEFAARLQAVDDAAKKRETFFRDPSGVVLGGSWAPGVVFWSEVRRLVIDGLRTTTDKAGRRLLHG

SEQ ID NO: 228 - protein, 1056 aa, unidentified
  REGION 1..1056: note = Cas Enzyme sequence
AISYRCINENLPKFLDNVQSFAKIKESISSDIMNKLDEVCMDLYGVYAQDMFCTDYFSFVLSQSGIDRYNNIIGGYVDDKGVKIQGINEYINLYNQQVDEKNKRLPLMKKLYKQILIEKESISFIPEKFESDNIVINAISDYYHNNVENLFDDFNKLFNEFSEYDDNGIFVTSGLAVTDISNAVFGSWNIISDSWNEEYKDSHPMKKTTNAEKYYEDMKKEYKKNLSFTIAELQRLGEAGCNDECKGDIKEYYKTTVAEKIENIKNAYEISKDLLASDYEKSNDKKLCKNDSAISLLKNLLDSIKDLEKTIKPLLGTGKEENKDDVFYGKFTNLYEMISEIDRLYDKVRNYVTQKPYSKDKIKLNFENPQHLGGWDKNKERDYRSVLLKKEDKYYLAIMDKSNNKAFIDFPDDGECYEKIEYKLLPGPNKMLPKVFFASSNIEYFAPSKKILEIRSRESFKKGDMFNLKDCHEFIDFFKESIKKHEDWSQFGFEFSPTEKYNDISEFYNEVKIQGYSLKYKNVSKKYIDELIECGQLYLFQIYNKDFSVYAKGNPNLHTMYFKMLFDERNLANVVYQLNGGAEMFYRKASIKDSEKIVHHANQPIKNKNADNVKKESVFEYDIIKDKRFTKRQFSIHIPITLNFKAKGQNFINNDVRMALKKADENYVIGIDRGERNLLYICVINSKGEIVEQKSLNEIIGDNGYRVDYHKLLDKKEAERDEARKSWGTIENIKELKEGYLSQIVHEISKLVIKYDAVIAIEDLNSGFKKGRFKVEKQVYQKFENMLCTKLNYLVDKNADANECGGLLKAYQLTNKEDGANRGRQNGIIFSVPAWLTSKIDPVTGFADLLRPKYKSVSESVEFISKIDNIRYNSKEDYFEFDIDYSKFPNSTASYKKKWTVCTYGERIINVRNKEKNNMWDNKTIVLTDEFKKLFADFGVDVSKNIKESVLAIDSKDFYYRFINLLANTLQLRNSEVGNVDVDYLISPVKGVDGSFYDSRLVKEKTLPENADANGAYNIARKALWAIDVLKQTKDEELKNANLSIKNAEWLEYVQK

SEQ ID NO: 229 - protein, 1057 aa, unidentified
  REGION 1..1057: note = Cas Enzyme sequence
MKAFAKIAETSVAEHFTDIYEGWKEHLNVGSIEEIFRLDYFSETLTQIHIEVYNYIIGKKILEDGTEIKGINEYVNLYNQQQKDKSKRLPFLVPLYKQILSDRDKLSWLAEEFDSDEKMLAAINESYNHLHDLLMGNENESLRSLLLHIKDFNLSQINITNDFSLTDISQHLFGRYDVFTSGIKDELRIITPRKKKESDEDFEDRISKIFKTQKSFSVEFLDRLPQPVMEDGNTRSIENYFMTLGAVNTETTQKENLFAQIENAYEDARTILQLKDTGDSLSQNRSAVAKIKALLDALKDLQHFIKPLLGSGEENEKDELFYGSFQMIWDELDTVTPLYNKVRNWLTRKPFSTEKIKLNFDNSQLLGGWDVNKEPDCTGVILRKDGFYYLGIMDKKSNRIFDAALTPTEGECYDKIDYKLLPGANKMLPKVFFSKSRIDEFAPSEAIISCYKKGTHKKGADFNLADCHRLIDFFKQSINKHEDWSKFGFHFSDTTTYEDISGFYREVEQQGYMLSSHPISSSYITQLVDEGKLYLFRIWNKDFSEFSSGTPNLHTLYWKMLFDECNLADVVYKLNGQAEVFYRKASIKPENRIIHKANQPIANKNGLNTKRTSTFEYDIIKDKRYTVDKFQFHVPITINFKAAGQTNINPIVQDAIRQGGFSHIIGIDRGERHLLYLSLIDLKGNIVKQMTLNDIINEYKGQTYKTNYHDLLAKREGDRTDARRSWEAIETIKELKEGYLSQVVHIITKMMVEYNAIVVLEDLNTGFMRGRQKIERQVYEKFEKMLIDKLNCYIDKQVSPTDEGGLLHPLQLTCDAQKWKRSHQCGCLFYIPAWNTSKIDPVTGFVNLLDTHYDTREKARVFFSKFQRISFNAQKGWLEFAFDYNDFTTKAEGTRTQWTLCTQGERIRTFRNPQKNNQWDNERIILTDAYKQLFDKYDININSNIKESISAQTDAQFFKDLMGLMKLLLQMRNSIINSEEDYLLSPVADDAGHFFDSREGISSLPMDADANGAYNIARKGLWVIRKIQETPSGEKTSLSITNKEWLQFAQTKPYLND

SEQ ID NO: 230 - protein, 1059 aa, unidentified
  REGION 1..1059: note = Cas Enzyme sequence
MLIAMRQDQYEPRDGVVVAKAEVLKQAKLLLKGAWDANEVPDEERREEQALEALERLYHVIVKGTAQEANALISPFFDPDSSAFSGHLEIIRSLPNWLGGEIDDIRDAAQQWLDDGHHHQLKPSVGSPPKWYKKALDSDWDWPSDLHAWGEGKKDEVAKGPAGLVLKLRELRVLPLRPSYFAPLLHSTSKVTPWDRLCFRLAVAQLESWQTWTEKSAEEYERRTEDLRKKESNFKEKAAQEVFEALQAYEAERAKESMALNPHLGAEEHKTRITSRTLRGWADLKEAWSKDKDQTLESLKALIVKQQTKKRGRFGDPHLFGWLADPKRHWVWKGRGDDFISAHAIINQARIVVEESREQATLTFADALGSPRACQWEYSGGANLKNWRVHKSDKGNLAAEFDLLATTLDGLEEVSHCFSIAGTDQLKVLEIKELKAKKYGIEYITAAGLAQAALGSADLLLNWRWLRNKRLEDVDHGKIGAAYLKVALAVDEQAEESVLAVPKGVEWHFLTAKAERSKHQDKVKEGTRVLSVDLGVRHLASCSVFELKSHKPVSSSMSFKVPDMDLWAIHERSFSIKLQDEKTDKRRKAWQEDQTAELRRLRSALTRYRNLRDLLGEEEADRAEAHQALIEPAHVNGFPFELPIIGSLKAHLSQPKPVWEGEITKAVQSWRAGFSPILSEWRRTNRSKDTRKHYGKSMWAIEHLTETRRLLQSWSLLAGKSGQINRWDREYQGVFAQHLLDHLDGIKDDRMKSGADMLVQAARGYLRNDEGRWEQRYEPCHVVLFEDLSRYRTRQDRPKRENSQLMKWAHRGFRLETDMQAQVYRIATADLDASYTSRFRAKDGSPGHRLTPLTKAILSDVTRMEWITRDNEGIDVSKLQPGMLVLDPGGPLLGTLENGGLVTLQADINAAHSLQKRFWTRFGHAQILRSCQKTKMPDGSVVWVPRSMAKRIKGTMDGFGVLIETGHESGSARWETKTLREYKKLGGSEGANAAPSDDTDAELEELAEALELIKKEQEISNFFMDESSNILPDGLWYPSKTFWGIVKSKIYAKLKVQWS

SEQ ID NO: 231 - protein, 1060 aa, unidentified
  REGION 1..1060: note = Cas Enzyme sequence
MATISVKLKIIADKDTKKKVLESHKLFNKYVKMFEEFLLLAQGKDYYYKDDNGEERYKSKEDVAREMREYLHKRGLASNDYECIEALKGLAAVVSEKKSMAAGMLAKFYKADSTAGMNNIKKIVDPVPEWVEHYRNNGFDDDKYKKMADDWIESEEGRKAIAPILNGSGRPSAFKNAYKNGMEWYSKFIKDQKTYRKDLDNGLSKILFVLNKENAFPLIDIDESLVKNHPVWVKLMLKTALENYASYLASDDDTRNNYKLALNEFEAAEKKVKSDYSQQLSAVQNYLEDNYIQTDRSVYLTQRMCRGIDEINREWKNKNNYTDRIAVINEWQSDDKKKRILGDVNFLRWLAEEDHINILESDCLESLIKYYECLRKVELRKKCASYTVADPVSSKRYLFYEAEGGTNYREYRLESDGTHIKAIFPILLGDEKNSYYEETVTVKLAGSKQFQNVKLLGKRKVEFNNDKDYYCQKEGIVNKEFFKGELGGSDLRVETTDTGKLVGLYINLTINVDDFCEADQKQMALNAMYAFSRAYDGKVSKKYDESLSGKTIRALAIDLGLKQFCACAVGSVKYGENLIDLPDIAFERKFLLKMQGDKITSKEEQYRREAMKELSEIRKEINYILLLKRIYNQDTPGREKILKQSAKYYKHPEKEQLFQYCLNVEDAKKVEECLSDEYSRMIADMNLKMKEFRSGNKTKKQKREYNPGKSYWSINYLEQLRKVLMSWNSLGYRITDENKPMNRSYGVTATRLLDHIQNLKEDRIKTGADLIIQAARGFQYDEEKGYWVQKYDPCHIIIFEDLSRYQFSTDRPKKENSKLMKWSHREIVNEVIRQASIYGIAVYDSTDASYSSKYCYKSDTPGIRCDKLGKNDFEASGRLRTYIYDNLPEKIREKAELLKPGSLVPSEIGSVFVTVDKDGRLYCLNADLNAACNLLKRFFGMHTHLIRFPTININGYLFLKGVDCGDITDENQNIGKRFEGKLNKYFGTKKVMLKASSCSGHFRIAPKRKKAENPYVGKEKVYNLFRDPSSYIIPCDEWVGYKEFWNIVNDRIVGRLLELL

SEQ ID NO: 232 - protein, 1063 aa, unidentified
  REGION 1..1063: note = Cas Enzyme sequence
NKNAFQEIEKVVSALSMHKDQFSLENFKNLLIQKDIDDFNKNIIGEINYQVNQHNQQQKTKLPKLKILYKQIGSKKNAPQIFEIKKGKEWKELQNLVKAQHSKKEINKETKKLLDSVKDFYKQFFASPESFALKEIFFNKQSINTVSSLWFINWKTLADLLRIEVNKKDEEQKIPTQISLAELKEELEKKENILEKNKDRKEESLLRSIFKLGKSGEYEKLFKENRWKTFLSIWKHEIDKNFKLIEEKERELETKSQEKFFKKKHGKFVKELCDAYLVIERMIKYHRVEEEIKTDSNFYNIFDAYIEEDILRDYYNAFRNYITKKPFSEEKIKLNFNCGYLLKNGWDKKYDAYGTTMFKRNGKYFLGIINGKGFSEKELENLKGNIDSENYAKKLVYISQKIDNKNPPRWFIRSKGDSFAPLVREKLLNPTPILEIYDKKLFTKDKNRIGYKKFLPQIIDYFKKGFKIHPDFKNFDFSNWKLSSEYETVADFYDHTASMCYRIDWEEINWETLLKLSEQKRISLFQIYNKDFGKTKEGSKKNLHTMLFLELLKPESAKHLKLLGGGEIFYRKASKDLPVREKNNKEMTFIDKRDGNKEKKVIQSRRYAEDKFFLHFPIAIKGKGINLKKEDVNVFLAEQKEKINIIGIDRGEKHFLYYSVIDSKNGNILEQGSFNKIKTQEEVDEKVLKVKYNNRHEMIHVELIPTGKKVKYVNYHLLLDYYEKKRMIARKNWEIIGKIKEMKEGYLSYVIHEIYQLILKYNAIVIMEDLNSEFKARRTAKVEKAVYKKFELALAKKLNHLILKDKKPNEKGGVLHAYQLTPKIEDGKNISRFEKAKQWGILFYVRANYTSITDPLTGWRKQKYISNSANIKDIKEFFYEDNMKIKYDPKKECFCFQYETGGKNWILYAHKNLERSWYNRQKKTVEFYNLYKKFEELFSGLDKSKNINQQINNEDNFKWKSLVFLWNLLNQIRNTDRKKEEDKNDFLQSPVWSEEIQDFFDSRKVDDYKRKLKKEFPKNGDANGAYNIARKGLILLKRIRKNPQDYDSLILDENWDKFAQKEK

SEQ ID NO: 233 - protein, 1065 aa, unidentified
  REGION 1..1065: note = Cas Enzyme sequence
AARRISAGHTWIKLAEARRREFEENSQKIKGVPENARQWLETYREDCSESSGAIDAYLIKEKAVQGWEVVVKAWKNCKTEEDRIAAAGAQQDKLEIDPFGDINLFRALASEDARCVWQVDGKPDANILLNYVAATKAEFDKRRFKVPAYRHPDPLLHPVFCDYGNSRWKIKFDVHEANRTGKKAKKNKKTIETADIHGLKMDLWTGSKIENVSLRWQSKLLEKDLAVKQLDGKEDGKRKVSRASRLGRVAAGAGWETPVSVSSVFTQDYWNGRLQASRKELSRIARRVETRGWDEKANSMKKNLKWFITFSPKLEPQGPWINYVDNSEDKRPFTFTSKGEPILDEVFSIENKNRKGRARLILSRLPGLRVLSMDLGHRHAAACAVWETLSSRQLEDACAEGGYDKPAPDAMYHHIKSNRGKRVIYRRIGADELSDDSIHPTPWARLERQFLIKLQGEERKARMATADEIWEVHELERALGRKTPLVDRLTKTGWGSDSGTPRQRQLLGELNQWGWEPDEAQENSEDDEITSRESLLVDKLMSRTVDTVRKGLRRHGNRARIAHFLVAREKAVPGGRMVTLDNEGRKEIIADALAFWYELANGGEWKDTQALEWWKIHIESELSVEELPDIAGTGIAPKERKRKKKELKEKLKPVAERLLTSGAKKLSDQWCERWKQDDKEWQKTLRWLRDWILPRGVRGKSELIRNVGGLSLDRLTTIQSLYQAQKAYFTRITPKGIQMDKDKPLTAGMNFGGHILNDLENMREQRVKQLASRIVEAALGVGRVKIPKKSKDPKRHYERVDAPCHAVVIENLTNYRPEETRTRRENRQLMTWCSGKVKKYLSESCSLHGLFLWEVPPSYTSRQDSRTGSPGIRCEEVSVEKFFKTPFRQREVARAEEKDSKNKASAYEQYLIDLKERWKSRGEETALLRIPRKGGEIFVSANSNSPASKGLQADLNAAANIGLKAITDPDWSGSWWYVPCSSKDFVPIKDKIGGSRAFENITTPMPNPDDAKEATGKKRSGKKEIINLWRNPACSPLERDEWERTAKYWNMVEYHVIKRLKRQMG

SEQ ID NO: 234 - protein, 1065 aa, unidentified
  REGION 1..1065: note = Cas Enzyme sequence
MFALMETLDEMQGEERGEVLQNLFAERIALLNELSTVFDFKFTNKKTIEVMLPEYVENHNFKNKDELMKMVEIIKPRQAKFERFEKNIDSLINMNLKKGSLSYRILVENPQIHLENVRLLTRFDYAGILREEPDEVISFCKNSSLDDYNSLLFQKNIDVYNYCVGVINQKLNEYCQQEKLSYSELELKTLRKLPLSERKSFFDKIPFFESDKELVESYNKLVTELNKHSFNSDVLSNDLNIYIKSNQINKYSNIVYGKWGIINDCLEEYCNEYGEKKEKLLNNISIYDINNIVEEFSEKLEIPYNNNSLQQIIEFSFANTKYAKCDIPMISLRNDECKEKYEIKKNLDKAIEFIRLLRLFDTENENFSFDAKQEVEKTLDVYNDVNLLYNMARNYITQKGNNKIKNALSFSTSGFAGGWSESIESNKRVFLMKNDLGNKYLGIYNLLGCKANNESVSSVSRIIKESLTEEKTEKQCYRKMVYSVTSDVKKSIPRLFVNSQLPEPELTRFKKKEYNDDEKFLAFIIDFIKEKIEKHETWRSYNFKYKEHYESYDEFCEDLQKQGYILKWKYIEKSIIDELVDNGCIYLFKISSKYDRYNFKKSIHEKYVDALFSDENENGKLIKLLGNAEVFYREPQIKNPYIHKKGSLLVNKHYDNGKTIGSEYSEIAKNIQGTTVDGIVTKICDRDIIKDERYTREQFSIHIPVKIGNISSKEKVDSLAIEKLKKPHNTVVITRSNNHFLYAVVFDDGMNVLEKRSLNVVKGVNYKEKLEIAEDLKKKDALSWKEIKSTSGLLDGYISYAIREVADMVLKYDAMVVLEKATNGGSFNLLSTRTYVKFKNALINKLQFLNDVSKKDTEPGGVLNPYNLTHVDKDKDFEKELNGIVLQIPAFYMAMKDINSEFVLLKSPFAKNQSQRKNLVNKFKNFNFNNEKNVFELEYDSKKFNSKYKNTFICDSFGERIIRQNGETERVNLTDHIKQNLLENGLDFRTGENLYSIYDEQNKSHINALYESIKLILQMYNFDSNEAYYVSPVSHTIITDSNCREIVQSINLYKKAVELAKQYYI

SEQ ID NO: 235 - protein, 1066 aa, unidentified
  REGION 1..1066: note = Cas Enzyme sequence
PAFTCLPSWKDAVPGQPAWKEFDIAAFKEALKAIHQIETKSAERKAEQAQLERLLDCMEGRAKWFTTDESEMPRPVLIACDPRIKQLEKIQQSLASSDDSLDEELREYGIRSRTIRGFRELATIWRQKTPPGTPKGTSHADQLKEILREHQTKNRDSMGSARLFEELTHPENWHVWLEPSPEEMQAWRNALPNSADRSLDFAPDPLTALARRLEIEREISELDRPVRLTPADPRYSRRQFYFSDVVSFSQRGNYRHDTAAMAVTVPIAVETDQGWIQQRVRLCYAAPRLKRDRLRAEDGSLGSTAGFHQPMMEALGVPPAVPKDLSKLAVALMPEGLPDESGRSRLFLNFPIEIDTAPIRRHIGKASAWDKQFASADGKNMYLRWPSLTSGLKSPPQKWWWEDRRSFTVLAVDLGQRFAAALARLEVTGDAPSREKPGRFIGRSGETSWHVGGLRTALVRLAGEDAQLVEKGQRRQEPFGSAGRPADAAEVEEAREICRRLAFDMDDRIGGANTQGSQLKRFPSFPELNDILLIAHRRGVARLRRYQRTLRTLHDDAKAGLIQYNELRASGDEDLPSIKDASSAKAHLEEACHRLRGTLSETLVDIAGRVAPSRDRRWIWEQAKKEGPANHCLVRSPPLPQRNRGVRLRGQRGLSMDRIEQLEELRRRAQALNRALLNDDPSKATIGGPLRGLDLPDACPEIGEKILRLKEERLNQTAHQIVAEALGLRLKPPTKSKAQRRDRDIHGEYEKVREPVDFIVLEDLSRYLSSQGRAPSENSRLMRWCHRAVLHKLIELAEPYGIPILQTNPAYSSRFCSRSGVAGFRAVEVTHASRYAFPWKHELAQYERVCSGDLKPEPHRRARLEMTHLLFAQLEKLEATRTGRPPRSLLAPQPGGPIFVPSRGPTTNADLNAAINLGLRAIAEPSVLDVHVRIVSAADNGTLRTLAKSRHAAARWGVKGRLIEMHKPEELARLLKESRQPNFFVDLGCDADFQRARVDGIGEPIASGKGLWGSLRQKEWRIINRLNNNRLEKKEWLGHRPLPEEPEPVSSSGSPWAEDDDIPYNE

SEQ ID NO: 236 - protein, 1066 aa, unidentified
  REGION 1..1066: note = Cas Enzyme sequence
LELKTRDGKPIIKEDLEKALGKVGCKGLIEGFFTYFRGFNENRENYYSTEDKSTSVASRIIGDNLPKFCDNVLEFENQEEKYLKAHEFLKGKGIALTAKNQDGSETELHEISAKYFKMDYFVNCLSQEEIERYNLEIGNANNLINRYNQQQTDKSNKLKIFKTLYKQIGCGKKGDFIPVIKNDHELKERLDETIKRSERFFEDTQKLINMILNLEKFDGIYWSGSSLDRVSNMYFDNWHTLKEKLFDFNKKKDNYTIPQAIELSDVFEALDNTDIQFKNNKNTEGKDKILSSKDNNSIKLLKMIFEDIDKNNKIFENGKNEISQITEYRKDENSQIIKNWLDSILQSNQILKYFKVRENKISGNKLDTDIYEQLNKILFEENPTNNYDVIRNYLTQKPTERLKKLKLNFNNGQILGGWSDGEEKNKGAVLLRKDSKYFVGILNKRNIFDTSKGNNSIYNENGNAERLILRILKFQTLAGKGYLGEFGISYGEESKSDPKSAVKHLQKIIKERYVDKYPLLKKFVNNNWEDKKIFDAEIQKTLKDCYICEFKKISWNKVEEFINSGDMFVFEVCCKGKALQNLYWQEVFKENSTAQLLGGAEIFYRPTSTEIKKKTKEGYENKKDKRTGKEYILENKRFLSEKFLFHCPIKLNYKEKSYRKPQYAITEINLNINNELTKKENVDNVCFIGIDRGEKHLVYYSVINQEGEILEQGSLNVINGQDYADKLEKKASNRDEARKNWKTIGTIKDLKNGYISQVIHHIVKLALKHKAYIVLESLNTGFKRSRQKIEKSVYQKLELALAKKLNFLTDKKAKTGEISSVCKALQLTPPVNNFSDIEKVKQFGIILYVRANYTSQTDPVTGWHKTVRFTKTKQQDLKNEIYEKFNEIGFDGKDYYFVCKKDEKNTKEWILWSGKDGKSLDRYRGKRTIAGNWEIEKQDIVKLPDEVFKGFDKTKSLKDQLNQKLDLSKIGTLKYSIDLIQQIRNTGKDEKDNDFILSPVRDGDGINGNHFDSRQSNKIPNGDANGAYNIARKGLLAFIKKDGIKQNPENPELYITDEDWDNFASK

SEQ ID NO: 237 - protein, 1067 aa, unidentified
  REGION 1..1067: note = Cas Enzyme sequence
KKLIKEELEKMNLTDKERALIESFKNWTTYFTGFNKNRRNLYTNEEKITAIAYRLINDNLPKFINNIKVFEEIKTIITDIDDTYFKIENYSNFLTQSKIDKYNEMIGGYTEKDGIKIQGLNEKINLHNQRNNNKLPKFTPLYKMILSDKEKLSWLPEKFEDSRELLEAVSEYYKSASEIIEELRKILKKLEECDLNKIYIKNDTGLTDISKRIFKNWNEIADRIKNTYQQKSKEKQEKYQERTEKEFNKQDSFSIAFIDNIIKSNSVKDYFLKTDKFDIITKKYANVQNLLATKYEGDLKQKDGDVEKLKEFLDSINELLWFVKPLSGTGEESNRDTLFYGEFEKLYTKLAKIIPLYNKVRNYVTQKPYSTEKIKLNFSNSTLAAGWDRNKEKDNTTILLRKDGCYYLAIMNKSQNRLFKNIEESQKEPCYEKMEYKLLQEPYKMLPKVFFPKKRKAEYQAPQDLANKETRKNDSKKLIDFYKTNIPKYNNGDWRVFDFKFKNTNDYVDINDFYKDVEIQGYKITFKNISEKFINEQVENGFLYLFQIYNKDFSGYSKGTPNMHTLYWKELFSAENLKDVIYKLNGKAEIFYRKKSLNYDETILSKGHHAEVLKNKFKYPIIKDKRFAFDKFQFHVPITVNFKAEGRAYAKAFNEITNKFIKANNIQHIIGIDRGERHLLYVSVIDLKGKIIEQFSLNEIVNEYNGNSYKTDYHALLDKKEDERKSQRQNWKAIENIKEFKQGYLSQVIHKICNLIVKYNAIVILEDLNIGFKQSRQKVEKSIYQQFEKTLIDKLNYFVDKKKNKTDIGGLLNALQLTAKFESFKKLDYLKQSGFLFYVPAWNTSKIDPITGFVNLFDCRYENVDKARDFFTKFSNIRFNKEKEYFEFEVKDYIKFNNKAYETRQEWIICTSGTRIEFKKSNENNNWDCQEITLTDEFQKLFNPLYNNIAESDNYPSLQEIILQQNEKSFFEGLLHLFKLTVQMRNSKIGTDIDYMISPVANENDEFYDSREQKTELPTNADANGAYNIARKGLMLVEKIKEASDIKKINLVITNKEYLQFVQEKNK

SEQ ID NO: 238 - protein, 1068 aa, unidentified
  REGION 1..1068: note = Cas Enzyme sequence
MDKNFDDFKRLYPLSKTLRFEAKPIGDTLKNIIKSGLLEEDEHRAQSYVKVKKLIDEYHKVFIDRVLNEGCFTIENKGNKDSLEEYYESYMSKSNDENVSKTFKEIQENLRSVIANKLTKDKGYANLFGNKLIESYKDKDGTKKIIDSDLIQFINTAEPSKLDSMSQDEAKEFVKEFWGFTTYFEGFHKNRKNMYTSEEKSTGIAYRLVNENLPKFIDNMEAFKKAIAKPEIQANMGELYSNFAEYLNVESIQEMFQLDYYDMLLTQKQIDVYNAIIGGKTDEDHDFKIKGINEYINLYNQQHKNEKLPKLKALFKQILSDRNAISWLPEEFNSDQEVLDAIKDCYERLSENVLDKVLKSLLCSLSDYNLNGIFVRNDLQLTDISQKMFGNWSVIQNAIMQNIKKKVPARKRKESEEDYEKRISDIFKKADSFSIQYINDCLNEMDDNNLHAVDGYFATLGAVNTPTMQRENLFALIQNAYTDISDLLDTPYPENKNLAQDKTNVAKVKALLDAIKSLQHFVKPLLGMGDESDKDERFYGELASLWTELDTVTPLYNMIRNYMTRKPYSEKKIKLNFENPQLLGGWDANKEKDYATIILRRNGMYYLAIMDKDSKKLLGKTMPSDGECYEKMVYKFFKDVTTMIPKCSTQLKEVQAYFKVNTDDFVLNSKAFSKPLTITKEVFDLNNVLYGKFKKFQKGYLSATGDNAGYIRAVNVWIKFCMDFLDSYESTCMYDFSSLKSESYLSLDAFYKDANLLLYKLSFTDVSASFIDQLVEEGKMYLFQIYNKDFSEYSKGTPNMHTLYWKALFDERNLADVVYKLNGQAEMFYRKKSIENTHPTHPANHPILNKNKDNRKKESLFDYDLIKDRRYTVDKFMFHVPITMNFKSSGSENINQDVKAYLRHADDMHIIGIDRGERHLLYLVVIDLQGNIKEQYSLNEIVNEYNGNTYHTNYHDLLDVREEERLKARQSWQTIENIKELKEGYLSQVIHKITQLMVKYHAIVVLEDLNKGFMRGRQKVEKQVYQKFEKMLIDKLNYLVDKKADASVSGGLLNAYQLTSKFDSFQKM

SEQ ID NO: 239 - protein, 1069 aa, unidentified
  REGION 1..1069: note = Cas Enzyme sequence
MTELAGRLEDQRSPLATWCNDPKSDLPATEPTRKGSGGYDLKAAVLFSLRPDLDGFRDAFLLFNEARLREELTPRAKPDAAFIARMAGGIARPVFPFFCDLWAGKCNDEKVGQGIWPDFEKQAFGEVFTKIGQFIVRGRKFELRLAIANEAIARIEKQKESDVRLQAVERIAEALADELPDTAVDEHGQRKPYGVRDRTLKGWRRVRAAWREALKKTPNLSAEDLIKQKNRMQERQRERYGSAALFDRLAKEPEIWNHDGKEDALETWADYVENLEEKAHLEAERLFAPAHATLSPRFFRWSETNNKRHLAASTPETAFAFEADALDLIKKEKTQIKVHFWSPRLLRDGLRSRNEKLNKDEPDQTWLPPALRAFLKDRGWTCDKQTFEGASVRLAPRSRDNIQLVFEPELKAATLTKKWAEEVPFTPRMEKSDDEWVAVGLRWPKSKDDKLPWSERGEIKCLAVDLGLTNSAAWQLLQATAGDDSPTTMRLRHRLNPDSSEPPWHAESVANGIVRVAGEDRWVFRKINEQDRKSRDRKTRRALGKAGSHAAHTFLPELSGSAGRNAEPEETMEAELIFAKLKAKGYDIDESRRDWKARLSFPEQNDELLRGLKRVRAHLFRLNRLAEQFKNEPNSKFYQAGLAAIEKPRKGDPLSELTTMVADAKKLRTRVAELAEDYLKCLTEVLPEIADRILPVRRGHWAWRRREDGWHEMQLDQSTPRKDALLAGQRGISLARLKQLRDLRQLAQSLNHLCRHRTGERYEIRLGEMVPEPFEGCRQAMEDAREDRAKQIAHEIFATALGVELAPPPPDKQELKRTESLHGVYRCLDRGPVNFIALENLAHYRTSSKQGRRENRQLSAWAHRRVHKILDELCELVGLPIVLVPPEWTSHFSAKDHSAGFRAEEVRKSDPRIPFWREKAKEDNGSWWAQFVAMLDKLPEAGSLLLPKRGGEVFVSLKDDSPLYNADLNAAYRLGLRALAHRDRAELIGTVWIKKKAYLVDAAGVLPGSTLREGVMTNTKSERIWEQVYETLAWQRCREINRSRFENWGHAVIEGGAGACPDEEDDIPM

SEQ ID NO: 240 - protein, 1069 aa, unidentified
  REGION 1..1069: note = Cas Enzyme sequence
MDNYGGFTRLYPVQKTLRFELKPQGKTREHFDKSNFLEEDRDRAEKYKVLKNVIDNYHKKFIDESLSKLSLNWTPLKNASERYQKSKEEKDRKELESEQERMRKEVVSAFKKDHRFQMLFSEKLFSVLLKEEVIKKGDRKEIEALECFNRFSGYFIGFHENRANMYLDGNESTAVANRIVNENFPKFLDNSKKYQEVQKKYPERIKEAESALAAYAIKMDDIFSLENFDNVLRQEGIERYNLALGGYAPVTGIKLQGLNECLNKAYQTDPGSKRIRMTPLFKQILSDRESFSYIMEAFAGVSQLMSSINGFFTDIEKDEDGNTFDRAVGLIASYSSYEISNVYIRQTDLSKVSVEIFGRWDMLGELMRTFKAESLGDANTEKTSKKVDNWLNHESFSLSDVVDAISMSGLPESFDEYVSKMCVARNDIDGALKKIMCIKGEDPLDEESKLIIKTILDSVQRLFHLLSPFQVSADHLQDGAFYAEFNDIYEKLFAIVPLYSRTRDFLTKSNLSMKKIKLNFKNPTLANGWDLSKEFDNTAVIFLRDGKYYLGIMDPKKKKNIEFEEGSGDGPFYQKMCYKLLPGPNKMLPKVFFSKTHINYYNPSKEILEGYEAEKHKKGEKFDKEFCHKLIDFFKESIQKNEDWRVFDFKFSPTESYNDISEFYIEVEKQGYKMYFKNIPAIKIDEYVERGDMFLFQIYNKDFASGAKGKKDMHTIYWNAAFSEENLRDVVVKLNGEAELFYRDKSDINRIVHEKGDVMVNRTCNDKTPVPDKIHKELTDYRNGRIPNLSEEAEKYRDKVGFFTAYYDIIKDRRYLEDKMYFHVPLTLNFKANGKKNLNKMVVEKFLADKDAHIIGIDRGERNLLYVSVIDRNGKIIHQDSLNIIDGFDYHEKLSQREIERKDARQSWNSIGKIKDLKEGYLSKAVHEVSKLVLKYNAIVVLEDLNFGFKRGRFKVEKQVYQKFEKMLIDKLNYLVCKNVPNNTDAGGVLNAYQLTVPLESFSKLGKQSGILFYVPAAYTSKIDPTTGFVNLFNTSGISNYSEIKEFLSGFDSISYSVKDGGIFAFKFD

SEQ ID NO: 241 - protein, 1070 aa, unidentified
  REGION 1..1070: note = Cas Enzyme sequence
  VARIANT 1033..1036: note = X can be any amino acid
VFSKEDISTSICYRVVNDNAWLFYQNMKAYKEILNSEQMLKIENNYRDKFDGKSAEEIFSPEFYGLLMTQESITFYNDICGLINKDMNLYYQQNKQQKGKYLMKRLHKQILCVSESNFEVPKMFDSDKEVYDIINEFLVNANKKDLMRRLSNIANDITKYDFNKIYISNKNYETMSIYMYNNWKTITENLELHYDSIIKGNGESKKKKIQNLIKNDTFKSIKDLDDLSQQFYKGETYKKAEEYIRTVITLIEQCDISTLEYRDDIVLLENEQEAEKIKNKLDDIMNIYHWIKIFLVDEEIEKDMDFYSEIEDIYEELSPLVSLYNRVRNYVTQKPYSQEKMKLNFGSPTLADGWSKSKEFSNNAIIMLKDGKYYIGIFNIRNKPNKEVIEGRNNRINDSDYKKMVYRLLPGANKMLPKVMFSKKGIEYYNPSQYILSGYNSKKHIKSNENFDINFCHDLIDFFKESINKNEEWKNFDLKFSDTESYNDISEFYREVEQQGYKIEWVYISEQDIEQLEKNGQLYIFQIYNKDFAKKSIGNKNLHTMYLENLFSEENLKDVVLKLNGEAEIFFRKSSIKKPIVHKAGSILVNKCIEDETGNKVSLPDDIYNEIYQYMNGMTDVLSERAQNYYEKVKHSVSKQDIVKDYRYTVDKYFIHLPITINFKASSFMPINDIALKYIAKRDDIHIIGIDRGERNLIYVSVIDLQGNIVYQKNYNVVNGYDYKAKLRETEIQRDNARKNWKEIGQIKQLKEGYLSLVVHEIAQLIVKYNAIVVMEDLNMGFKRGRFKVERQVYQKFENMLINKLNYLVDKNKKVDEDGGLLRGYQLTYVPGQKEHVGKQCGFIFYVPAAYTSKIDPTTGFVSIFNNKVNAKEFMTKFDSIKYNKNMKMFELKFDYNNFETYNITLAKSKWTIYTNGIRLKREYNNGRWNKITEVDLTKEMANTLKKYDIEFENNEEILKSISQLDEKNQRNICNEIKEIIKLIVQLRNSMPDNGSKDNEYDKIISPVLNENNYFYDSSEVCDNSAPENADAXXXXGILYSDEGIVSGYTDKRKLESGQQSKEYFGNKTL

SEQ ID NO: 242 - protein, 1070 aa, unidentified
  REGION 1..1070: note = Cas Enzyme sequence
EKSTAISYRCINENLPRFLDNVKVFINSDISVFLADKLKKLNEDFHGIYGTKVKDLFSVDYFPFVLSQTGIEKYNSIIGGYTNTDGNKIQGLNEYINLYNQQISKSNKETKKIPKLKPLYKQILSERESISFIPEKFDSDDELLEAVNAFFKERKEVSSIAESLKKINELFSKISSFDLDGIFVKNGLELTAVSNGAFNYWGAVQDGWNREYDSLNKKNDTQAYIEKRSKVFKNIDSFSLADIQRYAESDELCSWIKDEIEKKCSAVVEAYSVAQSLLESPYSSSKKLYANDEAVAKIKDALDAVKALERTMKLLLGTGKEYGKDEVFYGEFLIHYERLCEVDGLYDKVRNYMTRKPFSTDKIKLNFDNPQFLGGWDRNKETDYSAVLMRKDGQYYVAVMDRGYKKSFENIPDVNNGEAVYEKVIYKLLPGPNKMLPKVFFSKKGIETFNPPEDILKKYELGTHKTGDSFNLKDCHNLIDFFKSAIAVHPDWSQFDFDFSDTASYRNIGDFYNEVKNQGYKISFCDVPVSYVDSLVNEGKLYLFRLYNKDFSEHSKGTPNMHTLYFKMLFDERNLSNVVFKLNGESEMFYRKASISKDEMIIHPKNQPISNKNAQNEKKQSIFEYDITKDKRYTVDQFMIHIPITLNFTANGNGNINLDVRKALKDCDENYVIGIDRGERNLLYVSVINSKGKIIEQYSLNEIINEYNGRTYSTDYHALLDAKEKERLEARVNWKTVENIKELKEGYISQVVHKICQLVEKYDAIIVMEDLNFGFKRVRGGKFEKSVYQKFEKMLIDKLNYFADKKKAPEEIGSVLNAYQLTEKFESFKTMGKQNGFIFYIPAFLTSKIDPTTGFADFLHPRYESVSASKSFIESFDSISYNSQEDYFEFALDYGKFKNKTSYGKKKWTVCTYGNRIETFRNPDKNNEWDNREVNLTEEFKKLFEKYSVDISADIRTQILTHDEKDFFTALIKLIALTLQMRNSITGNTEVDYLISPVKNASGRFYNSDDYKGMTDAPLPTDADANGAYNIARKGLWIIGQLKACSTEKELKDVKLAITNADWMDYAQNI

SEQ ID NO: 243 - protein, 1076 aa, unidentified
  REGION 1..1076: note = Cas Enzyme sequence
TAVATRIVENLSFFLANKSKFEKFLAYKDILKLTDQEKESSKTEYYMRCMTQPGIEKYNALVGDLNARMKTLRDTAGKDAKKSDYPLLKKLYNQILAEKKIESDKVFDIESNEEVPVRMHEFYEEVERVSTIAKELVTILAQGGFENEYGGIYLHNRAINTIARKWFVSAYEFENCLPQKGKKKEGSVRVAPFVSFAEIKDALGEKLAEDLLKEKLFEEKAYRLVKRTLAYSQFLALFAKDLEILLNEYNEKKNNFSKKDLRIFERGENDENVDALKDALDAGLHIVQFMKYFVLSSKKADDKPTHTSAEFYNHYDELYGDPDQKHDIVRYYDAFRNFLTKKPADQKKIKLNFENGALLTGFDKDKESEKLGIILRKNSIYYLGIINKEHNKIFDDKKHQDAFDVVDATSYEKMEYKLFPDPKRMVPKIAFAKKNRERFGWTQEIQDIKDEYARFQDDRGDRSNWSKQFDKIKLTKLIAYYQHALDRGGYKNTFDFQWNNPVDYSGIGEFNDHLTSQNYKIGFRQVRQRYIDDKVAQGELYLFKIHNKDFGEKSKGTQNTHTLYFLNLFSQHNLTHIKLRLAGNAEVFYRKSSTQRKEEQRKFIRPIVKNKRFTEDKYFFHIPIKIGASVNSISETKFNRTLNEKLRQSACLIIGIDRGEKHLAYYSVINQKGEIVDQASLNKINDVDYCEKLRTREKERLEQRKSWKAISQIKDLKRGYISQVIHKLSELVIKHNAIIVFEDLNMRFKEVRGGIERSAYQQLEKALIEKFGYLVFKDKGPLEAGGVLNGYQLSAPFESFEKMGKQNGVIFYTNPEYTSTTDPVTGWRQHIYIKSDATDNEALKVFTEKIGIGWSDDKQSYTFSYDQKDFWEDSPARKWVLYANAPRLERYRNDAGYWTTRETNSNDLLRKLFEVWDFDQPEGDISEQIAMMYEEGKLKGEKIISEKSQRFFKALRYALNLTQQIRNSDSIRYVYERDAQGDIVEDSQGKMVVKEIGENVDFIASPVVPFFTTPNPYTKENLCGLVIENGDANGAYNIARKGIMMLERIKQTQANPDLYISKSDWDEWLMKDIKQK

SEQ ID NO: 244 - protein, 1078 aa, unidentified
  REGION 1..1078: note = Cas Enzyme sequence
MSVKSIAVKLVIPRSPGGVAIRRACAETHIIHNAGVRYFMENMLWLRQEDIYEDRDSVRPTRTRSFCQERLLRLAREVQRRNGFGKKASDPEILRLLRGVYEQIIPAAIGESSDNQAIARDWLGSLVSKASEAGLGKSARGRKPAWTELPDSDPRKSQRKHAYEERKKEQKSSQLRPRLKELGLLPLIPMFRSHSGYEWARVETKGKIQPWKDDNVSNWERDMFQQALERLSGWESWNKNAVERHRKAKETLTAWDRAHLQDSETWRPIFARYEASRRGELELGPLGLKRPFRIGRRMLRGWDRIREKWIDVLKKNHSISETDLLDFAKRWQQAHPREIGDMHFIAYLARPQNRAVWSGDHDYVVSQVHHNLLLIDSEEAHPWTILTLPHACIHPLWPRLDVPMGTNMNDYLIARGEDGGWHLTFSLLFPDGKRLTEKRLTLPVAHSGQLDYVRPVADSGRNLILRDPGTDEEFQGKWGGASVRRDRNLLQKLEDESAMRKAACGPVYISLTVDLMDRKGPSTKGFKKTPRGLAGEQFLIGIKEDSSANEILAIQNLGCLSIDLGLRQAAACSVFRMRTKPAQGRSSVPIAGLKRSMEHERSFLLALPGEQADEAVEDKRQKLWDELKKLSDSLGQLNRLIRLSGADGDSRSEGLAALEETETSIFDLKALAALKPKMDLGAVAWRGEVKRIHRCWEKDFAKALAGWRKSGTRDQKGRSRQFGIWGLSLEGIAYLERVRRLLIRWTTHPRKAEETNRLEKNRPFAARLQRHIDALKEDRIKKAADAVVMAALGYITEGEERKEKFEPCSIILVEDLERYRFRTDRPRQENSKLMQWAHRALFREIARQAGIFGIAVGKVGAGFTSRFHAATGAPGLRCAAVTKGLLRKPWFLKRLEEDGLDASSIQVGDIIPWERGKLFCTIDRAGKPVMIQADINAAQNLQKRFWANYDEPFRVVCAAGAADTFVPLPGKRLARFFASKMLAAVKPGDSPAYELVQAKVGRVEKQAVEEEGSMREEFPERLHEEDEAASARKTIFFRDPSGALLPAIRWYESKVFWSQVKQKVRQALLRPRKTAVTL

SEQ ID NO: 245 - protein, 1078 aa, unidentified
  REGION 1..1078: note = Cas Enzyme sequence
KGFNTNRENMYSSDEKSTAIAYRCINDNLPRFLDNVKSFQKVFDNLSDETITKLNTDLYNIFGRNIEDIFSVDYFEFVLAQSGIEIYNSMIGGYTCSDKTKIQGLNECINLYNQQVAKNEKSKKLPLMKPLYKQILNEKDSVSFIPEKFNSDNEVLHAIDDYYTGHIGDFDLLTELLQSLNTYNANGIFVKSGVAITDISNGAFNSWNVLRSAWNEKYEALHPVTSKTKIDKYIEKQDKIYKAIKSFSLFELQSLGNENGNEITDWYISSINESNSKIKEAYLQAQKLLNSDYEKSYNKRLYKNEKATELVKNLLDAIKEFQKLIKPLNGTGKEENKDELFYGKFTSYYDSIADIDRLYDKVRNYITQKPYSKDKIKLNFDNPQLLGGWDKNKESDYRTVLLHKDDLYYLAVMDKSHSKAFVDAPEIASDDEDYYEKMEYKLLPGPNKMLPKVFFATKNIDTFQPSDRILDIRKRESFKKGATFNKAECHEFIDYFKESIEKHDDWSQFGFEFSPTESYNDISEFYREISDQGYSVRFNKISRNYIDGLVENGYIYLFQIYNKDFSKYSKGTPNLHTLYFKMLFDEINLSNVVYKLNGEAEMFYREASIGDKEKITHYANQPIENKNPDNEKKESTFEYDIVKDKRFTKRQFSLHLPITINFKAHGQEFLNYDVRKAVKYKDDNYVIGIDRGERNLIYISVINSNGKIVEQMSLNEIISDNGHRVDYQKLLDTKEKERDKARKNWTSVENIKELKEGYISQVVHKICELVVKYDAVIAMEDLNFGFKRGRFPVEKQVYQKFENMLISKLNLLIDKKADPIEDGGLLRAYQLTNKFDGVNKAKQNGIIFYVPAWDTSKIDPATGFVNLLKPKYTSVPEAKKLFETIDDIKYNANTDMFEFYIDYSKFPRCNSDFKKSWTVCTNSSRILTFQNKEKNNMWDNKQIVLTDEFKSLFNEFGIDYKGNLKDSILSISNADFYRRLIKLLSLTLQIRNSITGSTLPEDDYLISPVANKRGEFYDSRNYKGTNAALPCDADANGAYNIARKALWAINVLKDTPDDMLNKAKLSITNAEWLEYTQR

SEQ ID NO: 246 - protein, 1079 aa, unidentified
  REGION 1..1079: note = Cas Enzyme sequence
LQTIWKESKGKPKLEAPATSGSNEDSQIPNFLGDPRIARLREIVNKDLAEEYRLTEGRDTPYGLRRRTMKGWSDVRRKWQTIVKAGASFSEAKKEKLQKALDDLRTDKPEQIGSHRLYEALITSEESWRIWREPTDEEAEQIVRRGWASDPLESFRIYCETKETLEDLVRRKLNFTPADARHSRRLFSFTDACSSFGNPGGEFKHDPKALAVTVPISAINAQGRFERTTIRAIYAAPRMLRDQIRAMDGRYVQRWVQPMVAALCPATTSLPTQKELAAAAVELMPDWDKDDQRRFLLNFALDLSPVDLWKRIYELRGQAQQFGTRFSPRDRKRETPLHAGLWEASIRTFWEGDAPRLRDVLLWPTDSFKKQAWHPAPWWEQVNSFRVLSGDLGTRHAAIIALVEASAGEPDKPSTARFIGEAGGRKWFAQYRTGKILRLPGEDGQSYRHQTRLDVERGESPLDRKHDKAFREELHGARGRLAGDDETKQFRNIVRDLGYEDLLPEACRPETALPRLRSQFSFPEQNDKLLVALRWAQRHIADLISQHWRLVKPEKPAQTAVALKELREQKRYPEVAKMAADPAQADELIRFVHSRITELRQVVQEHLLALTGRILPLRERSWEFVAHPQTDHFSGCHLLQPTDRGTGSKNKKLPGQRGLSMARIEQLSELRRRWQSLNQSLRRPIGEPPLTAAEMRANPIPDPCPHILRKLDDIREQRVNQTAHLILAEALGVRLIAPEKDPREREEADIHGEYVSLRPPVDFIVLENLDRYKAAQGRAKSENSRLMQWCHRAVVDKIKELAEPFGIPVLETPAAYSSRFCSLTGIAGFRAVEVGLPDRDDYRWRKLLREADERGEVASDGAKAARRLFSSLEQANAGRVGKQLRTLLAPQVGGPIFVTATAVPHPTARNEHKSSPTLVPPMQSDLNAAINLALRGMAHPDRADIHHRVRTERVNPKEANQKQIAASSVFRTREKRRFGEQQPQIVTAPGDSLPRERNSNLFYDPWSVALFGRARWDSEPEGSFSYASGPGLWKRVNDSAFQWQRCEEINRQRMERLGFKATSKAQVRGLEAEEDDISM

SEQ ID NO: 247 - protein, 1079 aa, unidentified
  REGION 1..1079: note = Cas Enzyme sequence
ARRVNVAHSWIKNAEAERRQFEADAQRMGNVPPVALAWLESYCADRAKSSGAIESYRIRKRAVDGWEQVVERWSRGDCKTPEDRIVIARALQDEIEKFGDIQLFESLAADTAECVWKRSGMPSAQPLKDFVFATDATAKKLRFKVPAYRHPDPLRHPVFTDFGNSRWDIEFSAHRAPTELGGLTQKVATQTASLAAHQEKRNTVNAAKRESLDKRIIGLRDDLERTRQQHASMADRHHVALRLWNGKTVETAAMRWSSKRLIADLSLNPSEGVREESAISVTRADRLGRAAAGVGETVGVSIAGLFKEDDWNGRLQAPRSQLDAIARRVDEHGWDAKAQTMVQRIKWLLSFSAKLTPQGPWTTFAERLGLKPQPQYWPHAEANKKRQGHGRLILSRLPGLRILSVDLGHRFAAACAVWEAMTTGQVQDACRTAGVTAPSADAMYLHLKGQNAMGRDSTTIYRRIGPDVLPDGSVHPAPWARLDRQFLIKLQGEDKTARKASPDEIHAVEQFEAWAGRLRGIADPPRKLAVDALMSETVRTARLAIARHLRRARIARNLIAVTESPRGNNQPRPLTDDARLKLLRDTLFDWHSLSTDDRWDDSAARRSWNERMATLADDFQVQRSQSPPAGSEPSKADRKKEEESLRNRLEPLAKTLAAAPKLRQELHDEWALRWHHDDREWQKKLKWLSRWLMPRGGERRDASRRHVGGLSLVRLGTLTEFRRKVQVGFFTRMKPDGSRDEFGPHFGQSTLDAIEKLKDNRVKQLASRIVEAALGVGIEHPGANGRDLQRARQRINDPRFAPCHAVIIEDLSHYRPEETRTRRENRATMDWRSAEARKRLEDACQLHGLHLRDVNPQYTSRQDSRTGAPGARAVEVQAKTFLTWRKQIAQAERKRQENKGDARDTMLLDIHARYKDAIGSALNDRLCIPLKGGDLFVSSDPKSPAAAGIQADLNAAANIGLRALMDPDFSGKWWYVPCDPKTKIPKADKVKGGLLDNVGPLAPATIENQNQKSAKVSKSKTREVINLWRDPSALPITGAEHGDLWSDTIAYWNRVQMDVVKVLSGQRSKPGYALEELPF

SEQ ID NO: 248 - protein, 1080 aa, unidentified
  REGION 1..1080: note = Cas Enzyme sequence
DGTSTAVATRIVENLSFFLANKSKFEKFLAYKDILKLTDQEKESSKTEYYMRCMTQPGIEKYNALVGDLNARMKTLRDTAGKDAKKSDYPLLKKLYNQILAEKKIESDKVFDIESNEEVPVRMHEFYEEVERVSTIAKELVTILAQGGFENEYGGIYLHNRAINTIARKWFVSAYEFENCLPQKGKKKEGSVRVAPFVSFAEIKDALGEKLAEDLLKEKLFEEKAYRLVKRTLAYSQFLALFAKDLEILLNEYNEKKNNFSKKDLRIFERGENDENVDALKDALDAGLHIVQFMKYFVLSSKKADDKPTHTSAEFYNHYDELYGDPDQKHDIVRYYDAFRNFLTKKPADQKKIKLNFENGALLTGFDKDKESEKLGIILRKNSIYYLGIINKEHNKIFDDKKHQDAFDVVDATSYEKMEYKLFPDPKRMVPKIAFAKKNRERFGWTQEIQDIKDEYARFQDDRGDRSNWSKQFDKIKLTKLIAYYQHALDRGGYKNTFDFQWNNPVDYSGIGEFNDHLTSQNYKIGFRQVRQRYIDDKVAQGELYLFKIHNKDFGEKSKGTQNTHTLYFLNLFSQHNLTHIKLRLAGNAEVFYRKSSTQRKEEQRKFIRPIVKNKRFTEDKYFFHIPIKIGASVNSISETKFNRTLNEKLRQSACLIIGIDRGEKHLAYYSVINQKGEIVDQASLNKINDVDYCEKLRTREKERLEQRKSWKAISQIKDLKRGYISQVIHKLSELVIKHNAIIVFEDLNMRFKEVRGGIERSAYQQLEKALIEKFGYLVFKDKDPLEAGGVLNGYQLSAPFESFEKMGKQNGVIFYTNPEYTSTTDPVTGWRQHIYIKSDATDNEALKVFTEKIGIGWSDDKQSYTFSYDQKDFWEDSPARKWVLYANAPRLERYRNDAGYWTTRETNSNDLLRELFEVWDFDQPEGDISEQIAMMYEEGKLKGEKIISEKSQRFFKALRYALNLTQQIRNSDSIRYVYERDAQGDIVEDSQGKMVVKEIGENVDFIASPVVPFFTTPNPYTKENLCGLVIENGDANGAYNIARKGIMMLERIKQTQANPDLYISKSDWDEWLMKDIKQK

SEQ ID NO: 249 - protein, 1080 aa, unidentified
  REGION 1..1080: note = Cas Enzyme sequence
DGTSTAVATRIVENLSFFLANKSKFEKFLAYKDILKLTDQEKESSKTEYYMRCMTQPGIEKYNALVGDLNARMKTLRDTAGKDAKKSDYPLLKKLYNQILAEKKIESDKVFDIESNEEVPVRMHEFYEEVERVSTIAKELVTILAQGGFENEYGGIYLHNRAINTIARKWFVSAYEFENCLPQKGKKKEGSVRVAPFVSFAEIKDALGEKLAEDLLKEKLFEEKAYRLVKRTLAYSQFLALFAKDLEILLNEYNEKKNNFSKKDLRIFERGENDENVDALKDALDAGLHIVQFMKYFVLSSKKADDKPTHTSAEFYNHYDELYGDPDQKHDIVRYYDAFRNFLTKKPADQKKIKLNFENGALLTGFDKDKESEKLGIILRKNSIYYLGIINKEHNKIFDDKKHQDAFDVVDATSYEKMEYKLFPDPKRMVPKIAFAKKNRERFGWTQEIQDIKDEYARFQDDRGDRSNWSKQFDKIKLTKLIAYYQHALDRGGYKNTFDFQWNNPVDYSGIGEFNDHLTSQNYKIGFRQVRQRYIDDKVAQGELYLFKIHNKDFGEKSKGTQNTHTLYFLNLFSQHNLTHIKLRLAGNAEVFYRKSSTQRKEEQRKFIRPIVKNKRFTEDKYFFHIPIKIGASVNSISETKFNRTLNEKLRQSACLIIGIDRGEKHLAYYSVINQKGEIVDQASLNKINDVDYCEKLRTREKERLEQRKSWKAISQIKDLKRGYISQVIHKLSELVIKHNAIIVFEDLNMRFKEVRGGIERSAYQQLEKALIEKFGYLVFKDKDPLEAGGVLNGYQLSAPFESFEKMGKQNGVIFYTNPEYTSTTDPVTGWRQHIYIKSDATDNEALKVFTEKIGIGWSDDKQSYTFSYDQKDFWGDSPARKWVLYANAPRLERYRNDAGYWTTRETNSNDLLRKLFEVWDFDQPEGDISEQIAMMYEEGKLKGEKIISEKSQRFFKALRYALNLTQQIRNSDSIRYVYERDAQGDIVEDSQGKMVVKEIGENVDFIASPVVPFFTTPNPYTKENLCGLVIENGDANGAYNIARKGIMMLERIKQTQANPDLYISKSDWDEWLMKDIKQK

SEQ ID NO: 250 - protein, 1080 aa, unidentified
  REGION 1..1080: note = Cas Enzyme sequence
DNLPKFIDDLNIFEQIQKENLVIIENFRTALLEMEDMTQGLELEELFSLNYFNETLSQRGIELYNTILGGRIVEEGKDKIKGLNEYINLYNQQQNDRKKRLPKFKQLYKQILSDRNSTSFVTDQFQNDSELLESIEQFYQSGICNYESDGNTVNILLSLQNSLRSLNTFDLSKVYLKNDRSITDISQSVFGDWNVIKSALSDYYESRFPINAKEKIAKYEDRKDKWLSKSTCFDINTIQTALNEYKNDNITIKDRGNELINYLASCGYDLQTNLNLVEEISKRYADIRDLLNNTYPDQENLKNDKKNIGLIKEFLDSLMDFIRFIKLLNVNEEGLEKDQTFYSLFEPLFDQLSKTISLYNKVRNYLTGKPYSIEKIKLNFENSTLLDGWDVNKEADNSCVIFRKDGLYFLGVMDKKNNRIFERNVPECQELDTAFEKINYKLIPLVNQMLPKVFLSKKGINTYNPTLEILENYKNQTHKKGPNFNISHMRTLINYFKESISLHPDWKEFGHQFSDTESYEDLSGFYREVEHQGYKVTYKSIDTSYIDQLVDEGKLYLFQIYNKDFSPFSKGTPNMHTLYWKMLFDEDNLADTVYKLNGQAEIFFRKSSINAKNRVIHKAGEAIKSKNDLNTKKQSTFDYDIIKDRRYTLDKFQFHVPVTMNFKSTGTENINEKVNRYLQNNPDVKIIGLDRGERHLVYLTLVNQKGELLKQESLNVISNEKQKVNYKELLQKKEGNRTQSRKDWSTIENIKEIKEGYLSQVVHKIATMMVEENAIVVMEDLNQGFMRGRQKVERQVYQKLEKMLIDKLNYLVFKSARATEAAGLLKALQLTSKFDTFKNMGKQSGFLFYVPAWNTSKIDPATGFVDFLKPKYENIEKAKDFFKRFQKIRFNPEKNYFEFHFHYNDFTTKAEGTKTEWVACTYGKERYAWNRKLNLGKGEMEKIDVTESLQLLFHDFDTSYTMGNNLIQDISEQNNADFFKRLIRLLSITLNLRHSNGKKGIEEKDFILSPVSNNQGVFFNSENADETMPKDADANGAYHIALKGLWSLNQIGKADDLKKIKLAISNKEWLQYVQEKPFKK

SEQ ID NO: 251 - protein, 1080 aa, unidentified
  REGION 1..1080: note = Cas Enzyme sequence
LSFEAIQQNHKDLAKQLKDYEGIFARTSFKGYLGQTGIDGYNEKIGHKSDDINAKGVNQIINEYCQQNSTKDKKIKLPKMAILYKQILSDVEDKFKIDAFEDDRQMLETIQQFYLDIKDSLEGIKTCLGQYLTVNNIAKIFLKKDSLTDISQKLWGNWGFINSALEKHADETLKLKKKKKEEWLKNDCYAISEIQQALESYCADFEEKTYKKKLADYFTDFKVYDKDKEKGKCLIDCIENAHRHAHEVLLLNELDKDRREPTNGREGGKGFLQVEKIKELLDSIMEVVQFARPLYLVKSGKAIEVSDKCPDFYDTFDGLYRNISACISIYNKTRNHVTKKPYSIEKFKINFENSTLLDGWDINKETANSGILLLKDGRYYLGIMRKDTRNLFDYNLNDDDSTNKKGKKERLRHEILSDGRDSYYLKMRYKQVSNASTDIQNLMFTENGVRRFTKNLDRLKEKYLPANVNQIRTKRSFNKGDSFNKDDCIKFIDYYKQCAKEYWTWCNFNFKNSEEYEHFKDFSDDIDRQGYQLSFDKIKASYINEKVKAGEFYLFEIYSKDFSSYSKGRPNLHTSYWKLLFSPENLNDLVLKLNGQAEIFFRPTSINKNETPVHKARQSINNKNQLNPKKQSSFDYDIVKDRRFTADKFFFHCPITLNFQSPSGTAKGFNYKFNDYVNEYLKNNPDITIIGIDRGERHLLYYSVINTNGQIIEQESFNTVSNKYNSNGKDIDVRTDYHKLLDDKEKQRGAAQKSWSTIENIKELKSGYLSHIVHKIASLMINKTAIVVLEDLNKGFKRGRFKVEKQVYQKFEQTLIDKLNYLVFKNNKPGQAGHYLSAYQLTAPITSFKDIGKQSGFLFYIWPNYTSKIDPVTGFVNLLGAAYESVKKSQEFFRKFDNIVYNAQKDYFEFSFNYANFPPDKSGSKKDWTVCTAGKERYRYDKDKKEYVCYDVTAELKRLFKENNIDYKNKNSEYLKNAIANKEDKAFFKRLHFLLGLTLQLRHIYKDGDEEKDFILSPVADKNGIFFDSRKARENQPKDADANGAFNIARKGLIVLNQINEKGRPQTTKNTEWFDFAQKG

SEQ ID NO: 252 - protein, 1087 aa, unidentified
  REGION 1..1087: note = Cas Enzyme sequence
KFLKDNDKITQIKDTQTNGVIEASPIDEKVFEIVKFSECLSQQGIDEYNRIIGHYNLLINLYNQARKDEKYFRKLLPFKTLYKQIGCGEKKAWFYALKYDTRKQQDAKEKTEAILNLEETLNQISKTGKKYFVKSSDESEVITFHRFINWLRRTDDWNGIYWSKAAVDKVSDRYFSNWHDIKDRIQQGLQGKDKKLKEICETIASYKKNREEQLKINDAVELSGLFEVLNQEKDKGWSKTLFKESILEDRHSLINEELTPSRNLINLICHDMEGFASDFCNNSTKILETTDFKNETNILEIKKWLDNAKSLIWIVKYFDVKESKVKGTTINPELTDMLIALLRSDDTKWFDWYDAVRNYVTKKPQENAKENKLKLNFGNPILLGGWSDGQEKSKGSVLLKNNNKYYVGILDERSLFDTAKKNNPVYVNSGKGAGRLILKNLAFKTLAGKGFVRDYNEKYSDMGKRNPNETIKKLQDFIKKNYVSQYKPLEQVVGKEYSNKKDFDNDIQHILTECYECNFTPINWDIVLQNVSNKKLYLFEIYSKDFEEKSTGKPNLQTKYWEHIFHNNSTIQLCGGGELFFREKAITDDKKVVHPANLPIKRRSDGKTESRFSHDITKDKRFTTEKYFFHVPIKLNYRTSSKLNVNEKVNDLFIQANDIQFLGIDRGEKHLIYYSLVDAKGNIIEQDHFDVVKGKDYLQEINEAAKKRREKQENWQQKGQIKNLKDGYISLVIHEIIQKMKDKDGQLKPTFIVLEYLTPGFKRGRQKFEQQVYQKFELAMAKKLNYLVDKNVADGEIGSVGKALQLTPPVGTYQDIENRKQLGIMLYSRANCTSITDPATGWRKTIYLKKGKDEDVKKQVLETFSEIGMDKNGDYFFEYEDKDTKNKWKLWSGKNGKSLERYRFRWGKSKNEGIIESYTTKEMLDKLFEDFDKEKSLLEQLKGNKTLAKIDDKNTAWESLRFVIEIIQQIRNSGDKSKNQDDNFLLSPVRNDLGEHFDSRKYPDQQNPNMPKDADANGAFNIARKGILMYEHIKQWIRIGKPKFEKTTDLNLFISDTEWDLWLLDRPKWREQLPMLASRNAKKKEEK

SEQ ID NO: 253 - protein, 1092 aa, unidentified
  REGION 1..1092: note = Cas Enzyme sequence
QGINSRTTPILNGEVLTDLLTIRNYNRFLSQSGINLFNRIVAEINYEVNRYRQNPLEQTKKVRFLPFLFKQILSDREQTFAVKAFADGTELLSALKDFVLRNQKMKIRGETVDLFDSLRRVLATLKDDDDLFIDSSEMGRISSRLTGSWSTFLDSAAAYAKATLRSKAKIDKYCKQDVFHFRVIQSWGIEQYEKDGSSSPLSLSTYWKRDELADLFEQEKSKRNEILDLAKKGDADRLREREDDVRIIKEYLDTVQDILHDVKPLAVDDKYGGDLDLKGILMGHYLPLKEAFIPLYNQTRNFILKKNADVPKIKLMFNNPVCAKGWPDPQTSSCVIFRKCHEFYLGVLSDKARSCLNSYEPNEESALEIMNFRQMADPSQDLPTLMQIDGKTVRKTGRKDKKSGKNFILEELKKRYLPEAINRIREKESHMKNSPAFSKEDLAAYIDFYKDRIIEYKPDCKFKFKPSEEYSKWEDFTNDLDAQAYQLNFFPISESFIMQLVDEGKLFLFKIWNKDFAPKASGKPNKSTLYWKAVFDPDNLSDVVFKLNCEAELFLREPVIHEPKAHRCGEKMVNRTIASLQNGQTVRTPIPEDVYGEIFQYVNGKCKSSDLSKEARCLLEKRLDWEKGMQFEDTLGRLVVKNVTHEIIKDERFTKRKYFFHVSLEINFKSPKGKGVKFNDLVRDYLRNNPDVKIIGIDRGERNLIYLVLMDQNGNILQQKSYNIISQKLYNSLVVNVDYHAKLDQRQKERDAARKSWKEIGGIKDLKAGYLSGIVYEISRMMIEHNAVVFLEDLNGGFKRSRTKIEKQVYQKFENALITKLNYLVFKDTDDHRSPGGVLNGYQLTPPQENISQRSTQCGFIFYVPAWCTSKIDPVTGFVNLFGSEWLQWKNIEHARDFFTRFDSIRYLQDEDLFEFSFDYKNFNDQAADTRTQWKVYSIGERIESFRKHENQNQWDSRTVQLTDAYKKLFTDSGIDINGDLKAQISSSSAGQKFWYDLLQLFKLTVQLRNSRPNSTASEDDYILSPVRGPDGTFFDSRKGLKNLPGNADANGAYNIARKGLLLLQQLNAAADPVKVKFDLQRKPWLNFVQKR

SEQ ID NO: 254 - protein, 1093 aa, unidentified
  REGION 1..1093: note = Cas Enzyme sequence
MATRAIKLKLVVPRGDSAEAVADRTALWTLHVATNRAVAAYEKWLLEMRQGDVCLAGADGTDQLRPAESWREALRRRLTRQGVRADDLDEASAKLHDLYRDLVRSFDKPNQGSGQDSSKWHSALCSVDSQAGEQKFELLERWNWLVADDAPPPQWRERLEAQHAEIMAFRPTGSPPTWRRRINSGDPTWPDAFLADLQKKRLEVESDVARRLRQLKALPLLRPVIELDMARGDLNPYDRSALALAVAHLNQWESWRHRVEARRQDFERRLQEADELGQRFADVLPKLRAFEAVRSEQIAAHAFWSEVSTYRITLREIRGWERLRTWIRANPDANSEARAAQVQELQRRGSRDAGATEVLQWLAERHQQDLALHPQGDPVIWLAVRNRIDERLSTAQSVPRFTYADARKHPRFVELDAPTNSNRPKYELSIDGSGLLHVAIPGLLPTGAGYREHRVYLPLAPSQQLREAKLGPSGKKNGQRISFRSQDNLDRSDTILRGAALIFDRSEIERLSGDAFGRAYVKVALDHDKHTDTFKINDRLARYLKGATSTRKEKHAHPTDVRVLGVDLGLRTAAAGAVFRWSGPNTDPAHERSFLLRLPGEDPDPAEIARRQRADDALDSAKRAVERLRDIGRLLRTDDVTTRTVRLESLRATWPSDAPPLPAVGDEPELRNVWELTEAAAGSAVHDLVAVHRDQREAPHHAPVGGKSVWRIEHLERTLRLLRSWDRRQHPDDADVKRFDRARAGTVGGRLFTHITALREDRVKATADLIVQAARGCVYRNGRWERRFDPVNVIVLEDLARYRFRTDRPRRENSQLMRWSHRALAGQVRMQAEVYGIAVDEAPPEFSSRYDAITGVPGVRCHCLRKRDLAELAAKGESHWLARRLGTMKRQETTPSSGPPPQARRSLLDLKTLCTLPPGSLLPTGDGEHFVYPTPNGLSVKHADLNAAQNIACRYLTGFAEPVRVVAYEVPGSAGARLTRRELGKRLGSWFQGKAAVFEATDDGFVGKGVSSSTELPRAAGGTPTVEATEVDHDDDGLTEELAESRTERRVLFRSPGGVIFDPRRWYEQAAFWGRVNRVVQSRLEKTGWRAGG

SEQ ID NO: 255 - protein, 1094 aa, unidentified
  REGION 1..1094: note = Cas Enzyme sequence
MKEQYAISKTLRFELKPIGATLENIIIDKDKGRADSYAEVKKLIDEYHKSYIDDMLKGIKFTEQELKDCLGDEKAAKMLCKRIGNCFHFDGGELLNKKDKLLLKYLQDNCLDNEENVDRVKEFDNFATYFVSFNKIRENIYSPEGKAGSVAYRIIYDNLPRFKWNCENLVKITESGICIPSDLFCLSHFNECLGQSEIEAYNKTIGEYNSRINEFGQKNGLKLKPFKVLYKQILSDRANNALYESFETKEQLVQAVKDFCQECKTVLDGTVDIDQSGASINKDKLATISHRVFGNWEYLGGLLNKQTKKQDKFEFQYLLGLVDDEGKDKLCKELNSIKQLRADAVGAMKNITYENIKTVLDAIKRVQEHMHIFNIETDYEIIEKVIALYNRARNFVTKKPYREEKIKLNFDNYNLLGGWDENKIVDSSGVILRKDGLYYVGIVDKKHNKLFKGVPTCQSGECYEKMVYKLIPGAAKMIAKCAFPSKSIPRKYLDGISDDNYEEIKEIYEDYTYKKERDPKHQYGEQDLKKITDFLKIFLPRYYSYITEWNFKNKYESYREFIEDVERVGYNVSFTPVASSFIDDAVREGKLYLFQIYSKDFSSYSKGMPNLHTLYFKSLFCAENLKSRTHKLSGGAEIFWRPKSLPYKVTHKAGEPTQSKRLETKGKMNTPKYDLVKDKRFTEDKFFFHVPIELNRGCNNERISPVVNDIVQKQGKKVNVIGIDRGERHLLYLVLIDGSGKIIMQKSLNEIVSVYNDREFKTDYNALLADREGEQKKARQDWTEIGNIKDLKHGYMSQVIPYIVNMAIENNAVIAIENLNMGFKNSRIKVGKSVYQNFEKALIDKLNYVVSKDRDEKCAIGGLQLANKFESFEKLKGQSGILFYVDPKYTSKIDPTTGYIPTVNLSFVNIDLARKLIAGFKDFRFNDKKDYFEITTKDYTICTHGIRVANVKDGKDFKSEKINVTQELKDLFVKNNIDINGNLKQQLQTVQGADFYKTLLWLLKIAFGVRNSYTGTTEDYILSPVMNKHGKFFDTREYAKMKDPTMPTNADANGAYNIAMKGLMGLRQIQEYGDRKFDKGKELEKWLEFVRKCN

SEQ ID NO: 256 - protein, 1095 aa, unidentified
  REGION 1..1095: note = Cas Enzyme sequence
HENLSKFIDNIKIFEKLKNNAPELIEKLNSVLRDMKEIIKGNTLEEIFSLDYFNETLTQNGIDLYNTVLGGRTANEGKIKIKGLNEYINTDYNQKQTDKKKRQPKFKQLYKQILSDKQSLSFIAEAFKNDTEVLESIEKFYTNELLTFTTEGKSINVLEALKNAAINLESFKLSKIYFRSGTPLTDVSQKVFGDWGLINRATQDYYGRTYPMKSREKSEKYEERKDKWLKQDFDISLIQTAIDEYDNEIVKEKNNGKIITEYLAGFCDDKGTDLIQKINQSYEAIKNLLNTPYPENDKLGSNKAQVSQIKAFLDSIMDIIHFVKPLSLKDTDKEKDEIFYSLFTPLYDQLTHTISLYNKVRNYLTQKPYSTEKIKLNFENPALLGGWPVDREIATSGVIFKENDLFYLGILDKKDKKNFKNLPKPSNKKDVLFKMNYLQAADPSKDVQNLMVINGKTVKKNGRIEKEGKHAGENIRLEQLKNENLPQDVNTIRKNKSYSKQSLNFNKKDLVKFIDFYKQRTIEYFKNFNFQFKKSEDYSDFSDFTEHINQQAYQIKFIEISKAFVDSLVNEGKLYLFQIYNKDFSPYSKGKPNLHTLYWKMLFDEDNLKDVVYKLNGEAEVFYRKKSIAEKNNVVHKANENLPNKNPDNPKATSKFDYDIIKDKRYTLDKFQFHVPITMNFKAEGIFNMNQRVNPFLKDNPDVNIIGIDRGERHLLYYTLINQKGEILRQDTLNIIANEKQKVDYHSLLDKKEGDRATARQEWGVIETIKELKEGYLSQVIHKLTDLMIAHNAVIVMEDLNFGFKRGRQKVEKQVYQKFEKMLIDKLNYLVDKNKKVNELGGLLNAFQLANKFVSFQKMGKQNGFLFYVPAWNTSKTDPATGFNDFLKPRYENLSQAKEFFEKFDSIHFNNKANYFEFAFDYKNFTAKAEGGRTIWTVCTTNEDRYVWNKSLNNNKGGQESFNVTERLKSLFDGKVEYKNGKDLKSQIVSQESADFFKALMKILSITLSLRHNNGEKGDNEQDYILSPVADSNGRFFDSRKTGADMPKDADANGAYHIALKGLWCLEQISKENDLKKVKLAMSNKEWLQFKQTKI

SEQ ID NO: 257 - protein, 1096 aa, unidentified
  REGION 1..1096: note = Cas Enzyme sequence
LKLVIPRKTEKGIQAARDLFTTHCAVNKAVEYYEQHLLKMRGQGYHIEDDTFVSEETTGSQLESLIKAACQSNGRNSPLPGDEIEEIKTLLRKLYEYIVPSSIGAKGDAQQANAFISPLTDPHSRAFIDIFDKVSAPPSWLAGIREGDQSAYIEACGWLKSPEGKDRLCATGSPPNWVRKVRKGDTDWPVSFLKDYEKKLEDIQGVPVIIKSLRDKKVLPLFDPYLAPKITGSRAALTPWDRLAFRLAVAHLLSWESWCRKTKEEHERRKLDVDRFRQRYLSRPELQRSIEILRCYEYERHKELATLGLAPVKPFLITRRMIRNWPDLRERLRKSKDKSQEALLKILSDQQTKLMGKFGDPHLYSFLIRPENHHVWEKDADVVSLVTHYNTLQRIFERTRSEAIMTLPDSLEHPRSVQWEPAGGSNLKNYRLTVEDNTIYASLPVLQAQGEVFAESTLKIKLAPSEQFKSMVIDTNGKQTHLTFSSQTGELFTGILNSADLLFDCDFFRHHNMEAVISGTIGPAYLKVVIDITPKYPAGWDRKRPHSLMHFTTARGNEKYAANVTPGLRVLSVDMGLGTFAACSVFELRDSEPNKKLAFPVCHGLWAVHERSFLLTMPGEVPDKRSEEWRRGRSDELRKLRSMLSHYKQYYPLKAAADPDQRLSIIDSLLGGVEDRPELAFSREILSSLKAHAGLSAPEWEQRVAGAIKHFRENFGIFVKNWRSANKPRTPGKMMGKSMWAIDYLTRVRSFLVSWSLSGMESNEIRRLDRARMGVYAGGLLRHLDGIKNDRLKTGADLIIQAARGAFGKGNPSFSPCHAVLFEDLSRYRMKTDRPRRENSQLMRWAHRSIPSEVKMQGEIYGIHTCETEPAFSSRYHAATQVPGIRCHTLTKEDMGNIELRKIIETENPEIQWGRLRPGSIVPISGGDLFVCLNASHGLITIHADINAAQNLQRRFWTRHAEAYRIPCRRLLINGEERWVPKSMGKRIMGSLKGYGWLVPTDHQSGSCRWENITRKEWLKLGGSVKETDGESTDDLNLEDVEEWLLEDSGEVVVFFRDPSSVLFPKDLWYPSKAFWGSVKRRTVSKLLECLTFQID

SEQ ID NO: 258 - protein, 1099 aa, unidentified
  REGION 1..1099: note = Cas Enzyme sequence
LKNWQELSDVEKKLVSHFDNFTTYFTGFHENRANMYTDKAKHSSIAYRIIHENLPIFLTNKKLFETIKQKAPQLAQETQNALLEHLNGAIVEDMFELSYFNYLLSQTHINLYNQMIGGIKQDSLKIQGLNEKINLYRQANGLSKRELPNLKPLHKQILSDRETLSWLPEAFESNEELVQSVQNYYENEVLAFECCDGKVNLLKKLPDLLSQTQDYDLSKIYFKNALALTTASQVIFKDYRIMKEALWEVNKPKKSKDLVADEERFFNRKNSYFSIEEIDNALKDAKLSASMMQYFQSESSKNIEQIQVAYNEWKCNSSNKELLKAFLDALLAYQRLLKPLNAPNDREKDVAFYAYFDAYFGSLNGVVKLYDKVRNFMTKKPYSLEKFKLNFESGYLLNGWSQEYETRAGLLFEKEGMYYLGINVKKLTENEKSYLTDNSNGNSLKRVILDFQKPDNKNIPRLFIRSKGDNFAPAVNAYNLPIQSVIEIYDLGKFKTEYRKTNPDDYKYSLHKLIDYFKQGFLKHESYKHYNFGWKETNKYLDIAEFYKDVETSCYEVKYETVNWDRLIEYVADGKLYLFQIYNKDFSPFSQGTPNMHTLYWRALFDEKNLADVIYKLNGQAEIFFRKKSIEYSQEKLQKGHHHEMLKSKFTYPIIKDRRFAFDKFQFHVPITLNFKSSIKVPSEEKFKISFNTKINENVKNFIAKNSNIRVIGIDRGERHLLYLSLIDAKGKIVEQFTLNEIVNSYNGKEHSIDYHAKLDAKEKDRDKARKEWGVVENIKELKEGYLSHVIHKIATLIVEHGAVLAMEDLNFGFKRGRFKVEKQVYQKFEKALIDKLNYLIDKKQNKLSLGGVLNALQLSGVYHLESLEKLKQSGFLFYVPAWNTSKIDPVTGFVNLFDTRYASVEKSKAFFAKFKTIRYNEAKDYFEFSFDYNDFTDKAKETRSEWTLCTYGERIVSFRNAEKNHQWDSKTISLTAEFKNLFGALHGNDIKAYILEQNSTEFFKSLMYLLKITLQMRNSITGTDIDYLVSPVADEAGNFYDSRKTDRSLPKDADANGAYNIARKGLILMQRIQKAEDLKKVNLAISNRDWLRYAQGLV

SEQ ID NO: 259 - protein, 1099 aa, unidentified
  REGION 1..1099: note = Cas Enzyme sequence
MVTRALNFKIVVPRGSDARAYPKALWITHREINHATRYYEELLLSLRQQPISYRDGSERSAAEALEVAKNLANDATKLNNKNELLGHEDALTLYRHLYEAIVPSSVGEKGTAQNANMFASPILDPESGGMQSIFEKIKNPPNWIEGVRNGEVASFEAAQSWLGGEQGKERLMASGAPSKWKKAALKKEKDWPTYFVEDYDKKVSEAEGVPTLIRNLRELGLLPLARPYFASRIEGSKAAVTPWDRLAIRLAVAHLLSWESWVSAAATEHQKRVKNVENFKLRSASDTLPTKVADLRKYETQRLEFIISNSVDLGDAPEEFRINQRMIRGWEDLRARWTRHSDAPDETLIADIAAEQTKKGNRFGDPDLYQWLAKTSNRGIWSSDEDDPVLYLTSLNEIEMKVERSRETATMTLPDPMLHPRSAQWEPKGGNNLRNFEINEDASGVLRLSLPLISQNNSGALTEETLEFSLAPSTQMQKPKFSKEGKKIVVEYQQSSGEMARAILGSADLMFNWSHFKNRELEVVENGDVGSVFFKMALDIEPEVSPDIEKIKPGAIYHFQNAAGKKTKHADLVEPGMRVLSVDLGLRSFATCSVFAVQKTGKKIEPGKLFLPISDLGLVAVHERSFSLKLPGEDVGRRGRQWQEDADAELRALRMALARHRSLRTLASVDQIADRLAQLEQLEARIRDNGWPFEAGLLAELRQGSPSPEPVWKDLIKTVTRKWRLEFGFPVSEWRKRQRNKDNRKFMGKSIWALDYLGRSRRFLLSWSLIGRGEGDIRRLDRERSGVFAAKLLDHMAGVKADRIKTGADLLVQAARGLGGGTSQKQREACQFILFEDLSRYRMRTDRPRRENSQLAKWSHREILTETTMQAEIYRIGVVDTGAAFSSRFYALNSAPGMRLSVVRKKDLENPFFIEAVGRENPHVKTADLKAGSLVFRSGGEDFVTLKRGKICRIQADVNAAQNLQRRLWTRHSEAIRLVTKLVKVDGAEHWVPSTFGERAKGAMGSVGYLVPTGHSSGSCEWKPLKPAQFNKLTGGTEQAIFEDDEELAGLADQFLERSGKVTIFFRDPSGEFLPANLWYPSISFWPIVKQKISAVLGP

SEQ ID NO: 260 - protein, 1099 aa, unidentified
  REGION 1..1099: note = Cas Enzyme sequence
MLFSNIFYTLNWTLPKESTAIAYRIIHENLPVFITNNIRFEKIINELDRSNIHSIEKELKEELANNKLKDIFNIEYFQNTLTQNDITRYNTIIGGKVKADGKKVQGLNEYINLFNQHNKDKKLPLLKPLYKQILSEENSASFIVPAFEKDNEVLQSIFDFWNKCIIDAKGPISGKKYNLLSKIQSLLQNLDKLKNNQLEEMYFENENLSTISNDVYGQWNLIRDALGNFYNSIDAKKNKKDYYSWKEIQDALVYYKQTNDEYKDIDQKAFLIYFKEMKVNDGEENTNNNIINLINERYKRIEPLLKEDRDNRKDLHQDKGKVAIIKEFLDSLKLLQNTIKLLYVDDSLDNMNYDFYNQLTDYYETLRPLNTLYNRVRNYMTRKPFSEEKFVLTFNSPTLLDGWDLNKEEANLGVILRKDNKYYLGIMNKGDNKIFKKYDEEPGDDYYEKMVYKLLPGPNRMLRKVFFSNKNIEYYKPNQDIQNLYNKGEFKKGESLNKESLHKLIDFYKNSISKNGDWSVFNFKFKKTTAYDDISQFYKDVENQGYKLFFKTIKTSYIDQLVNEGKLYLFQIYNKDFSENKKRKDESNPNLHTIYFKNLFSEDNLKNVVYKLNGKAEVFYRKKSIEYPEEIRRKGHHYNELKDKFDYPIIKDKRYSEDKFLFHVPITLNFLAKSDEKVNEMVKNYIAATNEKIHIIGIDRGERNLLYLSLIDSNGNIVKQQSLNIIELPKYQKQIDYHAKLNEKEKQRLAARQNWDVIENIKELKEGYLSQVIHQIARLMVDYKAILVMEDLNFGFKRGRFKVEKQVYQKFEKMLIDKLSYLVFKEKNLCEPGGSLRAYQLSAPFKSFKALGKQSGMIFYVPAQYTSKIDPTTGFYNFLNIDVSNLARSKETFSKFDKIVYNKKEDYFEFYCKMINFESANQLTKKSQNKANAELKEFQWILCSTHHDRFKVERKNNQINYCKINVNEELKKLLNSKGINYEKSNDLKSEILNIDESKFFKELGYLLKILVSLRYNNGKKGSEEQDFILSPVKNASGKFFCTLDNNNTLPLDADANGAYNIALKGLMIVQRVKAGGKLDLSISKDDWINFLIMNKKLPK

SEQ ID NO: 261 - protein, 1099 aa, unidentified
  REGION 1..1099: note = Cas Enzyme sequence
MAFPCQLTRHCLRLGVKVPKKEPKKASANDVDFSALGDDPVNLSRDSRGYVFPAFTSLPSWNPKSSGEPAWKEFDIAAFKEALKALNQFRLKTEEREERKKNLEGLIAHLIGTPIEGWKPSKEDSGDEGELPVSLDLTLLKLAWELEEEMTRGLSENVVGESNFLPFGMGAIPVREGGWTVTRASLRGLRDIVEDWMRIIAKNPEAPREEFVETVKAHQRKEGKAGVIGSVGLFLTLCEPKFHPLWMNTNSTDDEADAGSNRFLNRLADLHDSVAEHARCKEPVNLTPAEPRHSRRAFMFSDLNGRSAAKYLAGDIVEVSIAHPAAEVVKEVRCRLNVSSPRLRRDGLLGSEERWLQPMTKALGLKLEQPELTPFDSALSLMPDWDSSGGLRYLINFAASIDAEPLRSAIGKFSLWGRQFNGTKDKNIHLHWPGTADVAKMKVTPWWNNPEIIESGFTVLSTDLGQRTAGAWALLRITSSRPETPRPVRSIGNDGAREWFAEVLKTGMHRLPGEDAVVRGKDGQMAQELSGKTGRMASEGEWAEALDLAAKLLADDPKSWVGSSRTEKSYAEQNGSLVVLANRRLSRLATFHRWSCFDPDKESDPKRRESMVTKLITELAQWEDADVTSWAIKLGEGDVATFKRSAGEAFAKYRRDLLPLLVKLANRVCPLRNDLWAWKERGDASPYGDLVRVARDQGTPPPIRGARGLSLARIEQLEGLRKLFLRYNRALDRSPGTPAKFGRADEGRASGEPCSDLLKKIDHIKEQRVNQTAHLILAQALGVKLAPHSLDAAARRDGDHHGEYAKITGREPVDLVVIENLDRYLTSQGRAPSENSRLMKWSHRAIRDKVKMLIEEPFGIPVLEVPASYSSRFCAVTSEPGSRCEERAFLDDYLKEVLNRRANTVPAAHQSDMRPWHNKLLGQFEKLAEINAKRSADGKPPKTLLLPKTGGPLFLGAIESPVVQSDMNAAINLGFRAVAAPEALHLLHRVRSQTDGQEITTVAKNARERAAYGKKGAPISMKGTRSSKLSKSANFFHDVKGIARFDRGEITIAGTTIAVASSIGIWHAVNESILPRIVAINEQRLGLPALFDDKDELPM

SEQ ID NO: 262 - protein, 1101 aa, unidentified
  REGION 1..1101: note = Cas Enzyme sequence
MSVKSIKLKLKTRSGTNSLSLRKGLWKTHELMNQGIAYYMEWLTLLRQEPVGSRSKEELRQELIGRLQEQRKRNGYSDSATELPDEVFLLLRELYECIVPSSVGESGDAQLLSRKYLSPLTDPDSEGGEGKSKAGRKPGWLLKKEAGDPTWEAEFLRAQKRKEADPTPRIMQALREFGIKPLFPLFTNLQSDITWLPPANKKQFVRTWDRDMFQQAIEKLLSWESWNRRVKDEREKLEQRKAKFEQEYLQDADGWLAPLQQFEKDREKELAEVAFAPGSVYLITPRQIRGWEKLYEKWEKLNTTTEADYIARIAEVQSSMPKEFGDPVVFRFLAKAENHHIWKGHKDRLFLLASYNQIKKQLQQAKEQAAFTLPDPVEHPLWIRFDARDGNLHDYVLWQESKRTRSRRTVTFSSLIMPSENGWCEQANVEVELALSRQFYRQIELCDNPKGKQEITFKDYSSGIPLKGHLGGAKIQFDRCHLEKNRDTLAEGNVGPVYLNVTVDIQPSQEIKNGRLQSPLGQALKVLAKDWPKVTEYKPSELESWILQSGQLQQTGIQSLTSGMRVMTVDMGIRTSAAVSIFEAVKEPPANSKKLCYKLPHCELYAVHRRSFLLNMPGERPDRRVKEQREKRTAERYAIRSQIRLLAQVNRLYAKETVFEQKQAIDEMVDAIQRNKNLAESVRNTWVKELGRLSACAGYQQDVWEKEVSEVYKRLEYITGEIVGKWRRSFGKGRKNLAGLSLWNIEELDSLRKLLISWSKRSRRPGEVNRLQENEKFAVELLEHIRQVKDNRLKQMANLIVMTALGYVYDETQREWIEKYPACQLILFENLQRYRFKQDRSRKENSQLMKWAHRSIPKTVWMQGEPFGLQVGDVNSEFSSRFHAKTGAPGIRCHMLTEPETRDSFLKEMIVKKGFLNEQEVELLKAGDIIPMQGGELFVTLKEKAGEELLIVHADINAAQNLQRRFWHQNAEVFRVVCQAGKTAKGEEVYIPKYKLAEKHLGKGLFRKQSETEDEHVYIWDNKAKIKGKTLSDDSLELEDEDEGLESLEEAKEARGEYKTLFRDPSGFFFPQDTWRPQVEFWSIVKSRLEKRLKMMILQKR

SEQ ID NO: 263 - protein, 1101 aa, unidentified
  REGION 1..1101: note = Cas Enzyme sequence
MPVRSINLKLILPRNADNRSAAQDIWTTHAAVNKAVAEYESLLLEMRGRAYILKEDGEVSIEEVTSRLDARIKAACTRNGRRSVFSQGELAEIRSLLRQLYEAIVPSSNGNDGTAQQANAYIGPLTDPESKGFLAVFTKIGEPPSWLEGVRKGEAAAFAAAELWAGSTEGKSRLAGTGSPPTWVRKFRKKEADWPVAFVADYDRKLSEAVGVPSIVRSLKEQKVLPIVPPNLTPQIVDARGTLSPWDRLAFRLAVGHLLSWESWCILAAKEHTARQEKLATFTSAYLNSHELSASLAAVRKYESDRHDELSRISFTPNSSFRITRRMVRGWSELREKWVASKDKSPESLMLIAAKEQTRLRGKFGDPHLFQWLAHTDNQSIWNESTDVVSLVATANALTSLLERSRPQADMTLPDPLLHPRSVQWEPVGGSNLKNYRLSSADGRIIITIPLLRLQADGTLAEVNHSLPAAPHSQLRHAVLEQQGKGIHITFQNQSSEMFSGTLNSADLLLDWAYLRHHIAADVMRGSIGPAWFKLVIDVEQQLPEGWDGKRPQGIIHFTSALGNNKRISEVRPGLRVLSVDLGVRSFGTCSVFTLTGSSPAEGKLCYPVEGGLWAVHERSFVIKMPGEVQDAKGEAWRESARNEVRALRRALGRYRAYYRIATAPSSVEREALIDEQLAAVVQWRGWPFEEQLLIGLRNQAGMSTDHWESEVGIALDSFRRHFGAIVGEWRRTTRPRSAAKAMGKSIWAIEYLTDVRKFLTSWSLLGRKSGDARRLDRTMRGVFASRLLDHLEGMKEDRLKTGADLIVQAARGFLRDETGVWKKKYSPCHAILFEDLTRYRMKTDRPKRENSQLMLWAHRSVPLEVAMQGEIYGIFTADTGAAFSSRYHSSSGAPGIRCHPITNSDKENEFLRGFIEQENQGIIWDDLKPGDLVPLSGGEIFACLGNNGVIRVHADINAAQNLHRRFWTRHADAFRLPCKRIVVNGDERWVPRTLSKRLFGALGGYGWLVSTGHESGSCRWESITTRQWKSLGGEVRDEDLFSDELSLVEDVSEEMLESSGEVLVFFRDPSGIVFPNVFWYPGKMFWGVVKSRTAAAVLKH

SEQ ID NO: 264 - protein, 1101 aa, unidentified
  REGION 1..1101: note = Cas Enzyme sequence
RTSSSFASDEYLIRRRAIDGWERVVKAWAQLGDEATRQQRIDAAREIQSNLDDNEKFGDIQLFAGFGDDDADEPRPCLADEAAVVVWLTEAGKPDPDILENYSAATVAAHNRRRFKVPAYRHPDPLRHPVFVDYGNSRWGISYSALRESQARAKLKEKLNSAATDSARQKLQEQLQALPELRSVTLDLWTGQQVESVPFRWHGKRLWKDLDLDHFGEPAANTATRADRFGRAVAGQPQAAVSIAEVFGQKDWNGRLQAPRRELDHLADLVYGKRADADFDKLARLTSGSAPHRARKALENLHWFLTTSAKLKPQGPWLDYVARGLPDGVEYRSGRNGPYLNYVVNKDRKGRARLELARLPGLRVLSLDLGHRYAAACTVWETLSTAQMEAACKAAGRPLPQADEPFIHTKQPTEALQKSGRRKGQPVTKTTIYRRIGPNLLPDGTEHPAPWARLDRQFLLKLPGEDHPARFATRTEFADFNRLRLVAGLREDTAQVIENRPDCVNRRVDQLQVDAVRITQLGLRRLGNLARVAYILTAATKPLAGGQSSTPLSREERVDYVLDALVRWQELAQSTEYTNKWAKELWSDQWAKDLWSEWVQGHFGGPQLVDVSGDTPRSERQRRSEDSRNRLRSVAEQLAAPNGAANCELHRLWSTKWQSRSDKWRVQLRWLRRIILPRIGPRPSGTDAEAHVRRRQHARAIRQMGGLSLRRLKTIRDLYQVLKAFHMRPEPDNLRKNVPEPGDDSLLNFGRRILDQLERLREQRIKQLASRIVEAALGVGSENRREHWNGRRRPSQPIADARFAPCHAVVIENLENYRPEDTRLRRENRQLMTWAARNVRKYIVEGCQLNGLHFVEVSPTYTSRQDSRTGAPGVRCEDLPRTAFANAVEVFRGNPPSSPESSTHSHREVSYIVSLLRKAEDKRNRGEPVSAREQVALSLAERIDDVPPHCGVIRLPRNGGEVFVSANPTSPSSQGLQADLNAAANIGLRALGDPDWLGSWWYLLVDAATGIPVTERIQGSTVWTERVTTSVLAHVADGQSGRRRGTKKERTAVYAFSPWHLSWGQIDRDGVWTTTKNYWPEVERRVADLLISRQTEPETPW

SEQ ID NO: 265 - protein, 1102 aa, unidentified
  REGION 1..1102: note = Cas Enzyme sequence
LVSGDGDDERDTRAVWFEFDLAAFIEAIKAPRRYFEDTMKREASADRFRQQITAMEGKGREASSTEEDSEPLPGFDSDERVRLLKIIVQDKLKWVAEAEGDASETGPKEYAIRERTVRGFSEIKRRWRNAVESSNATEKRLLEILAEEQTTHRDDFGSATLYQQLAKPEFHAIWRNEGTQPWHAEDPLTAWLQYKELQADLADKERAIRFTPAHPKYSPRFFIFPKKSEAQPKTANHHHTKPGLLSRHDPGQLSFTGGVILRTEHGLAPTIVRIHYAAPRICRDQLRSSGDTNLYEAPWLQPMMAALGLDKSPERVNFANCRITLQPTNESDIHLTFPIEVNSEKIKAGVSRETVWENQFNLYPDGENFYNASLRWPHEKQRAKPPLPWHEQLDSFRCIATDLGQRDAGAFARMSVLGGSDFDKRPSRFIGEAGGKKWRAALERSGLFRLPGEDAQVWREKSSKDEKNPEDSGKPFDFREELWGERGRPARSWEADDTAELMRLLEVPPDAKELSLLAEGWRSLLSFPEQNDKLLVAMRRYQSRIARLHRWCWFLKGDDKQQKSAWDEIADCEDTRLISGEQIAQAKKHDPRLQTELASQLQKRLELAPVLLVRIANRILPLCSRSWHWEKHPASKAQNTLHHLTQNGPKLDSKERPVWLRGQRGLSLERIEQVEELRKRFQSLNQTLRREVGGKPPIRRDESVPDPCRDLLDKLDNLKEQRVNQTAHMILAEALGLCLAPPPADKKTLRQQRDLHGTYEKITDKSGKWIGPVAFIIIEDLSRYRASQGRAPRENSRLMKWCHRAVRDKLKQLCEIFGIPVVETPAAYSSRFCSRSGIPGFRAEEIAPGFEKTAPWSWIKEKKDDRGQPTTEAAHIQELIQQMAEAQKIPTRSDKPLAKPRTLFAPLAGGPVFIPIVDSIPGAELAPKLVQADINAAINLALRAIADPRLWTIHPRLRTQREGGNKPGKAKNQKTQQTASGTPTEVKLLTREKRKFGELGKPLVIKRASSAKPDDTRQPNFFADLAGLNELAEQLAKKNPREYSWLTKEWTSAEISGGNTTPPLVHGKSFWGTVKAKQWDRIRAINSARLAAWRSKGDDVSM

SEQ ID NO: 266 - protein, 1102 aa, unidentified
  REGION 1..1102: note = Cas Enzyme sequence
LVSGDGDDERDTRAVWFEFDLAAFIEAIKAPRRYFEDTMKREASADRFRQQIAATEGKGREASSTEEDSEPLPGFEGDERVRLLKIIVQDKLKWVAEAEGDASEAGPKEYAIRERTVRGFGEIKRRWRSAVESGNATEKRLLEILAEEQTAHRDDFGSATLYQQLAKPEFHPIWHNEGTQAWHAEDPLTAWLQYKELQADLADKERAIRFTPAHPKYSPRFFIFPKKSEAQPKTANRHPTKPGLLSRHDPGQLSFTGGVILRTEHGLAPTIVRIHYAAPRICRDQLRSSGDTNLYEAPWLQPMMAALGLDKSPERVNFANCRITLQPTNESDIQLTFPVEVNSEKIKAGVSREAVWENQFNLYPDGENFYNASLRWPHEKQRAKPPLPWHEQLNSFRCIATDLGQRDAGAFARMSVLGGSDFGKRPSRFIGEAGGKKWRAALERSGLFRLPGEDAQVWREKSGKDEKNPEDSGKPFDFREELWGERGRPARSWEADDTAELMRLLEVPPEAKELSLLSESWRSLLSFPEQNDKLLVAMRRYQSRIARLHRWCWFLKGDDKQQKSAWDEIADCEDTRLISGEQIAQAKKHDPRLQTELESQLQKRLELAPVLLVRIANRILPLRGRSWHWEKHPASKAQNTLHHLTQNGPKLDSKERPVWLRGQRGLSLERIEQVEELRKRFQSLNQTLRREVGGKPPIRRDESVPDPCRDLLDKLDNLKEQRVNQTAHMILAEALGLRLAPPPADKKTLRQQRDQHGTYEKIPDKSGKWIGPVDFIIIEDLSRYRASQGRAPRENSRLMKWCHRAVRDKLEQLREVFGIPLVETPAAYSSRFCSRSGVPGFRAEEIAPGFENESPWSWIKEKKDDHDQPTAEAAHIQELIQQMAEAQKIPTRSDKPLAMLRTLFAPLAGGPVFIPIVDSIPNAELAPKLVQADINAAINLALRAIADPRLWTIHPRLRSQREGGNKPGKAKMQKAKKEASDAPTEVKLLTREKRKFGESGKPLVIKHASSAKPDDTRQPNFFADLAGLNELAEQLAKKNPREYSWLTKEWTSAEISGENTTPPLVHGKSFWGTVKAKQWERIRAINSARLAAWHSKGDDVSM

SEQ ID NO: 267 - protein, 1103 aa, unidentified
  REGION 1..1103: note = Cas Enzyme sequence
VPIRSITLKLVIPRKTEKGIQAARDLFTTHCAVNKAVEYYEQHLLKMRGQGYHIEDDTFVSEETTGSQLESLIKAACQSNGRNSPLPGDEIEEIKTLLRKLYEYIVPSSIGAKGDAQQANAFISPLTDPHSRAFIDIFDKVSAPPSWLAGIREGDQSAYIEACGWLKSPEGKDRLCATGSPPNWVRKVRKGDTDWPVSFLKDYEKKLEDIQGVPVIIKSLRDKKVLPLFDPYLAPKITGSRAALTPWDRLAFRLAVAHLLSWESWCRKTKEEHERRKLDVDRFRQRYLSRPELQRSIEILRCYEYERHKELATLGLAPVKPFLITRRMIRNWPDLRERLRKSKDKSQEALLKILSDQQTKLMGKFGDPHLYSFLIRPENHHVWEKDADVVSLVTHYNTLQRIFERTRSEAIMTLPDSLEHPRSVQWEPAGGSNLKNYRLTVEDNTIYASLPVLQAQGEVFAESTLKIKLAPSEQFKSMVIDTNGKQTHLTFSSQTGELFTGILNSADLLFDCDFFRHHNMEAVISGTIGPAYLKVVIDITPKYPAGWDRKRPHSLMHFTTARGNEKYAANVTPGLRVLSVDMGLGTFAACSVFELRDSEPNKKLAFPVCHGLWAVHERSFLLTMPGEVPDKRSEEWRRGRSDELRKLRSMLSHYKQYYPLKAAADPDQRLSIIDSLLGGVEDRPELAFSREILSSLKAHAGLSAPEWEQRVAGAIKHFRENFGIFVKNWRSANKPRTPGKMMGKSMWAIDYLTRVRSFLVSWSLSGMESNEIRRLDRARMGVYAGGLLRHLDGIKNDRLKTGADLIIQAARGAFGKGNPSFSPCHAVLFEDLSRYRMKTDRPRRENSQLMRWAHRSIPSEVKMQGEIYGIHTCETEPAFSSRYHAATQVPGIRCHTLTKEDMGNIELRKIIETENPEIQWGRLRPGSIVPISGGDLFVCLNASHGLITIHADINAAQNLQRRFWTRHAEAYRIPCRRLLINGEERWVPKSMGKRIMGSLKGYGWLVPTDHQSGSCRWENITRKEWLKLGGSVKETDGESTDDLNLEDVEEWLLEDSGEVVVFFRDPSSVLFPKDLWYPSKAFWGSVKRRTVSKLLECLTFQID

SEQ ID NO: 268 - protein, 1103 aa, unidentified
  REGION 1..1103: note = Cas Enzyme sequence
MKELDRIRREDQGDRPEESGSGPLFKRLQLPEYHCIWQDLPPNPDVHHDDPLWAWVRYRELQQDLRKASEPIRFTPAHRTESPRFFIFPKQNRPRSKAPGPGEATPGQKSDHLPGMFAYDDDGKLVQVQGDEPWLKDRPRLMAFNAGLVLSTAAGLQPTPVRIYFSAPRLRRDRIRSDAEQSLGSVSLLQPMLEALGISPELPDINFANCPVTLLAERRERPNEQAADEPEDDQNRPDRYDLNLVFPVTLSEDKLQKHPFFRHKEKDRWNYQKSGDKGHCFAQFNYSAEDPRYEISLRWPIDTEHSKEAPKHDAKVKERKHEATWFDLMDRFFCLPVDLGQREGGAYALLDVRANADFGTNAKGKPVSSRFVGQTGEKKWRAALAASGLLKLPGEDARMFRPRFSADDKTLRYTEASRRDTEPGKKFREEPWGERGRPALRKTDANALFDETDEALRLLREFDQLDIMPAGWDEPESPAFLSFPEQNDRMVVAARRFLSRVRRLHRWSAFLSPKNWPEKPETAVQKHKRALEEIREACGLDENGVQKLEEKSGAPLDGEAWLAPSVKQFVREEADDSLLSGALQQLLQPMLDRLPALFEDVANRCAPLRGRSWRWTEHARSTSLKPLHILLPTGNPRPHARMKMPDGKERDVTWIRGQRGLSMKRIGQLEDLRRLLQSLNQIQRRKIGTMPPRQKRGEKGDELPDCCPKLLEKLEEVKKQRVNQLAHQILALALGLRLKKSGPAKSESEREHCDIHGEYERIPDPSQLDGFRRPVDFIVLEDLKYYEMTRMRSRRENVRLMRWCRRHFRDKLRQLCEVFGIPVVEANPANTSKFCARTGVAGFRAVEVGPSFEQEYVWRKALERLEQHQSGKRKLEPDDLAFCEGANRLMQQVKEAQQIPTKSGKALPCPRTLLAPLGSGNVFVPAVGEVKAADLPPVVVQADVNAAVNLGLRVIADPRLWAIHQRVRTKAEKEGMSRTHDGKARQSGQLPPQTSQDTKPRLRTAENRKFGKAGEPLGLGDLQKSSAVFEGRKPNYFRDVANLSQATWDIAVVPDPANPGQNVTLASGKALWGAVRQLQWKRCLETNEARLAAWRDKANPMPN

SEQ ID NO: 269 - protein, 1108 aa, unidentified
  REGION 1..1108: note = Cas Enzyme sequence
MAIRSIKLKLKTRTGPEAQNLRKGIWRTHRLLNEGVAYYMKMLLLFRQESTGGQTKKELQEELIRHIREQQQKNRADKNMQALPLDKALEALRQLYELLVPSSIGQSGDAQIISRKFLSPLVDPNSEGGKGTSKAGAKPTWQKKKEANDPTWEQDYEKWKKRREEDPTASVITTLEEYGIRPIFPLYTNTVADIAWLPLQSNQFVRTWDRDMLQQAIERLLSWESWNKRVQEEYSKLQEKMTQLNEQLEGGQEWISLLEQYEEQREQELIENMTAANDKYRITKRQMKGWNELYEQWSTVLPNASHEQYREALKRVQQRLRGRFGDAHFFQYLMKEEHHLIWKGNPQRIHYFVARNELKKRLEEAKQNATMTLPDARKHPLWVRFDARGGNLQDYYLTAEADNPRSRRFVTFSQLIWPNESGWMEKQDVEVELALSKQFYQQVTLQKNDKGKQEIEFKDKGSGSTFSGHLGGAKLQLERGDLEKEEKDFEGGEIGSVYLNIVIDFEPLQEVKNGRLQSPYGQVLQLVRRPNEFPKVTTYKSEELVEWMKASQNHSSGVESLESGFRVMSIDLGLRTAAATSIFSVEESNDANAAGFSYWIEGTPLVAVHKRSYMLKLPGEQVEKQVREKRDERQDQQRRVRFQIRILSQVIRMAKKQNRERADELDHLSQALEKQKSLLDQTDRTFWNGIVCDLTDALREKEGGWEQAVVQIHRKAEEHVGKVVQAWRKRFDADERKGIAGLSMWSIEELDSLRKLLISWSRRTRNPQEINRFEQGHTSHQRLLTHIQNVKEDRLKQLSHAIVMTALGYVYDEKKLEWFAKYPACQVILFENLSQYRSNMDRSTKENSTLMKWAHRSIPKYVHMQAEPYGIQVGDVRAEYSSRFHAKTGTPGIRCKMVKGQELQGKRFENLQKRLVNEQFLTEEQVKQLRPGDIVPDDSGEWFMTLSDGSEGKEVVFLQADINAAQNLQKRFWQRYNELFKVSCRVLIRGEEEYLIPKAKSVQAKLGKGLFVKKTDTVMKDVYVWDSQAKLKGKTTFTEESESPEQLEDFQEIIEEAEEAKGTYRTLFRDPSGVFFPEFVWNTQKDFWSEVKRRLYGKLRERFLMKTR

SEQ ID NO: 270 - protein, 1114 aa, unidentified
  REGION 1..1114: note = Cas Enzyme sequence
FLNNISSYDTINEIIQKDIQQIEENFKEELNGKKLDDVFKIENYSNCLTQKDITTYNTLIGGKSEGDKKIKGLKEYVNSYNQKNGTKLPKFIALYKQILSSKDSLSWLPEIFEDDAQCIGAIKKVYNDINEKVINTPKDKISIKSLLSNLTDYSSTGIFVQNEAKKELLTSILQSYYGDWAILTKALEIEYLEAHPRKGQKIETYNKNRDTYVKSFKSFSLQRINDLIGEDKPKIEDYFKSCGYKEETISCNKEKDLEKQEQEIIDTFKDDRNIILCTSDIKQEGDNLIVKTPNIFEQIERKYLLVKDILNADYQHSNKALIQDTQSIEKIKLFLDSIKKLQWFIKPLSGCEEEAKRDNNFYSDFDDIWEDLNEITPLYNSVRNYLTQKPYSEEKIKLNFQDSTLLGGWDVNKEPKNLGILLIKDGLYYLAIINKDTKKVFENKHFDSTKKCYQKIDYKQIADAGKDIQNIIRIGDDKYQRFTKNLDALKKKYIPEIYAIKQAESYLQDKSMSTIKTFSSDDLKTFITYYKEAAKQYWTWCNFSFSDEYQNWKSFTDDVNMQGYKITFRDIEEDYINQLVKEGKIYLFQIYNKDFSLYSKGTPNMHTLYWKALFDENNLKDVIYKLNGQAEVFFRKKSFTWNDEVMKNGHHAKELKGKFTYPIIKDKRYTEDKFLFHVPITMNFKAVGTNNINSKVNEFIKDNGIKHIIGIDRGERNLLYLTLIDLQGNIVRQFSLNTITNVYMNKDGKEEEKSFNYHNKLDNIEKDRQEARKNWQTIENIKELKEGYLSQVIHKITQMMIEYKAIVVLEDLNSIFMRGRQKVEKSVYQKFEKMLIDKLNYLVDKKKDPNEEGGLLNAYQLTNKFESFEKMSKQNGFLFYIPAWKTSKIDPVTGFTNYIYTKYENEEKAKELLSKFADILYNEEEKYFEFVISDYTKFNPKADETRKEWTICTYGKRIKTFRNKAKNNQWDNETINLTEALKTLFNSANIDYKTNLKDSILNQGEKAFFEELLNLLKLTLQMRNSNPNTDEDYILSPVADSNGVFFDSREHKGETASLPQDADANGAYNIARKGLWAVRQIQNADDGSKVSLAMSNKKWLNFVQNKEYLDDKDK

SEQ ID NO: 271 - protein, 1114 aa, unidentified
  REGION 1..1114: note = Cas Enzyme sequence
MNRSFTARLSRQTPLRLRQYLWATHRIYNESLAYLLKHYFWMQNLTDRKPEEDGKNRLRERFDGGQLERLRMIYRDMMGLDLPKSKRAGRSQSAQAWMEQITFSRRSIGEGPGESSKNIGKEVKEVIREIRKENLWLFDRELALPVSPDNGFRRGLFGSAARRILNFEQNQDTHADYYRDAQRAFEQWTGGRHRDETQDETTDARRAGWRRTVPLRAWGRTQADKREAELDEIAHLSWTDFESAKAEFAAYQKERTKTRAEAHNQQFDETKIERINAAMTRGWRDIYERLFPPDAKSPPERATAEQTIKAFQRADPRRVGDVNFFLWLADKPHLWRFVETMRRYNDFRQKLERYARAIQFTYPRYSRRPEWFTFSETSPGHMYTIVSFDPMVVDLCVFVPPEDVPILKKLAKDQQLSQAEWAIFNQPIDWSLYLLTQGSLAERQNAHRKSRDKGKLGIVAEANLDPVYEWTNSVWRQLTGGFFRDDPPLDVAKFERVMVRYTLATDVRLSPFVEDPTSTEELTGRSTVITDECQEKRQRLVARENPQSVEIQQHPGGRRPRHEKWPAKQGLYAYWFGPLADQNRTPAERRRFLRPMPLVFGGIRLEYRGRLTESVDPIFTLSSELDDSVYNSDNKRIVPAPAHRIRAAKVGRPLKRNGWSEAGGNVIVCRFRDRKQLLSVGVEAGLADECPLPGVRLIRGNPKPTAKNKNPRPVVVEAIFDRAEGWQRKPEDIVEDDPSRFVEDWVQSGGSRNINVGMRALFVDLGMRHIAAGAVVEFVEDDQGNGVLPTPLTPRAVEFINVPGVTLRHIERHQEERRRKQRKACPRGTRKAFEIRGAHLPRGEPFARELLDHTENLKDDRRKKAAHAILRAALKHGVDYIVFENLKGYRPDMEFGRRVNASLMRWNRRELVEFVKMEAAPFGIHVYEYVPPHHTSRFCHRCGAVGHRFTHVTALNAAKDAMAPAVAVLDAQGKPVLDAKGRPVVRRKWAPDARRVRGTSLGLITGARQTIDGGKHFCCTECGLMINADYNAAMNLARKLADDFPAYERYTYNADEKSWVAAGEPLIGKAFWDRARAQVQRHLNTRFGQLADTPPAGGWPEGFKQVHDMADVPW

SEQ ID NO: 272 - protein, 1114 aa, unidentified
  REGION 1..1114: note = Cas Enzyme sequence
MAVRSVNLRLVVPRGSADTTARRALWTTHAEINAATSYYERQLLVMRGLPYEAPDGDGDKRQIILAEAESQLLAVARDVQRRNRRRCGLDEATSGDAPEVLAAVRTLYGHLVPDETGTASAQAANGFLSPLVDPASRGFGAAADKLDRPRPNWVGIPDEDPSLLDAANAWLASEASAAWRGDTGSPATWLRAARAGNASWPGLFRKKLDDLALTAAGSPEGAVARMRSLDLLPFFDAYFPSRLASARGAVTPWDRLAFRLAVSHLLSWQAWVRRAMEQHIRRQQTLDDYRQRAVTSEIDEMLAKVRAYEVTRSAHLSQLGLGESIYTLQPRQLRGWADLQSAWRKLTIPSPDVLRTMIADHQTKKRGRFGDPQVYFWLAESAQRALWAKEDVPTIAATLNAMQGLIDRSRETATMTLPDARLHPRAVQWSGEGDRNLRPYRLRQTAEDGLMAELSLLCSSDDGLHETRVSFRLAPSAQFEVTGFTTQAGKARVTFRNGSGETFLATIGSGDLLFDRRHVSRREEAAIAAGDIGPVWLKLALDIDTQRPSAWAPDHARFVRHFAAALGKPTKQESDIHAGGRVLAVDLGVRTFAACSVFELRKDTPRGALAFPVPIQDRQMWAVHERSFHLDLPGEHPDKEGLVWRRGQRAELQRIRRTLGIHRRIARLAGVPLQDRPSALEALHVAIVDDDCFAFMPALHTVLADRSDAPQPVWDNAVAAALVSFRKQLGPIIRHWRRGGRERQGFNYLGKSMWAIEHLTDLRRTLLSWSLLGRASGEIRRLDRAERGTFAAGLLEHVNHIKDDRLKTGSDLIVRAALGYLRDDAGRWQQRYAPCNVVLFEDLTRYRMRTDRPRRENSQLMRWAHRAVPAEVKMQGELYEIAVAETAAAFSSRYHARTLTPGVRCKALTAEDLRDAYLREDLAQDGFDLAQCRPGDLVPWRGGEIFVCLRKDGRLLQVDADINAAQNLQRRFWTRHAAAFRLPCVPVMLAGASVWRPRQMGKRLSGALGGMGVLRPTGHESGSCRWECVTARKLRDPAEATLETPDLDEAAGELIALAEEAETTAGTVEVFFRDPSGVLWPPDLWFPSAAFWGIVQARTRALLRIRLAGVRESA

SEQ ID NO: 273 - protein, 1115 aa, unidentified
  REGION 1..1115: note = Cas Enzyme sequence
TKLASFKTLYKQIGCGEKKPLFFKLTHEKKAEADAAREKDSRKEAFSVEEILVLAKQAGETYLKSASKGPQIETVPDFLTYIGEKETFEGVYWSKEAVNTISNRYFADWDTLKEKLKTAKVFSKANKKSGEDVKIPQVIELEALFGVLDSVEDETWKDEGVFFKKSLTEEVKDEVKNQKNKKRREIIANTKSPSRALLEFVLNDIDGHATSFVNGAAEVETITQAYFFAEENKQEEKRRQWKETIKAWIDHACNANAMLKYFLVSESKTKKSNSLDPDIANGLKSILFESKLKADAPNGDDTIVNWFKWRDALRNFLTKKPQDDAKKNKLKLNFENAALLVGWDRDLENQRKSVILRDRSAYYLGILSKKHGSVFYDGSIPLIGRGQEYYEKMYYKQQTKVYRQLPRMGFPYKVDKSEPFISSGLDNFDSKSFQERHEKYGLTKELVEIKDAFDLFQSVKKKGDVFSGDKSKKLIDYYKKVIKVNYQGVFEIDSILKKNYAELNDLYKDFDNVAYELTFKSIPKNYVDVLVEEGKIYLFEIFSKDFSDKSSGNKNMQSLYFLSLFDDAERRNQLGANAQIFYRRQGIKERRVKAGYENKPWVIEYKRFTENKQLTNAVDKDTEKAWERGKSFFFHFPIVINANSIDGISNGNPNPQAVKLVNNMVKEQFSSNENVYFLGIDRGEKHLAYYSLVDQNGKLVKQESLNLPFVDKNGNPRAVKAEKRSVGEDGKEEVKPVECWDYNELLDARAGYRDYARKNWQTIGTIKNLKEGYVSQVVRTIADLAIQDGIPTYIVLEALSTGFKRSRQKIEKSVYQKFELALAKKLNFLVDKNASLGEIKSVTRALQLTPPVNNYGDIENKKQSGIMLYTRPNYTSQTDPEIGWRKSIYLKKGSEEYIKGQILAAFSEIGFDGKDYYFEYKVEHTGKTWKLYSGHDGKGLDRFRTERNAKGIWEPKAQDIRAILNDVFEKFDTNKSLLKQMKDGVELTKVKDEKYAKYTAWESLRFGIDLIQQIRNTGITKRDSDFILSPVRDENGNYFDSRVYWDKEQRREKCVMPSSGDANGAFNIARKGIIINEHIKRGLNPYISDEEWDIWLAGREKWEEWMKKNMKSLKK

SEQ ID NO: 274 - protein, 1118 aa, unidentified
  REGION 1..1118: note = Cas Enzyme sequence
MPVRSIKLKLVVPRGSAGASLRQALWLTHEEVNKATSYYEQRLLLMRALPYETSATDEGDKVTLEVIQRQALEVARTAQRENLDRAGRTGEILGTDAEVLSALRELFRRIAPDQTGAASAQAANAYVSPLVDPDSRGFGGIADRLARPLPNWLALSDDDPELLATAQPWFASDASVEWRTDTGSPSTWLRKARQGDPGWPALFRAKLDQMQRAIAEGPEAVIDRARSLALLPLFSPYFSPRMAERQGVVTPWDRLAMRLAVAHVLSWQAWVRRTAEQRAAREAQLADYRKRAVTPKIDELLPVIAQFEKDRSESLSRLGLGPSAYRLMPRQLRGWAELRQDWMRKGGGDPNKLRSIAAAHQTRLRGRFGDPQVFLWLADKANHRLWRDDDVPTVVATLNAMQALLDRSRETATMTLPDACLHPRAVQWSAEGDTNLRPYRLLSAGEASLEVELSLLAARDEDGKLKDLRHRLRLAPSGQLRSVRIEHRGKKAELAFADDSAQRFTGVLGSADLLLNRAHLGNRPEQRMREGDIGPVWLKLAVELDPDVPPAWGKDHARFARHFRAALGSDKGLPTAVVPGARVLSVDLGVRTFAACSVFTLKERPVSDGGNGASVPLAFRVPVGDATFWAVHERSFHLNLPDEAPDRDGEEWRRRRREELLRLRRALAFHRRALRLAGVAAQDRAEALEGLRLSLSDGDPFPCQHQLVASLSDRANAAQPVWDDAVSAALRGLRQELGPVVHTWRQTGKERQPFTYLGKSMWAVEYLTDVRRLLLSWSLLGRASGDVRRLDRAERGTFARHLLEHLDNVKEDRLKTGADLIVRAAMGQVRDHAGRWEQRFAPCDAVLFEDLSRYRMRTDRPRRENSQLMRWAHRAVPEEVAMQGALHTLAVEETSAAFSSRYCARTLTPGLRSQPLSRDDMSDAYLREELAQDGIDIDRCRPGDLVPRAGGKLFAYVTHDGRLSRIDADINAAQNLQRRFWTRHADAFRLPCVPAEVHGAPSWVPRQLGKRLMGALGGVGLLRPTGHESGSCRWEPARKAALRGVDVAGDAQRIELDEQAEELAGLAEEAEVTAGRVEVFFRDPSGVILPSNLWYPSRTFWGIVRTKTVAHLKARLGG

SEQ ID NO: 275 - protein, 1119 aa, unidentified
  REGION 1..1119: note = Cas Enzyme sequence
MSFTISYPFKLIIKNKDEAKALLDTHQYMNEGVKYYLEKLLMFRQEKIFIGEDETGKRIYIEETEYKKQIEEFYLIKKTELGRNLTLTLDEFKTLMRELYICLVSSSMENKKGFPNAQQASLNIFSPLFDAESKGYILKEENNNISLIHKDYGKILLKRLRDNNLIPIFTKFTDIKKITAKLSPTALDRMIFAQAIEKLLSYESWCKLMIKERFDKEVKIKELENKCENKQERDKIFEILEKYEEERQKTFEQDSGFAKKGKFYITGRMLKGFDEIKEKWLKEKDRSEQNLINILNKYQTDNSKLVGDRNLFEFIIKLENQCLWNGDIDYLKIKRDINKNQIWLDRPEMPRFTMPDFKKHPLWYRYEDPSNSNFRNYKIEVVKDENYITIPLITERNNEYFEENYTFNLAKLKKLSENITFIPKSKNKEFEFIDSNDEEEDKKDQKKSKQYIKYCDTAKNTSYGKSGGIRLYFNRNELENYKDGKKMDSYTVFTLSIRDYKSLFAKEKLQPQIFNTVDNKITSLKIQKKFGNEEQTNFLSYFTQNQITKKDWMDEKTFQNVKELNEGIRVLSVDLGQRFFAAVSCFEIMSEIDNNKLFFNLNDQNHKIIRINDKNYYAKHIYSKTIKLSGEDDDLYKERKINKNYKLSYQERKNKIGIFTRQINKLNQLLKIIRNDEIDKEKFKELIETTKRYVKNTYNDGIIDWNNVDNKILSYENKEDVINLHKELDKKLEIDFKEFIRECRKPIFRSGGLSMQRIDFLEKLNKLKRKWVARTQKSAESIVLTPKFGYKLKEHINELKDNRVKQGVNYILMTALGYIKDNEIKNDSKKKQKEDWVKKNRACQIILMEKLTEYTFAEDRPREENSKLRMWSHRQIFNFLQQKASLWGILVGDVFAPYTSKCLSDNNAPGIRCHQVTKKDLIDNSWFLKIVVKDDAFCDLIEINKENVKNKSIKINDILPLRGGELFASIKDGKLHIVQADINASRNIAKRFLSQINPFRVVLKKDKDETFHLKNEPNYLKNYYSILNFVPTNEELTFFKVEENKDIKPTKRIKMDKHEKESTDEGDDYSKNQIALFRDDSGIFFDKSLWVDGKIFWSVVKNKMTKLLRERNNKKNGSK

SEQ ID NO: 276 - protein, 1119 aa, unidentified
  REGION 1..1119: note = Cas Enzyme sequence
MTLYLLGQWGIMPVRSIQVKLMVPRGDDGLPLRRSLWATHVAVNAATRFYEQRLLLLRGDSYVTGDGEVAKETVVDELKMLINAAKERNGDADDGTDDEPIELLRKLYERIVPSVIGEDGSAQAANAFIGPLTDPDSKGFLGVFEKLDRPIPNWVSLVEAEDPSALEVATDWLKSSNSETWMNDKGSPAAWVRLARKDDPEWPQRFVDKLEDLNKEASEGIPPIVKRLRDLKILPLFPPYLTPKIDGAKSTLSPWDRLALRLAVGHMLSWESWCRIAADEHQARVNRVQKFRETEIDDVMADKIKALRNYESEREKYLGTLGLGEASFHITTRQLRGWTDLKEKWLRSKDKTETDLVEIIATEQTRLRGKFGDPDLFRWLAQPSNHHLWESANDPVNTVATLNAMQSLVDRSQVTATMTLPDPADHPRSVQWEPPGGSNLRHYSPTVNAAGGMSVDLELLAPLSANRFKEATYALTVAPSGQLREVELTASRKEIRIDYRADSGETFSGKLQSSDLLLGRSHVKNRQVEQMENGDVGPTYLKLVVDVDKKLPDGWPDNWPPAAAHFKSALGRKTKNEDKVESGVRVLSIDLGVRTFASCSVFVLLNDEAQDTFSFPIEVNNQSLWAVHERSFRLPLPDEEADQRGKVWRAARDEDLRRMRRVLTRYRRVMRMKGEEVSKRPELLSDLKETLENEPFPFEIDTQTSLVSAAQSPGPVWDQAIQDGLKVYQKDFGTLVGVWRSNNRRREEQRHMGKSMWAIDYLTNTRRFLQSWSLLGRASGDVRRMDREKQGTFASRLLDHIDHIKDDRLKTGSDLIVQAARGYVRVKGGKWEQRHKPCEIILFEDLSRYRMRTDRPRRENSQLMKWAHRGVPREVRMQGELYGLYVDDTPAAFSSRYHARLNTPGIRCRVIKKSDFEDKFLREMLSKDGIDLDDCSPGELVPWQGGEMFACVDSDGDLVRIHADINAAQNLQRRFWTRYADPFRIPCNLVREDDEEIWVPRDLGKRILGAMNGAGVLQPTGHDSGSCRWESVTNRRYQKLGGGSGGDEKANADTDMEELEAIAEAAVERSGEYETFFCDPSGNVLPHNLWYPSKTFWSIVKSKTQKALKSKLGQNELPL

SEQ ID NO: 277 - protein, 1119 aa, unidentified
  REGION 1..1119: note = Cas Enzyme sequence
MPVRSIKLKLVVPRTEAGRGLRASLWTTHEEVNAATRYYEQWLLVLRGLPYETAARGEQGGGVSADAIRAQALAAARAAQLANLERSGHQPEVVGTDDEVLDAMHQLFQLIAPDETGAASAQAANAYLSPLVDPESKGFGAAADKLERPRPNWLTLQDDDPALLEAATAWFASDTAASWRGDTGSPAAWLRAARAGKPNWPALFRTKLEELARVGAEGPEAAVARLRALHLLPFFPAYFPPRMVEAQGGVTPWDRLAMRLAASHILSWQAWVRRAADQHAARVATLEAYRTRAVTPAVAALLPQVAAYERARGEALGKLGLGPAEYRLLPRQLRGWSDLREAWLRVRDPSPDRLRTISAEHQTRMRGRFGDPHVFLWLAERQQHEVWQADDVPTIAATLNAMQNLVDRSRETATMTLPDAQLHPRATQWSAEGDSNLRPYRLLDAGDGALKAELSLLCRGDDGRLEDVRPSFHLAASGQLRDVRLIRRGKKAELAFANDAGQRFTGVLGSADLLFDRDHLGHRDHTELARGDIGSVWLKLAVDLDAQLPEGWEENHARFTRHFAAGLGKATKAEDSVRAGVRVLAVDLGIRTFAACSVFELRDQVGSASSAKARLAFPVPIGNATLWAVHERSFDLSLPDEEPTAEGAAWRTLRRAELQQLRRALSLHRRALRLVGVEVPDRSDALDALKAALAEGDHLPPAVELHAELERQMGVPQPVWNDAVATALRGFRSRMSPFVRKWRRTARERQPFTYLGKSMWAIEYLTDTRRLLMTWSLLGRVTGEIRRLDRAGRGTFAANLLGHLDRAKEDRLKTGADLIVRAALGYVRDHAGRWEQRFAPCDAVLFEDLSRYRMRTDRPRRENSQLMRWAHRGVPAEVTMQGELHGLGVVETGAAFSSRYHARTMTPGVRCRPLAASDMGDAFLREALLEDGIILEQCRPGDLVPRAGGEIFACVSAAGGLIRLDADINAAQNLQRRFWTRHAAAFRLPCVPAEVGGKDAWVPRQMGKRLLGALGGYGVLRPTGHESGSCRWERVRAAAVRGTATSDGDVTSDLEGEELAGLAEEAEAAAGRVEVFFRDPSGVILPEALWYPSKTFWSIVRAKTLAGLKARLGLVQDTM

SEQ ID NO: 278 - protein, 1119 aa, unidentified
  REGION 1..1119: note = Cas Enzyme sequence
MPVRSIKLKLVVPRTEAGRGLRASLWATHEEVNAATRYYEQWLLVLRGLPYETAARGEQGGGVSADAIRAQALAAARAAQLANLERSGHQPEVVGTDDEVLAAMHQLFQLIAPDETGAASAQAANAYLSPLVDPESKGFGAAADKLERPRPNWLTLQDDDPALLEAATAWFASDTAASWRGDTGSPAAWLRAARAGKPNWPALFHTKLEELARVGAEGPEAAVARLRALHLLPFFPAYFPPRMVEAQGGVTPWDRLAMRLAASHILSWQAWVRRAADQHAARVATLEAYRTRAVTPAVAALLPQVAAYERARGEALGKLGLGPAEYRLLPRQLRGWSDLREAWLRVRDPSPDRLRTISAEHQTRMRGRFGDPHVFLWLAERQQHEVWQADDVPTIAATLNAMQNLVDRSRETATMTLPDAQLHPRATQWSAEGDSNLRPYRLLDAGDGALKAELSLLCRGDDGRLEDVRPSFHLAASGQLRDVRLIRRGKKAELAFANDAGQRFTGVLGSADLLFDRDHLGHRDHTELARGDIGSVWLKLAVDLDAQLPEGWEENHARFTRHFAAGLGKATKAEDSVRAGVRVLAVDLGIRTFAACSVFELRDQVGSASSAKARLAFPVPIGNATLWAVHERSFDLSLPDEEPTAEGAAWRTLRRAELQQLRRALSLHRRALRLVGVEVPDRSDALDALKAALAEGDHLPPAVELHAELERQMGVPQPVWNDAVATALRGFRSRMSPFVRKWRRTARERQPFTYLGKSMWAIEYLTDTRRLLMTWSLLGRVTGEIRRLDRAGRGTFAANLLGHLDRAKEDRLKTGADLIVRAALGYVRDHAGRWEQRFAPCDAVLFEDLSRYRMRTDRPRRENSQLMRWAHRGVPAEVTMQGELHGLGVVETGAAFSSRYHARTMTPGVRCRPLAASDMGDAFLREALLEDGIILEQCRPGDLVPRAGGEIFACVSAAGGLIRLDADINAAQNLQRRFWTRHAAAFRLPCVPAEVGGKDAWVPRQMGKRLLGALGGYGVLRPTGHESGSCRWERVRAAAVRGAATSDGDVTSDLEGEELAGLAEEAEAAAGRVEVFFRDPSGVILPEALWYPSKTFWSIVRAKTLAGLKARLGLVQDTM

SEQ ID NO: 279 - protein, 1120 aa, unidentified
  REGION 1..1120: note = Cas Enzyme sequence
MPVRSINLKLLIPRDDSHASLRQTLWVTHSEVNAATRYYEEQLLALRAEPYERGQTSSNQPASKVTPEEARALALSVARARQAENLRRAGSASTVVGSDDDVLAAVNDLYRKLLPEETGEGSAQDANAYLSPLTTPGSKGFAAAADKLGRPRPNWVAMPPDDPAAADAAVAWFDSAASAEWQKDTGSPAKWLRAARQNKSDWPKLFREKLEELQQKSAQGPEAVIARLQTLHLLPLFEPYFPKRMVEQVRGGVTPWDRLAFRLAVSHLLSWEAWCRRASDDRDRRIKRRDDYAAANITSDIGPLIEKIRVFETARAQELSRLGLGQAEYQLRPRQLRGWADLREAWRKAKARDAGALRTIVAEHQTRKKGKFGDPHVFLWLAEPAQHDLWSGAADVVTSVATLNAIQALVDRSRETATMTLPDARLHPRAVQWAAIGDTNLRPYRVAVDDRGIARAKLSLLGRDVSEKLVEREESFVLSPSGQMRDMRLSMREKKQSIEFLNDGGETFTGTVGSADLLLDRRHLTRAREEEIQAGAIGPAWLKLVLDLDLNMPAGWDRKHARFRLHFLSASGSKSKAEDALRAGARVLAVDLGIRAFGACSVFVLQQARPSASAMCFEVPLADGTSMHAVHERSFHLQLPSEEPGRDGELWRRSQEEQLRRIRGCFARYRRLMRLAGAEVDVRSAVLDEIIPTLGDASTFAFESAAVDVLAVQRKSPLPIWDNAVGSLLRAYRIGLAPTIRDWRKAGRERQSFTRSGKSMWAVQHLTDVRRTLMSWSLLGRQSGEVRRLDRSGRGIFAAHLLEHIDNLKADRLKTGADLIVRASMGYVRDKAGNWLQRHAPCDVVLFEDLSRYRMRTDRPRRENSQLMRWAHRAVPGEVAMQGMLHGLEICETSAAFSSRYHARTQAPGIRCRALTRDDLGNAWLRADLEQVGIDLEVCRAGDLVPRDGGEVFACLDGGGNLVRIDADINAAQNLQRRFWTRHSTAFRLPCTLGDRNGQPIWVPRPMGKRLSGAIGGTGLLVPTGHDTGSCRWEQLKTRGAARSGSEGEEVKFGGDEEEDIAALAEEAEIESGRVEVFFRDPSGGVLPAGLWYPSKTFWGIVRARTIAALKRGLGAGGSA

SEQ ID NO: 280 - protein, 1121 aa, unidentified
  REGION 1..1121: note = Cas Enzyme sequence
MLMRQQPISDEDAPQGDILELARKAQETNGKPDRPGSDEEVRGLLKRLYVACVPSALKESQPNCQRIAREYIHHLCNPESTMGMGKSKGGAKPRSYFMADGAEKDEQIRKEGARKAERIRTASYVRLRALGILPLFPIATRVSERGSRREWRGEGSRKSKPGRVRTFDYDMLQQALERLNSWESWNHRVKKRRAELAEKQTNLRKQCDLDSPCHQRLIQYERSRTVRLNETALESERGYTIRSRSLRGWTELHERWLKISKADRSEAALRKIVAEMQTRLRGKFGDASDLYPWLAKPENHLAWDERAEKNALPIHARYNEAVAELEAAKEEANYTPPDALLHPLWARSGHSGDQNIHSYHITETDGNLSVEMRLLFEDPEGRVTERDEKIPLRPSGQWNRAQRGDTPPLRLVRFEDVPKEFHTGAKNDAKCTWVAFTDPGTGGLVHGSLGGARLQLERSDFRLGAVPARGKTKREMEFAEGNIGRAYLNLTVSLPNPPKNSAHLALVRPKPKSDTALAVSVDYYLRGSGKEDKRKKPFFLTDVVCGAGKMTDGLRIMAVDLGLRQLAACAVFELTREAPKVKLAFAVADADGLWMVQNRKFLIHLSGEAEDGDAASRRDKIREERFDLRAAVRRLSRLLSIGRLDEPEEKAEELGGMVGSSDWENSERRKKVDGILDPKLLESLKPFAEKPNDPRWPEAVKAVHRQWEASLGKAIAEWRRRGRMRGKQATERGYGGLSLWHVEELQETRRLLNSWSCHSRDYETMKDGSRRPAIVRAKKRWGLAPGEEPVGADLDERLLHHINNLKEDRQNVGADKIVMAALGFEYEGKAKGWVQHHPPCQFILFEDLSRYRFKTDRPRRENSMLMKWAHREIPRTVAMQGEVHGLVVGTVAAEFSSKFRAGAQALTPGVRCHEVTARDLQPGWFRSVMETDIAQKRRKELPGVGQLVPIDGGEWFCTLNADGSLYKTHADLNAAQNLARRFWTRYRDLYRLSCRKADLKGQEVWVPKTIGKRVGAALKQLIKAEACKLIPIDGDPEEGCRMESATLREIGAKKTGDEAPDQEGLADEMEEVAELRGEGMTFFRDPSGIICPADLWFPAKVFWGRVRSRVGAVLAGDDLKY

SEQ ID NO: 281 - protein, 1122 aa, unidentified
  REGION 1..1122: note = Cas Enzyme sequence
MTNSDSVELRKGLWATHELLNKGVAYYMEWLILLRQDTIKMPEGVIKPKEAIQSELLQRVKAQQLLNNHQDKAEEESEVLAVLRQLYELIVPSSVGGTGDAQMLARKFLSPLVDPNSEGGKGTSKAGRKPRWKILKEQGDPRWEEEYEKDCARKEADETSKVLFKLEELGLKPLFPLFTDTRKDINWLPKANRQFVRNWDRDMFQQAVERLLSWESWNRRVADAKSKLEEKATEYYDKYLSSVTETVQKLKRYERERAVELEQTTGNKSDSYRISIRSVRGWDRIYPLWLKRSVNATPTELRDILKSVQREMSEGFGDPQLFIYLAQPENRDIWYGSNEKARILNHYAIYNGILTKLEQAKEQATFTMPDPIDHPLWVRFDARGGNLYTYILEEDEGWRVQFERLLWPNERGWEEREKVNVKVAPSKQLVRKAKNGYQKIIELVNNPKGKQEVIYRDYSTMLPFDGVLGGAKIQLNRYYLEKSKEKIARGQIGPVYLNISLEVTPIQEVKNGRLQTPLGKALTIVKSDWPKIVDFKSEQLQQMLTEQNSNKGDLKGVRSLAEGLRVMTIDLGQRASAAVSIFEVTAERPSDEKTKLFFAIPDTPLYAVHRRSLLLNLPGESPDKETEQRRKDRYSSYRAIRFQVRMLAQILKLHTKETSEERLTELQSFLKAVTEYELWDDEIKSLWKQELNKLRKSVNQSNEEWVQEIVLTHRSLESRVAKNISNWRKSLSNKRGGFLANSRYKIAGLSLWNVDDLTRNRRLLLSWSKRSRIPGKMNHLQHEERFGLHQLVHLQNVKNDRLKQLANLIVMTALGYTYDQERKVWLETYPACQVILFEDLSRYRFKLDRPRRENSQLMKWAHRSIPKTVAMQGEIYGLQVGDVYAAFSSRFHARTGTPGIRCKQLKECDLNDSFIKEALIRDKFITEEKWSSLKAGDIVPWKGGELFATLEKNASDKNGSKLLLIHADINAAQNLQRRFWNHRSELFRIACRRTKINDGEVYVPTSQSERWKKQMGKGYFVKDNNYSGRDNELEKVEAYEWNNMERIRQEVVSIDETIELEDMEEINQAIEEELESKGDYVTLFRDPSGVIFPDYLWIPQVQFWSVVKNKIQKELHKRIFGN

SEQ ID NO: 282 - protein, 1123 aa, unidentified
  REGION 1..1123: note = Cas Enzyme sequence
LTKDEAYGRLDKKELIREDLLNNQLMRQLTPEEKSLVKEFDTFTTYFTGFFENRKNMYSADAKSTAIAYRLIHDNLPKFIDNIKNFDKLLQTDLATKLVGLSQSFEEQLNGADIRDLFTLANYSSVLTQEQIDNYNTVIGGKTYQEGNPIQGLNVLVNLYNQQHPEQRLPLFKLLFKQILSDRTSASWLPEEFKTDNAVLKAINDYYSESTNVLSNGSELKNLLQTLSSYDLSKIYIANDKSLTEISQRVFGDWSTINRAIFENLKLSVKPKRKEGESDFEARLHKLMKNTDQYSIQYINDCIASANIENKSNIEDYFAKLGEVNTADEQQANLFTRIELAYADAKSLLSNDYPANANLAQDMDATDKIKLLLDVIKDLQAFIKPLLGKGKQGDKDELFYSSLTQLWEQLDDITPLYNKVRNYMTRKPYSQEKIKLNFENSTLMDGWDLNKESDNTTVILRKDGLYYLGIMNKTANRSFDVRMLSSDGDCYEKMEYKLLPGPNKMLPKVFFSKSRIAEFAPSEKVLEIYEYGSFKKGDNFSIDNCHALIEFYKKSIQKHEDWSKFGFHFSDTESFDDISGFYKEVEQQGYKLTFRNVSAKYIDTLVDEGKLYLFQIYNKDFSPRSKGTPNLHTLYWKMLFDERNLSNVVYKLDGHAEVFYRRKSIISNNTVHRANVEINRKNPRNKGARSKFPYDIEKDKRYTVDKFQFHVPITMNFINEGVRNINPLVCEYLKNTDDVYVIGIDRGERNLLYYSLIDKNGNIIEQDSLNVIGDFDYLNKLNEREIERDNARKSWKSIEGIKELKEGYLSQVIHKIASLMVKYHAVVVLEDLNFGFKRSRQKFEKQVYQNFEKALIDKLNYLVDKRADADAMGGLLKAYQLANKFESFQKLGKQCGFLFYVNANYTSKIDPTTGFVNKLNTSYETVDKARSLFNKFKSIRFNPHADLFEFTFDYNDFSKDFEGTKTLWTVCSNGERIEQFRNPDKANKWDTRTVVLTDAFEEFFARNGIDISGNIKAQITERADKQFFVQLLHLLKLTLQMRNSSENEDRIVSPVRNSNGEFFDSNNPGAMPKDADANGAYNIALKGLLTVQRIKQSTKPKPNLAITTIEWLKFIQDKPYSEF

SEQ ID NO: 283 - protein, 1124 aa, unidentified
  REGION 1..1124: note = Cas Enzyme sequence
PRWLLFDVLAFKEALKALHQIESKKEERDEQQTELIEKLEYQRQCTLIREKSLDGSVSVNLDLKKAILERKAWKANAEGEETQPAPIIVGDPRIKRLEELLSSDLAVEDSMNGGEEVEHGLQPRTIRGFREVRKKWNDALGENAQYTDAARTKLWNLLTDYKKENVQTMGSPAIFDAMVEEKNWLIWREPTAEQLREWRKAARLPDDAEFAKDPLQALTDERELLSDIERLRGPIRLTPADPEHSRRQFYFSDASALDKKNRLRHDQQTLDTEVAVAIGGKWEVKWVRIHFTAPRLLRDQLNNTTGADSAWQQAMMTALGLKAGLTKTEKGEVRAATFAECTAVALMPEIGANGEKRILLNFPLTLDGEAIAKQLGKAARWDGLQFGGADKESYWLRWPTTWIDEKKERKKAPPAPWWKSAESFRCLSVDLGQRDAGAFALLEASQGNPPKPGISRKLGVADGKTWWATVRATGMLRLPGEDALVMRDGKWQEEFSGERGRNLVAGEWQETRGICTALGFQPDKLLGTDERRYSFPEANDQLLYALRRAQSRLARLQSWSCVAHKESDEKKRAASEKRRTRIKEQIVEAITTREADKIKAAKDHGQELLERGHWLDEVKNLVEKEAWDAIAIRIKKEIESERAIIQRELIRIADRIQPLRGRQWEWARREDGINYMLRQTIRGSDGRAKLLAGQRGLSMERIEQLESLRQRCQSLNRALRQEPGQPPNLGKSKRGIELPDPCPELLDRLDALKEQRVNQTAHMILAQALGVRLRAHADDAAARAARDIHGEYERIPGREPVDFLVLENLDRYLASQGRSRGENSKLMKWSHRAILGKLKQLCEPYGLRVLETPAAYSSRFCSLTGVAGFRAVELTPDSAKEFRWKKHLDRLADPEREKKLSKDERAESQRVQSLFAELERMNTDIRKANPARPKWRTLLAPVAGGPIFIPASDMEWFDRKNRKTGRIEKVWGFKPIGGSRPVVAQADINAAINLGLRAIAAPDTSDIHLRIRAKREGEKFVVRADNKREKARWGDKLVKADVLKESERKKLLADAHLNFFADLSGVAEYDQAEIAGEKGFASGRGIWGTIKGNERHTGKDWLRVEEINRARIQKWERGDDDVRM

SEQ ID NO: 284 - protein, 1125 aa, unidentified
  REGION 1..1125: note = Cas Enzyme sequence
LIDNVFPGIYESDALKSFNRFSVYFRGFQENRNNIYSAEAISTGVPYRLVHDNFPKFLADIEVFGNIKANCPEVIEQAATELQPILEGVMFEDIFTIDFYNSLLTQDGIDFFNQVLGGTAEEDKQKYRGINEFSNLYRQQHPELTAKKKALTMIPLFKQILSDRDTLSYIPQQIESEQQLIDLLNLFYSHITAFDHNGKTVDVLKELTKLTGRINDYNPDGIYLSAKSLTVASQKLFSKWSVITDRLYEQAIKRFGDVSVAKNKKKIDAYLSQDAYALSEIPLDDDHSLSMFFAELPQTIEIISSYWLQFKEWCKGESKQLFLNNADGTEIVKKFLDSIMEILHKCSVLVVSVEHDLDKDFYNDFLPLYAELENVIIVYNRVRNFLTKKPSDTKKFKLNFGVPSLGDGWDQNKERDNKAIILFKDGKSYLGIMNAKDMPMIKERNESTPSSYKKMIYKLLADPAKDFPHTFFSKKGIDTYHPSRYILDGREQGKYKKGETFDKKFMWDFIDFYKDAVAKHPIWSKFNFVFSPTESYEDIGAFFSEVSKQAYKIRFSYVEESQINEWINNGQLYLFQLYNKDYAEGARGRKNLHTLYWESLFSPENLSNIVLKLNGQAELFYRPQSIKQPVTHKMGSKMLNRRDKSGMPIPEAIYRSLYLYFNSKKTESELTLFEKSYLDQVVVKDVTHEIIKDRRYTKPEFFFHVPITFNVNADGNEYINEQVMEYLKDNPDVNIIGIDRGERHLIYLTLINQRGEILKQKTFNMVGNYNYHAKLEQREQERDQARRSWQSIGRIKELKEGFLSAVIHEITMMMIENNAIVVLEDLNFGFKRGRFKVERQVYQKFEKMLIDKLNYLSFKDRKTDDAGGILRGYQLAQQFTSFQRLGKQSGFLFYIPAAYTSKIDPVTGFVNHFNFNDITNAEKRKAFFMKMERIEMRNGDIEFEFDYRKYKTYQTDYQNIWTVNSSGKRIVMRLDENGRKKMTDYYPTQEIVRAFKEKGMLLNEGADIKALLADIDASPMNASLYGVMFYAFQKTLQMRNSNSTTEEDYILSPVAQNGKQFNTDTEANKGRDTNGNWISKLPVDADANGAYHIALKGLYLLMNPQTKKIENEKWLQFMVQKPYND

SEQ ID NO: 285 - protein, 1127 aa, unidentified
  REGION 1..1127: note = Cas Enzyme sequence
MPVRSIKLKLMTHSGDNAAMLRKALWQTHKLHNEGVAYYMKLLIMLRQRDVYKQDLKEPAESFRLDLLAHVRQQQQRNGSAHIVIPEMELTAALRELYELLVPSHNGGKGDSQQLSRAFLSPLTDPNSQGLEGTAKAGAKPRWQKMQAEGHPDWEAEKERAEREKEADPARKIMKQLREWGLKPLFSLFTNEQTHIQWAPAKKDRDFVRTWDRDMFQQALERLLSWEQWNHKVIEERALVIARREAYESEHFASEAQQAWLQRMRGYELERAAKLAEQSLGLTGPFRIKSRQLRGWKRVHDLWRKLDKKGQRSLDHCWEAVAKIQGAQPKDFGDPELYRFLAEPANHDLWLEEPERLFHLVTYNALLEKEELSKQQTTLTLPDAVEHPLWVRFDPKGGNLHSYELQSEDDKSPQKHLSVTFARLIWPDSTGDGTPLWIESGPIQVGLATSAQFYRQFRLLPMGDDNRLGKALEVQDYSAADTKTTGLLGGAKLQFERPYVEKHWQTVSEGDIGRAYFNVTIDMEPIQPMKNDRLISGLGKAFKTFKRDFMEVTQYKPADLEAWMATQPAKTELTGTKALQEGLRVISVDLGQRTAAAVSVFEVVRGKPDADKLFYPIRDTESLYAVHRRSHLLQLPGEAVTPEAVSERQSRNRAMYGIRMQVRLLSGILRLYGKEEAASRRKSITRTMDMIRSTDNLSMDDKTRWSSVYQRLADAAELDVPLWQSTVITAHRELEAIVSQAFSTWRTSSRHRGRGVGGKSMWSLEELDQTRKLLISWSKRAREPHAINRLDRNERFAQRLLTHLQRLKADRLKETANLIIMAALGYKYDSPEKGWLPVFPACQLILFEDLSRYRFKMDRSRSENSKLMNWAHRSIPREVYMQGQVFGLMVGHVPSEFTSRFHARTGAPGIRCHVVTQADLDGRTAMLKLVDQDFLAEVRDELQPGDLLPFRGGEIFVSLNGSTEKERALNRLHADINAAQNLQRRFWSRYPQDPIRISAQRITADQEIAYEPKTTKMKESMGKGFFQEFEISKSHHVYKWNSSGKLGGKKRIADSKDMEETDDLAEEAAAAEELMDGYVTLFRDPSGYYRASDLWVPQVDFWGMVTRRLESLLKAAINERPGRALSR

SEQ ID NO: 286 - protein, 1127 aa, unidentified
  REGION 1..1127: note = Cas Enzyme sequence
MYVADGKATSIAHRMIDDNLPKFIDNVEVFKKIADCAEIGIHFATLYKAMEQYLNVPTINEMFLLEYFPMVLTQKQIDVYNAVIGGKTEADGTKIQGLNEYINLYNQQQKDKSKRLPKLKSLFKQILSERNAISWLPDEFESDDEMLESIESCYQDLRSTVFDGNHSLQSLLSSINDYDLNHIYISNDSSISLISQKQYGGWGVIGNAIIENAKAANPQKRNESNEKYEERISKIQKGIDSYSIGYLNDVLRNKLDDFKPIEDYFLKMGGAVDNETEQKPTFFTRIENAYTEAHTLLTSPYPEGRQLSQDKKNVEKIKNLLDAIKELQHFVKPLLGQGAESEKDNNFYGEFIPFWELLDQITVLYNMVRNRMTQKPYTDEKIKLYFDNNATFLRGWVDSKTESSDNGTQYGGYLFRRQNAIGEYDYYLGVSKDIKLFRRFKEVEESDKSTYERLDYYQLKSKTFYGTLYKGDYEIESSNIKRAIDNVVNSVGSTSIKGKLYNEKSKRQPKTATAIGYLKFIKQQDEELYNILLKDKSFDDSNKAIIASMKSTLLSLNRIPSAKEYTQKNYVLFSAMMDDIDILLQEKLFSYFPVSQRELDEAVERNLRPLYLFKITNKDLSFAENYENGLRKNRGTDNLHTMYFKALMSGAQSVFDIGSGAIYFREHKISYTEEQLKRGHHYEILKDRFSYPIISNKRYAIDKFQFHLSVNLNYNANKNVDINTLVNSYLKESNSTHIIGIDRGERNLLYLSLIDLHGNIVEQYSLNEIVNKYKGNTYCTNYHSLLEAKENQRNEARRSWQEMESIKELKEGYLSQVIHRIVELMVRYNAIVVLEDLNMPFKRGRQKVEKQVYQKFEKMLIDKLNYLVDKKLAITEPGGVLKAYQLTNKFESFQKMGKQNGFLFYVPAWNTSKMDPTTCFVNLFNTRYENMAKAKAFFGKFESIRYNSEKGWFEFAFDYNDFTTKALDTRTRWMLCTHGTRIETKRDPSQTNQFISEEFDLTSRFIELFSQFKIDPNGNLMEQICSQTEAAFYKSILHLLHLTLQMRNSKTRTDIDYLISPVMNSHGEFYDSRHCGKNLPDNADANGAYNIARKGLWIIEQIKQSEDLAHLKMTISNKEWLQYAQKE

SEQ ID NO: 287 - protein, 1129 aa, unidentified
  REGION 1..1129: note = Cas Enzyme sequence
MTVRSIKLKMKTQTDPESLQLRKALWKTHQLLNEGVAYYMYWLILLRQDSYINEEGREYKKEEIQKELLEKVSGQQKRNDWQGDLGSLDILIPLRKLYELIVPSSIGEKGDSQISARKYLSPLVDPDSQGGKGTAKSGRKPRWQKMKEDGNPEWEEEYKKDMTKKESDPTTSILTELENYGLKPLIPLFTEEIKDIAWLPRKRGFVRTWDRDMFQQAIERLLSWESWNIRVKEEKQKIEQAIEDYRNKYLQDGEEWISKLREIEKIREAEITDVSYATKQGYLITRRELKGWEKVYEKWSKLIDAPLYDLKKVVTDVQNSMRREFSSAIFNILAEKKNRDIWVGQPNRLLHFAAYNVLLRKLQKAKDQATLTLPDPVNHPLWIRYDARGGNIHSYTIFQVDKMEVKVNLERMVWPNDSTWIEKEDITVHLAPSEQLYRQIAVQDNPSGKQEIDFIDYSSRVPLKGELIGSKIQFDRRYLENHTEELLAGNIGPVYLNLGVEVKHYQEMKNGRLRTPIGQSFTVKSLEWQKVIGFKAKELAEWMEQTAETNEKGIDSITEGLRIMSIDMGIRTSATVSVFEVVKNQPDNNKLFYKIQDTDLFAVHCRSILLNLPGEQVSKDIIKERDERYTERRFIKSQIRLLSKILQLNNQETQDGRKNILIGMIDTIESNKSLLNDQKQAWISKFNILAKNAYLDQVGWKQKLIEIHHEIEPVVGKLVSEWRRSFSKNQKNNKNRKNLAGLSMWNIDELEDTRRTLSSWSNRTRNPGEPKPIDPKFGINLLTHIQNLKDDRLKQMANLIVMTALGYKYDPGEKQKEERWKKAYPACHVILFEDLSRYRFNLDRTRLENSKLMKWGHRSIPKMVQMQGEIYGLLVGDVYSAFSSRFHAKTGAPGIRCHSLDEEDVNMLKNVSEIGGFDKLEDFKDLKREYYKLFGSVDKDYLAKMIERSDLIKSGTIIPKEGGELFITLAGHYKSNPKLSIIHADINAAQNLQRRFWQSNSEIFRVSCKLVKMSDGEYYIPKYSSKTFEKAMGKGRFIKNLDSEVYKWGNSSKMRIKTISTDKEIEFEEMEDFEQALEDAQEIQDGFKTMFRDPSGFFLATDKWLPQKEFWSMVKTVIHSRLRESSFSK

SEQ ID NO: 288 - protein, 1129 aa, unidentified
  REGION 1..1129: note = Cas Enzyme sequence
MATKSFILKMKTKNNPQLRLSLWKTHELFNFGVAYYMDLLSLFRQKDLYMHNDEDPDHPVVLTKEEIQERLWMKVRETQQMNGFKGEVSKDEVFATLRALYEELVPSAVGKSGEANQISNKYLYPLTDPASQSGKGTANSGRKPRWKKLKEAGDLSWKEAFEKWEKERQEDPKLKILTALDSFGLIPLFRPFTESDHEAVISVKWMPKSKTQSVRKFDKDMFNQAIERFLSWESWNEKVAEEYEKTESIYESLQKELMGKSANAFEIMERVEKAYEAHLREVTFSNSTYRIGIRAIRGWTEIVKKWVTIDPDAPQDNYLDVVKDYQRRHPRESGDFKLFELLSRSENHAAWREYPEFLPLYVKYRNAEQRMKSAKKQATFTLCDPIRHPLWVRFEERSGTNLNKYRLIMNEKEKVVQFDRLICLTTDGHYEEQEDVTVPLAPSQQFDEQIVFSTEDTGKGKHSFSHYHKGINYELKGTLGGARIQFDRDHLLRRQGVRAGNVGRIFLNVTLNIEPMQPFSRSGNLQTSVGKALTLKNFQVIAFKPKELTEHIKESEKNAPALGVASLQTGLRVMSVDLGQRQGAAISIFEVVSEKPDDTKLYYPVKGTDLFAVHRTSFNIKLPGEKRTERRILEQQKRDQVIRDLSRKLKFLKNVLNMQKLEKIDEREKRVERWIKNREQREENPVYVQEFETIRKVLYSPHSVWVDQLKTIHHKLEKQLGKEISEWRQSISQGRQGVYGISLRNIEDIEKTRRLLFRWSMRPENPGEVKQLQPGERFAIDQQNHLNHLKEDRIKKLAHQIVMTALGYRYDGKRKKWFAEHPACQVVLFEDLSHYAFYDERSRLENRNLMRWSRREIPKQVAQIGGLYGLLVGEVGAQYSSRFHAKSGAPGIRCRGVKEHELYILEGGQKVRNQRFLDSLVENKIIEPEEAWRLEPGDLIRDQGGDKFATFDERGELVITHADINAAQNLQKRFWTRTHGLYRISCESREIKDAVVLVPSEKDQKEKMENLFGIGYLQPFKQENDVYKWVKGEKIKGKKTSSPSDDKELVSEILQEASVMADELKGNRKTLFRDPSGYVFPKDRWYTGGRYFGTLEHLLKRKLAERRLSGGGRFKRGLSNGTYSDSNVE

SEQ ID NO: 289 - protein, 1130 aa, unidentified
  REGION 1..1130: note = Cas Enzyme sequence
DNYSESDIEKAVTASIHKAIPKVTGHNIKSAKFLQESLPELLKGSDEVTDKEDMLNTVNGLKGKLQVVEPLLTSRLTVLETLVPKRVAENYDRYLENVQKLKYILASSVKEEIEKSFPYATDYTDEAGYIICLSQAEIERYNEAIHGTVSEKGIEEKGINLIINEYNQQKGVKKLPMLKELHKQILYPTEKQYKVTAIESDSDLTERLKSALPDATVASDAISRTITAAGEDDVVISYNALHSLSFILCGDPAELPASLNTAETEEIERAAGDLTSPKAQKAFEKRLAELEKKHKSHSYTFRELESYTNADLLAKFKKAYNVAYMTAKKETEDLLKALPGFKNIKENASEQESLSMLYDAWTEYRSFLRIIRRKDPEAGDNGLYNIIDGNSDSIQEIGMLERKTLAYVTKNPDDMVEKNRAFFGSHSRHDMQWIQLDGRIDKQTVTVLKRDGKYYVLMLTDKTKPQNLMGEGPDKIFAQKKGQSAFMFLPMVIFKKAKAFFDENPTAGQYIIDNNMKKPVFMSRNIFDIYINKLYTRAACDKLGYSEESYREFLYIYIAFIKEFIDNYNEYSVFDIKLADLHSYENTQEFFNDIDAGNFTSRWLSANGAKIDELVEQGKALMFLMYSRTLYTKDHNRSSYDVIPLTALSEDSKGVQLLSNPKFFTKDASITNPVVHKKGSELVCRFDKDDKRIPEDVYLELLRYYNEKVFMPDLSKAALEYVRSDKVKHFKATCDIIKARRYTMKRTYVSFSVRINSDVKPSSHGYERALNQKVNEMAGSMNVLSVVRSKEDLVYYTVTAPDGRILESQSLNVIRRHDYWAELKDLSDKRREDKSKKWKYDTKVKDKRDAYIGEAISHLVRKVIEYRAVVVLELISDSIKDKVSALDNTVFKGFEEKLISRLADLHFKDIENGEPGSVSNPYQLCSHSGNTYQDGIVYFMTTDYTKGVDLNTGFVNLFGFSQINTVSEKRRFLSSFDSITFDKATGRFKFVFNYDSFSIKKKPEIKEWTVYAGGPVVRYNREFKYNTYIPSTAPEVCAVIKESHGLDDDFASLANEGELTGKEASALLSIFKTAVFGAVYSHDGVRKQYLSPISQKECDYAENCALALAKKFRWFQIDKESRGEWINSII

SEQ ID NO: 290 - protein, 1131 aa, unidentified
  REGION 1..1131: note = Cas Enzyme sequence
MEKLEEKMRKTISNEFCNDEMYKKIFSEKILSENNEEDVSDIVSSYKGFFTSLNGYVNNRKNLYVSDAKPTSIAYRCINENLPKFLRNVECYKKVVQVIPKEQIEYMSNNLNLSPYRIEDCFNIDFFEFCLSQGGIDLYNTFIGGYSKKDGTKVQGINEIVNLYNQKNKKDKEKYKLPQFTPLFKQILSDRDTKSFSIEKLENIYEVVELVKKSYSDEMFDDIETVFSNLNYYDASGIYVKNGPAITHISMNLTKDWATIRNNWNYEYDEKHSTKKNKDIEKYEDTRNTMYKKIDSFTLEYISRLIGKDIDELEKYFENEVKNFVMDIKKTYSKLTPLFDRCQKENFDISEDEVNDIKGYLDNVKLLESFMKSFTINGKENNIDYVFYGKFTDDYDKLHEFDHIYNKVRNYITTSRKPYKLDKYKLYFDNPQLLGGWDINKEKDYRTVMLTKDGKYYFAIIDKGEHPFDNIPKDYLDNNGYYKKIIYRQIPNAAKYLSSKQIVPQNPPEEVKRILDKKKADSKSLTEEEKNIFIDYIKSDFLKNYKLLFDKNNNPYFNFAFRESSTYESLSEFFEDVERQAYSVRYENLPADYIDNLVNEGKIYLFEIYSKDFSEYSKGTNNLHTMYFKALFDNDNLKNTVFKLSGNAELFIRPASIKKDELVIHPKNQLLQNKNPLNPKKQSIFDYDLVKDKRFFENQYMLHISIEINKNERDAKKIKNINEMVRKELKDSDDNYIIGIDRGERNLLYVCVINSAGKIVEQMSLNEIINEYNGIKHTVDYQGLLDKCEKERNAQRQSWKSIENIKELKDGYISQVVHKLCQLVEKYDAIIAMENLNGGFKRGRTKFEKQVYQKFENKLINKMEYMADKKRKTTENGGILRGYQLTNGCINNSYQNGFIFYVPAWLTSKIDPTTGFVDLLKPKYTNVEEAHLWINKFNSITYDKKLDMFAFNINYSQFPRADIDYRKIWTFYTNGYRIETFRNSEKNNEFDWKEVHLTSVIKKLLEEYQINYISGKNIIDDLIQIKDKPFWNSFIKYIRLTLQMRNSITGRTDVDYIISPVINNEGTFYDSRKYLDEITLPQDADANGAYNIARKALWIIEKLKESPDEELNKVKLAITQREWLEYAQINI

SEQ ID NO: 291 - protein, 1131 aa, unidentified
  REGION 1..1131: note = Cas Enzyme sequence
HKYFIEDNLIRCKLEQDDLNKLISLIQQKESCSQKERKNITKQIQAQELKLRKSIVKSFESDERFEKLFCEKLFSELLPTICSEQELKDVELFKGFTTYFSLFNKTRKNLYSFEEKNNTIAYRAINENFPIYLKNQMILNDIKENYEELFNEPVFNEFEKFISTGYGISSYYISQYNSFLSGKYDAEGNCFEKGLIQLTNEYNKKNKSTKIKAFKQLYKNIMSDNNPLFTIDCFETTTEVKETIQTFHEKTSTIVSNFIKYIKEKGLCYENIYVQKKNLNTFSSITTGTVFDLQSTIKENKKELYSINELEIFVNEANKTNEKQIVFDMTKYKEQIQSFNINKYYSKINFEQITDIQYDKTQALDIKNYLQAVLDYYNLLRIVEVNDFENIDIDEEFYLNLEKVLNELNPIVKIYNKTRNFVTKSLKQERKIKLNFDCSVLMDGWTESVEKTKNGLMFYNSEADKYYLGIYNQNAKKETYKIVENSSIKKMYLNMIPEPYKMLPHVCFSKKGIETFKPSQEILDGYKNGLHKKSSENFDIDFCHKLIDYYKNCIETREEWTCFEFDFKETKDYKDTSEFFDDVSNGAYKVTLQNIDKVQFYKSVDEGNLFLFEIYNKYLGKKSHGKDINTNIIRSLFDERINNIQLCAGAKVFYRPQMIKENITHKKGSWIVNKISKEGFTVNSEVYKNIYNHLNYGDKLTTEAEVLFKSGSIVYKKADRDLYKDKRYMSENFSFSFPVKINYRGKEINSYNFNKHVNEIIKDDNNLNIVAVNRGEKNLIYVVVMNRDGKVLLNKSLNLVQVGNQLVNYKNKLEEKEKERAKARVSWQEIKNIRNLKEGYLSCVVSEIVNLIIEYNAVLVMESLSNEFKSKRQSIESNVYEQFEVALINKLSCIMDKHKLNGEPGSILHPYQLVPKFESYEKIFMQFGFMFLLNPAYISRIDPFAGLLNIFNFNELTNSKKRYDFISKFDFIGIRDGKLTFEYNLQNFSKDFSGKQTVVGTGNRNIWDNDSKQIISININEETEILHKYFNSAINYVDLINEQTDKNILKLLIKVFSSLIGFKSFICDEWIFISPSEKEVESKKYNIDFISAYNLANKLRLMLNCLRDTDELINLKTVDYFNKVQTQGLTV

SEQ ID NO: 292 - protein, 1133 aa, unidentified
  REGION 1..1133: note = Cas Enzyme sequence
LFKKKLFDDEEFISLAQNQEESNALNAFKGFTTHFKDFQENRKNMYSEDKESTAIAYRIIHENLPVFITNNIRFEKIINELDRSNIHSIEKELKEELANNKLKDIFNIEYFQNTLTQNDITRYNTIIGGKVKADGKKVQGLNEYINLFNQHNKDKKLPLLKPLYKQILSEENSASFIVPAFEKDNEVLQSIFDFWNKCIIDAKGPISGKKYNLLSKIQSLLQNLDKLKNNQLEEMYFENENLSTISNDVYGQWNLIRDALGNFYNSIDAKKNKKDYYSWKEIQDALVYYKQTNDEYKDIDQKAFLIYFKEMKVNDGEENTNNNIINLINERYKRIEPLLKEDRDNRKDLHQDKGKVAIIKEFLDSLKLLQNTIKLLYVDDSLDNMNYDFYNQLTDYYETLRPLNTLYNRVRNYMTRKPFSEEKFVLTFNSPTLLDGWDLNKEEANLGVILRKDNKYYLGIMNKGDNKIFKKYDEEPGDDYYEKMVYKLLPGPNRMLRKVFFSNKNIEYYKPNQDIQNLYNKGEFKKGESLNKESLHKLIDFYKNSISKNGDWSVFNFKFKKTTAYDDISQFYKDVENQGYKLFFKTIKTSYIDQLVNEGKLYLFQIYNKDFSENKKRKDESNPNLHTIYFKNLFSEDNLKNVVYKLNGKAEVFYRKKSIEYPEEIRRKGHHYNELKDKFDYPIIKDKRYSEDKFLFHVPITLNFLAKSDEKVNEMVKNYIAATNEKIHIIGIDRGERNLLYLSLIDSNGNIVKQQSLNIIELPKYQKQIDYHAKLNEKEKQRLAARQNWDVIENIKELKEGYLSQVIHQIARLMVDYKAILVMEDLNFGFKRGRFKVEKQVYQKFEKMLIDKLSYLVFKEKNLCEPGGSLRAYQLSAPFKSFKALGKQSGMIFYVPAQYTSKIDPTTGFYNFLNIDVSNLARSKETFSKFDKIVYNKKEDYFEFYCKMINFESANQLTKKSQNKANAELKEFQWILCSTHHDRFKVERKNNQINYCKINVNEELKKLLNSKGINYEKSNDLKSEILNIDESKFFKELGYLLKILVSLRYNNGKKGSEEQDFILSPVKNASGKFFCTLDNNNTLPLDADANGAYNIALKGLMIVQRVKAGGKLDLSISKDDWINFLIMNKKLPK

SEQ ID NO: 293 - protein, 1134 aa, unidentified
  REGION 1..1134: note = Cas Enzyme sequence
MNELVKNRCKQTKTICQKLIPIGKTRETIEKYNLMEIDRKIAANKELMNKLFSLIAGKHINDTLSKCTDLDFEPLLTSLSSLNNAKENDRDNLREYYDSVFEEKKTLAEEISSRLTAVKFAGKDFFTKNIPDFLETYEGDDKNEMSELVSLVIENTVTAGYVKKLEKIDRSMEYRLVSGTVVKRVLTDNADIYEKNIEKAKDFDYGVLNIDEASQFTTLVAKDYANYLTADGIAIYNVGIGKINLALNEYCQKNKEYSYNKLALLPLQKMLYGEKLSLFEKLEDFTSDEELINSYNKFAKTVNESGLAEIIKKAVPSYDEIVIKPNKISNYSNSITGHWSLVNRIMKDYLENNGIKNADKYMEKGLTLSEIGDALENKNIKHSDFISNLINDLGHTYTEIKENKESLKKDESVNALIIKKELDMLLSILQNLKVFDIDNEMFDTGFGIEVSKAIEILGYGVPLYNKIRNYITKKPDPKKKFMTKFGSATIGTGITTSVEGSKKATFLKDGDAVFLLLYNTAGCKANNVSVSNLADLINSSLEIENSGKCYQKMIYQTPGDIKKQIPRVFVYKSEDDDLIKDFKAGLHKTDLSFLNGRLIPYLKEAFATHETYKNYTFSYRNSYESYDEFCEHMSEQAYILEWKWIDKKLIDDLVEDGSLLMFRVWNRFMKKKEGKISKHAKIVNELFSDENASNAAIKLLSVFDIFYRDKQIDNPIVHKAGTTLYNKRTKDGEVIVDYTTMVKNKEKRPNVYTTTKKYDIIKDRRYTEEQFEIHLHVNIGKEENKEKLETSKVINEKKNTLVVTRSNEHLLYVVIFDENDNILLKKSLNTVKGMNFKSKLEVVEIQKKENMQSWKTVGSNQALMEGYLSFAIKEIADLVKEYDAILVLEQNSVGKNILNERVYTRFKEMLITNLSLDVDYENKDFYSYTELGGKVASWRDCVTNGICIQVPSAYKYKDPTTSFSTISMYAKTTAEKSKKLKQIKSFKYNRERGLFELVIAKGVGLENNIVCDSFGSRSIIENDISKEVSCTLKIEKYLIDAGIEYNDEKEVLKDLDTAAKTDAVHKAVTLLLKCFNESPDGRYYISPCGEHFTLCDAPEVLSAINYYIRSRYIREQIVEGVKKMEYKKTILLAK

SEQ ID NO: 294 - protein, 1136 aa, unidentified
  REGION 1..1136: note = Cas Enzyme sequence
DDKFKRIDKKELIKEDLVNFVTNQEDRLLIDEFRDFTTYFTGFHENRKNMYSAEAQSTAIAYRLIHENLPKFIDNMLVFDKVAASPVSEHFAGLYSNFEEYLNVMNIAEMFRLDYFNIVLTQKQIDIYNYIIGGRTLDDGTKIKGLNEYINLYNQQQKDKSVRLPKLKPLYKQILSDRNAISWLPEQFESDEKALEAIQKAYQELDEQVFNRNKEGEHSLKELLQTLAEYDLDKIYIRNDLQMTDISQKVFGHWGIISKALLEQLKKELPKKSKKETDEAYEERLNKVLKSQGSISIAQINNSVWAMGMEEQNSIQAYFARLGAVNTETVQQENIFSHIENAYTEVKDLLNTPYPSNKNLAQDKVNVEKIKNLLDAIKSLQHYVKPLLGDGTESEKDEKFYGEFVALWEDLDKITPLYNMVRNYMTRKPYSTEKIKLNFENSTLMDGWDLNKEQANTTVILRKDGLYYLAIMNKKHNRVFDVKNMPESGDCYEKMEYKLLPGANKMLPKVFFSKSRINEFAPSEQLMANYRNETHKKGASFNIHDCHALIDYFKSSINKHEDWSRFGFHFSDTNTYEDLSGFYREVEQQGYKISFRNVSVDYIHSLVEEGKIYLFQIYNKDFSPYSKGTPNLHTLYWNMMFDERNLADVVYKLNGQAEVFFRKSSITCERPTHPANQAIDNKNTLNMKKQSVFTYDLIKDRRYTVDKFQFHVPITMNFKSTGNDNINQSVNEYIQKCDDLHIIGIDRGERHLLYLTVIDMKGQIKEQYSLNEIVNTYKGNEYRTNYHELLSKREDERMKARQSWQTIENIKELKEGYLSQVIHKISELMVKYNAIVVLEDLNMGFMRGRQKVEASVYQKFEKMLIDKLNYLADKKKNPEEEGGILNAYQLTNKFTSFQKMGKQSGFLFYTQAWNTSKIDPVTGFVNLFDTRYETREKTKVFFCKFDFIRYNRDKDWFEFAFDYNKFTTKAEGTRTQWTLCTCGNRMETFRDEKQNSQWTSQECDLTDKFKEFFAKYGIDIHTNLKEAIAQQDSADFFKGLLYLLKLTLQMRNSKTGTDIDYMQSPVADANGNFYNSELCDNSLPKNADANGAYNIARKGLWIVRQIKASDDLRNLRLAISNKEWLQFAQNKPYLND

SEQ ID NO: 295 - protein, 1137 aa, unidentified
  REGION 1..1137: note = Cas Enzyme sequence
FEKIQTTLRKQIVKQLKEDECFKRIDQKELIKEDLLDFVTDENEKSLIKEFEQFTTYFTGFHKNRQNMYSDEAKSTAIAYRLIHENLPKFIDNISTFEKVAATDVKNNFTKLYDEMSEYLNVNEITDMFKLNYYSEVLTQMQIDVYNAVIGGRAEEQGKPKIQGLNEYINLYNQQQTDRSQRLQFKPLFKQILSDRNAISWLPEEFNNDNEVLENIEKCYQEINEKVLSGEHSLKNLLLNLKEYDLSKIYLRNDLSLTNISQQLFGDWNIITKAIEADFVNNNPQKKNEKAEKYEERKNKYLKSFDSISIGYINDCLKAVQKEECVQDYFERMELTDKETKQKCNILDKIEKSYAEVKDLLNTSYPQNKNLSQDKVNIAKVKDLLDALKNLQRFVKPLLGNGDESDKDERFYGEFSTIVEILDSITPLYNKVRNYATRKPYSDEKIKLNFENSTLLDGWDVNKESDNASVILRKNGLYYLGIMNKKYNKIFKPENIKNDGECYEKMDYKLLPGANKMLPKVFFSKSRIDEFAPSKDIQDNYANETHKKGATFNIDDCHKLIDFFKSSINKHEDWKNFGFKFSNTNSYEDLSGFYREVEQQGYKISFCKVSESYINQLVDEGKLYLFQIYNKDFSPFSKGTPNMHTLYWKMLFDEQNLANVVYKLNGRAKVFYRKKSIGWSDEVMQKGHHYDKLKDKFDYPIIKDRRYTVDKFQFHVPITMNFKAEGINDINEKVNTFLKESNATHIIGIDRGERHLLYLTLIDLNGNIKKQFSLNEIVNEYNGNTYKTNYHDLLDVKEKEREKARESWQTIENIKELKEGYLSQVIHKITQLMVQYNAIVVLEDLNPGFIRGRQKVEKSVYQQFGHKLIDKLNYLVDKKVDADSEGGLLHAYQLTNKFESFQKLDKQSGFLFYIPAWNTSKMDPTTGFVDLFYTCYENEDKAKAFFEKFNSIKYNADKDWFEFAFDYNKFTAKAEGTRTKWTLCTYGNRIETFRNPEKNNQWDNREVNLTEEFKKFFNNDYSGDLKAKILTQTGKPFWEGLLHLLKITLQMRNSITGTDTDYLVSPVANEKGEFYDSRQCPDTLPKNADANGAYNIARKGLWVIEQIKKAEDVRKIKLAITNKEWLQFAQQKPYNNH

SEQ ID NO: 296 - protein, 1138 aa, unidentified
  REGION 1..1138: note = Cas Enzyme sequence
MKEQFINQYPISKTLRFSLVPVGRTEENFNKKLLLEEDKQRAEDYAKVKEIIDRYHKAYIDSVLSSINYVDGLPEYASLYYKNGKDEKDTKKMEELEASMRKFIAKALTADKRYKDLSSAKSMIEEILPEFVDENEKEIIYRFHNFSTYFSGFFTNRKNMYSEEAQSTAVSFRCINENLPKFLDNCRSFEKISADIPKESLHELERISLETYGIRPEDVFSVDYFAFILSQSGIDKYNGIIGGYTCSDGTKVKGLNEIINLYNQQVAKGDKSKKLPSIKPLYKQILSDRDSVSFLPEKFENDNEVVSSVNKFYRETVEKVLPEIRTLFDNFGSYNPDGIFVSSGLAITDLSNASFGNWNAFTSAWNEEYKETNPIKKGRSQEKYDEDMKAAFKKIKSFSVAEIQRLGFANRAEKSIGSVSDYYISSVSEKVDYIYKLFEKAEELLSSVYSEKYDKKLMKNDDAVELIKNLLDAVKDLEKTIKPLHGTGKEEEKDELFYGEFLSLYDALSTVDRLYDKVRNYMTQKPYSTDKIKLNFENPQLLGGWDRNKERDYRTVLLRKNGIYYLAIMDKSNNKIFENIPENASGDCYEKMDYKLLPGPNKMLPKVFFAASNASEFQPPEEILEIRKNESFKKGQNFNIDDCRKFIDFFKSSIDKHEDWSKFGFSFSETESYNDISEFYNEVKEQGYMINFRNVPVSYINQFVESGELYLFKLYNKDFSEYSHGTPNMHTLYFRMLFDERNLKNVVFKLNGDSEMFYREASIKDSEKIVHPANNPIDNKNPNNSKKQSTFEYNLIKDKRYTKHQFSVHIPITLNFKAGGREFINNKVRLAIKNSASGYVIGIDRGERNLIYISVINGNGEIVEQMSLNEIISDNGYKVDYQKLLDNKEKERDEARKSWGSVENIKELKEGYLSQVVHKICELVVKYDAIIAMEDLNFGFKNGRFKVEKQVYQKFENMLISKLNYLADKKAEPDSEGGILKAYQLTNKFDGTNKGRQNGIIFYVPAWLTSKIDPTTGFADLLRPKYSSIKATYDFFEKFESIRYNESEDMFEFAFDYSVFPKCNADFRKKWVVCTNSSRIRTFRNPENNNEWDNKSVCLTAEFKSLFDEFGIDYSGDLKSAILSISNKDFCYRLIGLF

SEQ ID NO: 297 - protein, 1139 aa, unidentified
  REGION 1..1139: note = Cas Enzyme sequence
MNEFLGLEEKTINICRELKPIGKTRSNIDKFKAMEDDDFIYKNKHVINDLLKKVAMEKVEKALKSISKELDFSEMFALMETLDEMQGEERGEVLQNLFAERIALLNELSTVFDFKFTNKKTIEVMLPEYVENHNFKNKDELMKMVEIIKPRQAKFERFEKNIDSLINMNLKKGSLSYRILVENPQIHLENVRLLTRFDYAGILREEPDEVISFCKNSSLDDYNSLLFQKNIDVYNYCVGVINQKLNEYCQQEKLSYSELELKTLRKLPLSERKSFFDKIPFFESDKELVESYNKLVTELNKHSFNSDVLSNDLNIYIKSNQINKYSNIVYGKWGIINDCLEEYCNEYGEKKEKLLNNISIYDINNIVEEFSEKLEIPYNNNSLQQIIEFSFANTKYAKCDIPMISLRNDECKEKYEIKKNLDKAIEFIRLLRLFDTENENFSFDAKQEVEKTLDVYNDVNLLYNMARNYITQKGNNKIKNALSFSTSGFAGGWSESIESNKRVFLMKNDLGNKYLGIYNLLGCKANNESVSSVSRIIKESLTEEKTEKQCYRKMVYSVTSDVKKSIPRLFVNSQLPEPELTRFKKKEYNDDEKFLAFIIDFIKEKIEKHETWRSYNFKYKEHYESYDEFCEDLQKQGYILKWKYIEKSIIDELVDNGCIYLFKISSKYDRYNFKKSIHEKYVDALFSDENENGKLIKLLGNAEVFYREPQIKNPYIHKKGSLLVNKHYDNGKTIGSEYSEIAKNIQGTTVDGIVTKICDRDIIKDERYTREQFSIHIPVKIGNISSKEKVDSLAIEKLKKPHNTVVITRSNNHFLYAVVFDDGMNVLEKRSLNVVKGVNYKEKLEIAEDLKKKDALSWKEIKSTSGLLDGYISYAIREVADMVLKYDAMVVLEKATNGGSFNLLSTRTYVKFKNALINKLQFLNDVSKKDTEPGGVLNPYNLTHVDKDKDFEKELNGIVLQIPAFYMAMKDINSEFVLLKSPFAKNQSQRKNLVNKFKNFNFNNEKNVFELEYDSKKFNSKYKNTFICDSFGERIIRQNGETERVNLTDHIKQNLLENGLDFRTGENLYSIYDEQNKSHINALYESIKLILQMYNFDSNEAYYVSPVSHTIITDSNCREIVQSINLYKKAVELAKQYYI

SEQ ID NO: 298 - protein, 1140 aa, unidentified
  REGION 1..1140: note = Cas Enzyme sequence
MPVRAIKLKLIVPRDSNADSIAIRRALWDTHEIVNRMVAGYERLLLEMRQGDVLLPDPDGNESVRGADDWRSDLIARLHYNSVDVPTIEQALPDLQVLYRLIVKSHDKPNTGTAQDSRAFHSPLCDPKSEGGLKKLEELEKWEWLLKHTESPTEEVRQEVENKLKLSPELLRPTGSPPRWIRLYRKQDESWFEALITHVTRAKEAASGDSAALARLRGLGVLPITESFTSKIIPSQRSALSELERMAFALAVAHMNSWESWGHRVRAKYAEMEDGLCQVEQHGESFGDLIDSIHAFEADREKTLRSFALWTEESNYRLGPREIRSWRELRDWLRSNPNAPPGERTKQVNEMQTQRQAAFGGAEVLHWLAHPDQQALADHPGDPVSWLAARNRLQIRLERTRKLPLFTFGDAVLHPRYMELDPPANTNSPPYELHQADDKTFAATVPLLFRTGNGIYEPKDTNFKLAPSSQLRGAELVTIDKKKNILGLDLLAQDRLNRHLAKIGGAALIFDRRSLVNADALRSGNLGSIFLKISVDIPNTPDILKTRASIRGYLSSSTIVRQKSKHQHPKPGTRILSVDLGVRSAAACSVFEFVASDDERATKSWPVLVEDDLVLIHERSFLLKLPGEDPGPDTLVRRQEAMQDFYRTRSLVNFLADMRRLADTEAVKDRSEAVAALAERGQELAESFPWDYRQLGQLFDHVQATPSGWRSHVEPLFDAVETLAGQAISQWRKQQKAYHDPARPWDSLGGKSLWHIGYLEQTRRLLMRWDRHTRPGQSVRRFDRRAQGTVAKALLEHINHLKEDRTKTTGDLIVQAARGILRKSGAWRACFKPVDIIVLEDLVRYRFKTDRPRRENSQLMRWSHRAVAEAVDLQSEVESIVVASTAAAFSSRFDALTGAPGLRCHSLTKADAAALAEHPETHWIGKRLQRMGVELSADQLVVLEPGTILPTGDGEIFATLTDEGTLRLRHADINAAQNLGTWFISGRDTPVRLTVFERTVGERTVMVATDLSKTLQGPIGGTAVILEPEAEDSKICRLTPYKTTTQLKKALSKLAGERIETDPSIKSGEEGSSAASLEGDDPDSVILEEAISAATTGRRTVFRDPSGVFFSPAVWVDSGRFWGEVNSKIGRALAARTTEG

SEQ ID NO: 299 - protein, 1142 aa, unidentified
  REGION 1..1142: note = Cas Enzyme sequence
MSQDEAKELVKEFWGFVTYFYGFFDNRKNMYTAEEKSTGIAYRLVNENLPKFIDNIEAFNRAITRPEIQENMGVLYSDFSEYLNVESIQEMFQLDYYNMLLTQKQIDVYNAIIGGKTDDEHDVKIKGINEYINLYNQQHKDDKLPKLKALFKQILSDRNAISWLPEEFNSDQEVLNAIKDCYERLAENVLGDKVLKSLLGSLADYSLDGIFIRNDLQLTDISQKMFGNWGVIQNAIMQNIKRVAPARKHKESEEDYEKRIAGIFKKADSFSISYINDCLNEADPNNAYFVENYFATFGAVNTPTMQRENLFALVQNAYTEVAALLHSDYPTVKHLAQDKANVSKIKALLDAIKSLQHFVKPLLGKGDESDKDERFYGELASLWAELDTVTPLYNMIRNYMTRKPYSQKKIKLNFENPQLLGGWDANKEKDYATIILRRNGLYYLAIMDKDSRKLLGKAMPSDGECYEKMVYKFFKDVTTMIPKCSTQLKDVQAYFKVNTDDYVLNSKAFNKPLTITKEVFDLNNVLYGKYKKFQKGYLTATGDNVGYTHAVNVWIKFCMDFLNSYDSTCIYDFSSLKPESYLSLDAFYQDANLLLYKLSFARASVSYINQLVEEGKMYLFQIYNKDFSEYSKGTPNMHTLYWKALFDERNLADVVYKLNGQAEMFYRKKSIENTHPTHPANHPILNKNKDNKKKESLFDYDLIKDRRYTVDKFMFHVPITMNFKSVGSENINQDVKAYLRHADDMHIIGIDRGERHLLYLVVIDLQGNIKEQYSLNEIVNEYNGNTYYTNYHDLLDVREEERLKARQSWQTIENIKELKEGYLSQVIHKITQLMVRYHAIVVLEDLSKGFMRSRQKVEKQVYQKFEKMLIDKLNYLVDKKTDVSTPGGLLNAYQLTCKSDSSQKLGKQSGFLFYIPAWNTSKIDPVTGFVNLLDTHSLNSKEKIKAFFSKFDAIRYNKDKKWFEFNLDYDKFGKKAEDTRTKWTLCTRGMRIDTFRNKEKNSQWDNQEVDLTTEMKSLLEHYYIDIHGNLKDAISAQTDKAFFTGLLHILKLTLQMRNSITGTETDYLVSPVADENGIFYDSRSCGNQLPENADANGAYNIARKGLMLIEQIKNAEDLNNVKFDISNKAWLNFAQQKPYKNG

SEQ ID NO: 300 - protein, 1143 aa, unidentified
  REGION 1..1143: note = Cas Enzyme sequence
LRTAIAKRLTGDEAYKRIDKKELIQEDLFNTEWMRKLSEDETALVEEFRKFTTYFGGYNENRRNMYTAEERSTAIAYRLVNDNLPKFVDNIKTFDIVAASPIANDFDKLYADMSQYLNVKDIREMFTLDYYNTLLTQPQISVYNAIIGGKALEDGTKIQGLNERINLYNQKHKDSKLPKFKFLFKQILSDREVLSWLPEAFEKDNEVLQTIESCYQDLTEMVLGDRNLKNLLVNIGSYDLHSIYLANDVQLTNISQRLFKDWNAINRAVMADLKATVKPTKKETESDYLDRLDKLAKKVDSFSIGYLNDCIDKSDLPVKTHVETYFAGLGAVDDEENQRANLFARIAIYHSDVESLLTTEYPEDANLAQDNGAVEKIKTLMDALKELQHFIKPLLGNGDEPDKDENFYGELDSLWQDLDQVTPLYNKVRNYMTRKPYSTEKIKLNFENATLLNGWDLNKEPDNTSIILRKGGLYYLAIMDKKHNKVFESEKLPASGECYEKMDYKLLPGANKMLPKVFFSKSRIDEFNPSNTLMAHYAAGTHKKGENFSKADCHELIDFFKASIQKHEDWRNFDFHFSDTSTYEDLSGFYREVEQQGYKLTFRNVSVDYVDKLVEEGKLYLFQIYNKDFSPFSKGKPNLHTLYWQMLFDERNLADVVYKLNGQAEVFFRKASLQKTHPEHPAHQPIANKNPNNPKKTSLFEYDLIKDKRYTVDKFQFHVPITMNFKATGSNVINAQVYDYLKQTEDTYVIGLDRGERHLLYLSLIDPAGRIVKQFSLNEMVNEYKDVVRKTNYHTLLDARESERQKARQSWMTIQNIKELKEGYLSQVVHIISRLMVEYKAIVVLEDLNMGFKRGRQKVEKQVYQKFEKMLIDKLNYLVDKDLPADEDGGLLHAYQLTNKFDSFQRMGKQSGFLFYVPAWNTSKMDPTTGFVNLLDTHYETIAKSRVFFNKFKSIRYNAQAGWFEWKFDYNDFDKRAEGTRTDWTLCTYGERIVTFRNKDKNSEWDNKKVNLTEEFKKFFAENGIDIEGNLKEQIAERADKSFFEGLYSLLKLTLQMRNSITGTEEDYLISPVMNDRGEFFDSRKSGQGLPENADANGAYNIALKGLWVLQQIRQSKDQKDVKLAISNKEWLQFAQQKPYLKD

SEQ ID NO: 301 - protein, 1147 aa, unidentified
  REGION 1..1147: note = Cas Enzyme sequence
VPTRTVHLKLVVPRDAGEEATQLRRALWATHCFMNEAIAFYEGLLLEMRQEDVLVKEGDAERRIAGEEWRERLEQRLGRNGISRADRQGVLDRLQDVYRSIVKSNVKSASGSAQDSREWHSALVTRGSKAGQQSAARLELLIPLVDLDDDSTFEIRAQQVIEANRDVILKGPGTARGWFASYRERRPTWPRELREYVRRKRDIDIGSRVRWFQQRRVLPIAAPFGKTRIGGGDALSLFERSALALATGHLNSWESWRHATQSQHEARSRAVADWEDSFASSHRDALDRIRQWEADYSSILERESFWADDSGYRVRPRELRGWTELREWLRGNQCASEAERIGKVHQLQRDLGRRFGSERLLRWLAASEQQWLAEHPAGDVVSRVAEYNRRLRVLERTRELPLYTAPDAVEHPRWAAFDPPNNSNQPPFDIVQSNGKLLLQVELLVPDCDGMLSRRRFTLRVAPSGQLGEVRVGAGDGRGSGGSEVRYITCRSQDRLDRLSGHLGGSTLVLERRALSRAGSGPDAGPALGGVYFATVINHHDPETERQLKRRQPVAVWLRSGVDKRRATELERLPESFSVLAADIGLRSASAVAVLRVVPENEVGEGRRWPAEKAWPCADVGCLSGRCVIHERSTLLTLPGERPSQLELERRDAAWRQLSEARSGLTALAKLRRLVDLEPTEQREALIDELSQPAWSSASADAQRLLLDLRLDASASPALWRDRASSVFLAWERELGEHISRWRQHTRRRSVEPEGGKSAWRLQHLERVRDVLVRWHCHQRPWDDEPRRMDRRRWGTVARKLLEHINNLKDDRVKTTADLIVQAARGRVYRGGRWQQVYDPVDVIILEDLSRYRFRTDRPRFENSQLMRWAHRAVTAQVKQQADLYGLQVIEAPAEFSSRFDARTRAPGVRCEPVSLRLLKRLQEGRARGLERRLGQLGIDVENLRLADLAPTGYGELLASVTPEGTLRVVHADINAAQNLAARAIEGYAKPSRIFAVRHPQTELLYRSDLKKRLRGALGGGAVNFTDSSEGRGERFTMKVFKDARELVREIGAGSGELERVRIDIDDGPGGESLDDAELELRAANLEERLASDAYVVLFRDQSGRDASGEWMPHRAFWAAAEEEIVTALRRDGRLHGPCGTAQPGPE

SEQ ID NO: 302 - protein, 1149 aa, unidentified
  REGION 1..1149: note = Cas Enzyme sequence
MPTRTINLKLILGRRANTAELRRALWTTHYEINKAVERIERLLLFCRGAAYRNFDHDGNEIAIAESEVVANALTVAREAQTRNGTKKIVTDEDVLIALRELYEQIVPSCLLDEKGNPMKGDAQSSNAWVSPLMDPESEGGLSVFSKVLDPPPEWVRMKAADQTGWEEKSKEWLGSADGRRLQSTPGSPPGWVRKLRNGQPWQDSFIVDQAKKREALAQGNAPVIKRLKELGLLPLAEPELRRKLKPNENGVSVWDRLAMRLAVAHLLSWESWNHSTKKAHDEAKATRDALQEEYRRYEKQFRELREYETERHERLKLEAFADDDRPFKTGIRAIRAWSRVREEWLRNGKAAQDRKQIVSHLQTKLRGKFGDPDLFLWLAEEGRDHLWNQSDTLTSLVTLNEAQRLLEKRKPYALMTFADARFHPRWAMFEGPGGSNLRNYDIESRNGELSLQLVLLQETETGGLVEKTFNVCLAPSGQLCHLAVAREGKKLLLKYRSGHQEFQGVPGGAEILFHRPYLEHAQRTDELIAQGAPGPVWCKFTVDVQPKAPKDWLDRRGKVAIPLEVRHFGTALSNQSNYAGKLETGLRVLSVDLGLRTFASCSVFELVKGRPTEGLFFPAADGKDTRDPEKLWAKHERSFKLCLPGETPTKLHGATRAAARDELRALKRDISRLRDILRLGIRVDNVERDEGVRAFVESLENGLANSALDSSILESLNDPKFRSTPELWQFCCQQVYDAAEKRVAQRFGEWRGRTRPKSMSWADWRGRRCYAGGKSIWMLEYLEAVRKLIMSWNLRGRSYGKVNRQDRKAYGTIASRLLHHINNLKEDRVKSGADFIIQAARGYIPVKDGVGWVKKFAPCRVILFEDLARYRFRLDRPRRENSQLMKWNHREILTEAAMQAEIYGMVVVTTSAGFSSRYAASSGAPGMRCRYLRRDDFEDGRPKPYVVAELEWMLGNSRSNEVAETQNALKENIQPGTWVPWNGGEMFVTLKPNGKPHMIHADINAAQNLQRRFWNRCGDAFRITCTADTIDGVQCYKLDREPAPRLLGALQQMEGGGGPFYLKDETGGQRYVMTPFAGKTGRTPPVREDVSIEDALEEALVELDEDSGGARETFFRDPSGILFNTRYWIPSKLFWSHVRARVWSVLRNR

SEQ ID NO: 303 - protein, 1149 aa, unidentified
  REGION 1..1149: note = Cas Enzyme sequence
MGKKRAPKPPTATITVPVPIIVPRGKHLPTLLQQDLYTTRREFNSAVANWQEVLWEIRQEDVYFTDGVVVTTDEWRQRLQERRQEPLSEEDYADYKKLYKLLIPSYQRKEKKKNKKKTITEAQGQTLARQATSNFGILTNKNSTNGENAAKILCYFDNFPAKCMSQDEAEKLAKEKDCKEEDIERVPTELLPWITSVLQANAVDIFSLKGAPLPWVKELKEVNKWKTVLVRKGSLVYDLSEMKVTQQVAEKLLRKVENEQEKAKDPFLLTMKKRGLLPLTPDYFATRLIPTSSNRAVWGTMALAQAAANLNSWESRRHTLHDEYEEYTKTVNKLEKHGKSFWEDAMFLLKRFEHLTKRTTRGWDILRTYLEEHPQATEKQRLDYLNKQLRRRRSKFGDGALLQKLFSDEYIPLTASPKGDIVSWCVDYSSALYKKETAKLFPETSFANGSRNPPYGKSQLPYKLVMDEKNKHLYAEVVLLTEVGNGKIESVKGRVRLGTHKSLRKLKLKGTKQNAQSIIRQAPDKIKDDDGNIQKEEWQVGGSLLNISGDIRGNSGSANLHLILKRPLPKDEDGLRIYRPIYFNSGLETRAKKELEKWKYGLLEGQEKGIPFGTTAMGLDLGSSETGAYSIFVYTPRGAKHCRSGLIVLPGDNPTEKQLYNRDHAFQRIRDVEYHFKHMKDICRNVEDGEEEISSFLEAEDAAFRALVTYQREVKKDREWLQNSTLPRLGYLDCGWGMSYAYIQFLEKQRKLQLSWDNRHRPNRDPQKGTRGSVAKKKLAHINNVKTERARQTAHRIDQIARGLVRKNGEWLQKYEPVDLLINDGLRKYRTSKKNSPKSNHMLMTWCHREITRYLKQYPLKTGRLPAQEFHTVSYSSKFHARTGAPGFRASVVTKRHLHYLQQYQEISAQKADEESWEKLSDKIQYDYQGFLNAWKWLPNALTAMGMPEDTWDQLQPGDLVKTDGGKVFVTLVDGKVHQLNANINAAQNMTFAHLNGYNQPYAIYVAKTNSEEVILDASKSLLKGAFEKAIVIFDPVWEKTYKKQPKAYNTLTEELKKRFTLTTKDARDIAQLNVEDEENDGEEGDITDFFATLKKNKKALTLCHDYSGLFFRDDFWVESGKFWGYANQKILKQMKIHQWNIKTSAAVA

SEQ ID NO: 304 - protein, 1151 aa, unidentified
  REGION 1..1151: note = Cas Enzyme sequence
MPTRTINLKMVLGKKNDGNELRKALWTTHSVINLAVAAIEKALLLCRGAEYRTLNEGGQEVLIPCTDVRRDCLHMARKAQERNGKEGIGREEDVLTALRKLYEKVVPCCLLDEQGKQLEGDAQDANAWVSPMMDPDSQGGLSVYEKIVEPLPEWVTMMKDNEMGWEEASFSWSQTVEAIKLQSMTGSPPAWVRRLRKGQPWQEAFLSDQDKKRKELKDGNAPLIRHLKDLGLLPLLTPTVRERMADPSSSVTPWDRLAVRLAVQHLLSWESWNHKTKEQHSRAALTCEEVCRQYESLGQKIQELREYEKERHRELKRVAFAADDRPFKIGRRSMRSWDQVRDEWLKSGCNYDARKEIAKRLQTRLRGKFGDPHLFLWLAAEGREHLWRDTDILTPIVKINLARKILEKRKPYALMTFADPRTHPRWTMFEASGGSNLRNYEMKALEDGLVFRTRLLQETPQGRLAEENFSIRLGLSGQLSDLGIVGIGKDTLFRFCSAHQDFEGVPGGAEILFDRDYLEHRGRCCNSFAQGAIGPVWLKLTINVKTKAPEGWVNARGSIATPPEVHHFKTSLSRRSRYETTIQPGLRVLSVDLGMRSFASCSVFELVRGKPHKGLFFPAEEGKDTNDADKMWALHQRSFKLALPGEAPSRKEKQERKSAIDEIRSIKSDIWRLKHILRLGNVERDEDRDTYLSEMQESYLEDQSDSSVLSLKILEQLSDPKVRSTQALWHTRCQEIHDRAECVVSKRLSDWRKQTGPKSASWDDWHKRRLYHGGKSIWMIEYFETVRKLIMNWNLRGRRYGQVNRQDRKQYGTVAARLLRHINNLKKDRVKSGSDMIVQAARGYIPVRGGGGWVRKHEPCRVILFEDLARYRFWIDRPKRENSQLMKWNHREILRETKMQAELYGILTETTSAGFSSRFLASNGAPGCRCRYLSEDDFENGLPKPYVAHELEWMLGSYKRGDSARDQAEFLKDKIGPGLVVPWSGGELFASIHVKSGHAHVIHADVNAAQNLQRRFWGRCGEAFRLVCRARKIDGNDVYEMERPPGSRLLGALQKMANGGGPFYLRSESESERYAMVRSGTRMAAAERGEEEDAMETELEDALSELEESSGEGRETFFRDPSGLFFDDQTWIPSRVYWSIVRNRVWANMKQ

SEQ ID NO: 305 - protein, 1154 aa, unidentified
  REGION 1..1154: note = Cas Enzyme sequence
SFKNAPKYSRLDKKELIKEDVPSFLKDDDVKKKIVSHFNDFTMYFIGYNQNRMNMYSAEAKASAIGFRLINQNLMRFMDNLIALKNKILPHLDESVIIQLNKDFEPALNTHSILDMFELDYYHEMLTQRQIAVYNAVIGGRVDEGNKTEIKGLNQYINEFAGEVKLPLLLPLYNQILSERVAVSFRDEQFKDAKEVTSNIDAAFHSLKSDVLVQTERILDSLENYDLDGIFISNDADLAMVSQRHYGTFDAVKNALIAEFDQIHPPKPRQTREKRENDIKKYLKTIDSVSLGKIDSLLQERSGKSIVEYFKTKGAINNEDLFLQRENLFSLIDNRFEILQDVLHSATPSDELLRKNIENIKDFLDAIKDLQRFIKPLCGSGNESQKDELFYGEFSVLYTQLDETITPLYNKVRNYLTRKPYNVDKFKLNFESPSLLKGWPKKDEYSCALFRKDDNNYYLAILDSNHRQCLNNLVAPTSLDDSIEMMKYLQGGKMGHNIQNLMVVDGEVKKVNGLKEKTGPFAGQNLRLEQAKNDYLPNDINRIRKSKSYSISSPSFSRADLNRFISFYMPLAREYYSDYDFKLKEPHEYNSFADFTDHINGQAYQLQLQPYSWERLRTLVSSGQVYLFKLISKDFSPFAKGRPNLHTIYWRMLFDQRNLQDVVYKLNGEAEIFFRRKSIENPVVHSANVSIQNKSEYNKINKPHSRFEYDIIKDRRYTIDHYEFHVPITLNFKAPSKVDLNHSVLNFIKGKGIRHIIGIDRGERHLLYLSVIDLDGNIVKQMSLNSIASNPNAPGFEQDYNSLLANREGDRLQARRNWTLLDNIKDLKTGYLSQIVHLIYKMMIEYDAIVVLENLNQGFIRNRGGKVEKSVYQKFEKMLIDKLGYVVDKTVAPTEPCGALRALQLSESYESFNKTQQKKSVRQCGFIFYVPAWNTSKIDPVTGFVNLFDTRWSKKEEIKAFFSKFEKIEYNAKQDSFEFTFDYKKFGKGDGTRTIWTLSSMGERIYTYRSKQQSGQYISEVVMPTALIKDIFNKAGIPVEGNLKDGISRIDNATWLKDLLQAFKFIIQMRNSKVNSDVDYLLSPALDNNGKIFDSRFNDASMPNNADANGAYNIARKGLMLVHQIMESLDLDNLKYDLSNKAWLQFAQNFKWKN

SEQ ID NO: 306 - protein, 1155 aa, unidentified
  REGION 1..1155: note = Cas Enzyme sequence
DDLPAWLSVKYSGEELSRKLELIKDFEKFTTYFTGFHENRKNIYTDEAIPTAIGYRIIHENFPRFCDSCKKISILRERYPELDLSSIERDFSDELSRKSLNEYFTLSNFNNCLSQSGINRFNVIRGGKAGEESKQQGVNEKINLFIQQHQGSLSSAQIKELRYCKLQELRKQIISDRESSSFVLEKFDKDSDLANAIEDFYSKGLVAYKDEHKDEEINILELTRQTVQIVRETDKVSLGKIYIRNDKGLTDISQAIFDDYSLISKALFEKAKRINPAKKQETAKDLERWNAYAKKTNYFSVEEIQSALSEYFANIGYDSEDFKKKKSDSPIADYFFNFVLSGCTSDCFSDIQHKYGAVKNILLSYGNPDAKGIAKHIKEIKEFLDYLQNLLHFLKPLYIEVKGDSDVKEDEVLDKDASFYNDFDFCYEQIRQIIPLYNKCRNYLTQKPYSIEKYKLNFENSTLLQGWDENKESANTSILLRKEGNYYLAVMDKEHNKCFEDLPISQGGKYCYQKIVYKLLPGANKMLPKVFFSDKNIKFFAPSEEILEIYAKECHKKGDSFDLKKCHALIDFFKSSIKKHEDWKNFDFKFTDTKEYKDISEFYKEVEKQGYKISFRDIDTDYIEGLVREGKLYLFQIYNKDFSEHSKGRQNLHTMYWKTLFDEQNLADVVYKLNGKAEIFYRPASIQYSQEVWEKGHHYDILKDKFIKKGKFVPIIKDKRFALDKFSFHVPITINFKALGSSFGFNDEVNRYLCNSPDVHILSIDRGERHLAYYTLIDQKGNIKEQASFNVIANTYKGNEYKKDYHQLLDKVEADRADARENWSAVTKIKDIKEGYLSQVVHKICELVIKHNAIIVFEDLNYGFKRGRFKIEKQVYQKLEKMLIEKLNYLVFKDRTGKQAGSVLNGYQLTAPFTAFKDMGKQTGIIYYVPAYHTSKICPATGFVNLLYPKYESTKQAQDFFKRFRSIRYNKSDDLFEFKFDYKDFVADYGGAISEWTFCSYGDRLINEKNSAGKWETKKDPINLTKEIKKVLNGKVEYLSGEDIKEKISEQDSTQFFKDLMYYLKCTLQMRNSRANTDEDYLISPVRDRWGKFFDSRQALNGMPENADANGAYHIGLKGLMLLHRLDQWDGKNKPNFLIKNEEWYRFIQEKAYKQ

SEQ ID NO: 307 - protein, 1155 aa, unidentified
  REGION 1..1155: note = Cas Enzyme sequence
DDNAYANLFGNKLIESYKDKDEKNKIIDSDLIQFINTAEPSQLDSMSQDEAKELVKEFWGFTTYFVGFFDNRKNMYTSEEKSTGIAYRLVNENLPKFIDNMEAFKKAIAKPEIQASMEELYSNFAEYLNVESIQEMFQLDYYNMLLTQKQIDVYNAIIGGKTDEEHDVKIKGINEYINLYNQQHKDEKLPKLKALFKQILSDRNAISWLPEEFNSDQEVLNAIDDCYKRLSENVLGDKVLKSLLCSLDDYNLDGIFVRNDLQLTDISQKMFGNWSVIQSAIMQNIKNVAPARKRKESEEDYEKRISDIFKKADSFSIQYINDCLNEMDNNNLHAVDGYFATLGAVNTPTMQRENLFALIQNAYTDISNLLETPYPENKNLAQDKTNVAKVKALLDAIKSLQHFVKPLLGKGDESDKDERFYGELASLWTELDTVTPLYNMIRNYMTRKPYSEKKIKLNFENPQLLGGWDANKEKDYATIILRRNGMYYLAIMDKDSKKLLGKTMPSNGECYEKMVYKLLPGANKMLPKVFFAKSRINDFKPSKLIVENYNNGTHKKGKNFNINDCHNLIDYFKQSIDKHEDWSKFGFNFSDTSTYEDLSGFYREVEQQGYKLSFTNVSVSFIDKLVDEGKMYLFQIYNKDFSDFSKGTPNMHTLYWKALFDERNLADVVYKLNGQAEMFYRKKSINNTHPTHPANHPIQNKNKDNKKKESVFEYDLIKDRRYTVDKFLFHVPITMNFKSVGSENINQQVREYLQQADDTHIIGIDRGERHLLYLVVIDMQGNIKEQFTLNEIVNEYNGNTYRTNYHDLLDTREEERLTARQSWQTIENIKELKEGYLSQVVHKITQLMVKYHAVVVLEDLNKGFMRGRQKVEKQVYQKFEKMLIDKLNYLVDKKADAAQSGGLLNAYQLTSKFDSFQKLGKQSGFLFYIPAWNTSKIDPVTGFVNLLDTRYQNTEKAKAFFSRFDAIRYNANKDWFEFYLDYDKFCTKAEGTRTRWTLCTQGSRISTFRNAEKNSQWDNLEVDLTREMKSLFEHYHINICGNLKEEICLQTDKAFFTGLLHMLKLTLQMRNNITGTETDYLISPVADENGTFYDSRSCGDTLPKNADANGAYNIARKGLMFIGQIKETKDLANFKYDISNKAWLNFAQQKPYKNE

SEQ ID NO: 308 - protein, 1155 aa, unidentified
  REGION 1..1155: note = Cas Enzyme sequence
ICEQFSIEADKWKAKYSDIKLNDKSYKILTNAKILDVLLILYPGKSECIKKFQGFFTYFSEFNQNRENYYAAEAKATAVANRIINENFVIFADDMHIFDSIKQKIAELSKYECYFKLENYKNCLVQEKIENFNENVVGKINSEKNLWLQQENSKPENKKKKIYLPNLKKLYKQIGCHTKQQKGLKGDGVIIYPKYLEKIGLGFQIIKDDKEKYKIWQTLHYINDTHEEKLEKLKRNYQDFFTNWGSYNLNEVWFRKESFNTISARWFGGDNWNILADALKKTGIGKIEKGEYKISPFVSLWELKQAMDNLPLYKAENLFKEEYKEFFKSNLFETFLAIWRHEIESKFDEIRKYKLVFEEKSKEEFNKSKKDENGKSIHTEVVKNLIEDGYLGLYRLTKYHSLLKKGEKDSRPTQGRFYDALDEFWDNNEITTYHKAFQATLTKKPYSENKIKLNFGCGTLLEGWSSDYESYGVLLFKKNNKYYLGIVKGTKFNNTEVRSLYGNIDSNNYVNRLVYITQKIDNKNPPRWFIRSKGNTFSPMVRDGLINPKDILEIYDNKLYSKTDNKNNYKEYLPKLIDYFKEGFRKHKDFKSFSFDWFNSKEYETIVDFYNHTADMCYKLNWEEINFEALNDLVKQGRIYLFQIYNKDFELDENIGKEKYGDSFKVHKITGQLNSHTLLFLELLKPENVLKIKLLGGGEVFFRKPSKEKKYKNDKNSKKILDAKRYYEEKYFLHFPIELKGKNLKGSFNQKVNQMIKDNSNNVKIIGIDRGEKHLLYYSVIDASGKMIDKGSLNIINKVNYNTKLQERQNKRNQARLDWEEIGNIKNFKEGYLSQAVRKIYELIIKHNAVVVMENLNTEFKAKRMAKVEKSVYKKFELALARKLNHLILKDKKAKELGGVLNAYQLTPAISADDVNKFENAHQWGIMLYVRANYTSTTDPLTGWRKHKYISNSETDKKIKDFFNHDTGIRIDFDTDKDCFKFSYEHEGKTWRLFAFASIQRFYWNNKERKMEMYSLFKEFDKLFAGLDRSKNINLQIHSKDHGWWRKLIFFWNLLNQIRNTDRDKTGNENDFILSPVWSEKFKQFFDSRKVTSMDLPDNGDANGAYNIARKGLIVLKRIKNCSDTSKFGNDNNGKNPENSDYVSDGNWDNFAYAG

SEQ ID NO: 309 - protein, 1156 aa, unidentified
  REGION 1..1156: note = Cas Enzyme sequence
NLQTQLRKLIVKALTKGIDPNNDPKGDTYKHLFGKELIEDILPLFTKNKEEQALLSEFKGFTSYFVGFHENRKNIYSQEAQSTAIGYRLIHDNLPKFIDNLLVFQKIKEPLCKELESIYNNFAQEGYMNVKSLEELFSLDYYTQTLSAKGIELYNAAIGMIVKKDKTELKGLNEHINLYNQQKSREERLPSFKPLHKQILSDREQLSWLPEAFNNDRELIVAIEEYYQHINNDILERIQLLMSSINEYDLNRIYLKNDTQLTNISKKIFGDWSTINLARERFYDSSVAPKKQNAQYEEKRSQALEREKSLSIAHLQTCIAALNPEKEHCIEKYFAELGPQKENIGGSPTTLIEAITLSYQEAQQLLTTEVTTENELIQNKEKVALIKDLLDRTMALLHFVKPLLGGLQEAAKDEKFYGELDYIWNSLDHLTPLYNKVRNYLTRKPYSTQKVKLNFGNSTLLNGWDRNKEKDNSAIILRKEGNYYLAIMHKKHNKSFEREQLPCSGPCYEKMDYKLLPGPNKMLPKVFLSKKGVQTFKPSATLQANYEQGTHKKGDNFNLADLHNLIDYFKKSIEAHEDWSKFEFKFSDTSSYEDISAFYKEVESQGYKLSFRNISEEYIHSLVKEGKLYLFQIYNKDFSPKSKGAPNLHTLYWKMLFDERNLADAVYKLNGQAELFFRKKSLKNNRPTHPANIEIDKKILGGKSLFGYDLIKDRRYTVDKFQFHVPITMNFKSTQGDRVNSMVHKLVKGNKDLRVIGIDRGERHLLYLCIIDGKGRIIKQQSLNKIVSSIPSSNSNNSTFETDYHALLEKKDTLRQEERKNWQTIEGIKELKQGYLSQVVHQITQLMVEHNAIVALEDLNMGFKQGRQKVESSVYQQFEKQLIDKLNYLVFKNIDTYKEGGILKAYQFTAPFKSFRDMGKQNGLLFYVPAWNTSKIDPLTGFVCLFNIRYESVEKSKTFLRKFKSIRYNPQRGWFEFDFDYRDFTSKAEGSRTQWTLCTHSERIGAFRNPQKNSQWDYEKVYLSPELCKLFQEYGIDFTEGKDLKISIENQTEKDFFVRLLKLIGLTLQMRNSRKDTGEDYIVSPVADANGEFFDSRNNREVLPKDADANGAYHIALKGLWALRQMRDTSEGEKVKLAISNKEWLSFVQEKPYKND

SEQ ID NO: 310 - protein, 1157 aa, unidentified
  REGION 1..1157: note = Cas Enzyme sequence
AIENIERRSEYLNAYKYLKSAGKITQIKDAESGKMIEADSIVEDIFKISYFSSCLSQGEIEEYNRIIGHYNLLINLYNQAKRGEEKYLEKNKKTFQDLPTFKTLWKQIGCREKDPLFFSLTYYTKKQAEENKENYKKPYSVEQILEQAKIAGEKYFKEKSDDGIINTIPEFLEYLQTRENYDGIYWSKVAMNTISNKYFANYHDLKDRLKTAKVFQKASKGSEEDIKIPEAIELEGLFTVIDQTEGGWQAEGVFFKKSLTEKLKEESEESKKRTTRRSIVAEAGKPSEALMKMIFDDISDETKQFLDSVGPVLALKNYESKESIEMIKRWMDHSLAINRMLKYFLVKANKVKKVKGAPIDPILSEALNVLLRADDAEWFKWYDALRNYLTKKPQDDAKENKLKLNFECPSLLGGFSDGQEKNKATVILKKYSLYYLGILKKKNLFDTERKNNEVYQNTTSNYGRLILANLKFQTLAGRGFIRDYQQSYGEMGKKNPMKAVRCLQELILKQYVKKYSPLRQIAEKAYENKKNFDKDVQNALKEGYICEFTPINWDKVEEHTNNGEMYLFQIYSKDLAKGSTGNKDLQMIYWNTVLEENSSFQLNGGGEIFYRKLSIKEQKIKIGYEKKPWVIENRRFTNFENDERNKGFKEDEKIYGKFLFHCPIKLNYKSKSYSDPKYALPEINKLINENFSSTHFLGIDRGEKHLAYYCLINQNGKIVAQDTLNLPFTDKDGRPRSIKKEKFFYDKESKGWKPKEVDCWDYNDLLDARASNRDMARKNWQTIGTIKELKEGYISQVVRKIADLATDKGHPAFIVLEDLNTGFKRERQKIEKSIYQKLEVALAKKLNFLVDKNANIGEIGSVTNAIQLTPPVNNYKDIENKKQLGIMLYTRANYTSQTDPVTGWRKTIYLKTGSEGNIKQQIIEAFSEIIFDGKDYVFTYTDKNTSKEWKLYSGKDGKSLDRFRGERGKEKNEWQIKKIDVVEILNGIFISFNKNKSLLDQIKAGTEPVKINEHTAWESFRFAIELVQQIRNTGLPEDKRNSDFLQSPVRSEEGEHFDSHEYWDKEQKGEKVDMPSSGDANGAFNIARKGLLMNEHIKTWIENGKPKYDKQASDLNLFISETEWDLYLTNRKEWKKQLLKFSSRKMAEANKKTKPYN

SEQ ID NO: 311 - protein, 1158 aa, unidentified
  REGION 1..1158: note = Cas Enzyme sequence
MEKFKNLYPINKTLRFELRPYGKTLKNFHGAGLLEKDESKAKNRKSMQSIIDRKFKLIIEEKLKYLVLDEEYLKKAFSEDRNEREIAIISLKNQIVNIFNDKKFKENYLMADKNIKIIEKEYAEENIIQEFNRFTTYFVNFFDIRKHVFLGNTAGSIAFRLIDENLKIYRNNVEKIKKLPDELKVDLKDIDKINDIFLYNNFCTQSAITEYNEILGGISLSEGKKLQGINEKINLYCQKNKKKLPRLDQLYKMILSDRETSSFVLDVIENDEELIQTLMEVVRKIALSNDMVLSENDNIFIKYNQLGNLPGINHALISNLILEAYDKEYGNGKRKKSYEEDRKKFVELRTYSILALSDLLKNTEIDLVQNIKTKYVESLDEYRISKEAFENVDWCKIENIKQSGKTKVVKEVLDSLKDIQRFYNLFDIVYEDKNPNPEFYLWLSENMEQLGFEFNSVYNKTRNYLTKKQYSDEKFKLNFDSPTLAKGWDVNKEIDNSAFILRKYNNQREDYDYFLGVWNKNITKKDKVTSIDNNGFFEKMQYKLYPDPSKMLPKQFLSRKWNDKYPVTAEFESKYKEGRHKKGDKFDKEFLHELIDRYKHGLVNHEEKYQEIFGFKFRDTKDYNSYTEFLEDVEKYNYNVSFEKVGKIDTLVDEGKLYLFRIWSKDFSEYSKGTKNLNTIYFESLFSKENLDKKIFKLSGEAEIFYRRASLKYDEEKLKKGHHYEELKDKFAYPIIKDKRYSEDKFLFHVPMVINFKSENLSPRNLNERVNNNIKDFTHILGIDRGERHLVYLSVIEIDTGEIVEQKHLDEIINRDSNGNEHKTSYLQKLEERSKTRDNERKTWETIETIKELKDGYISQVVNEIFNLQNKYKALIVMENLNYGFKRSRFKVEKQVYQKFETALIKKLNYVIDKKDQDTYLKGYQLTNPVTTLDKIGSQSGVIFYIPAWNTSKIDPITGFVNLLNGSDLRYQNLEQAKEFIAKIDKIYYENGEYKFDIDFAKWSNRLKNSRTKWTLTSYGKRIETYKDPAKNNKWCSYEIELTEEFSKILNINGTLKVEDVRTYKRFMQLFKLMLQIRNSETGTDKDYMISPVLGNKGFHFDSREVGKKLPERLPKDADANGAYNIARKGLMVVENIINGTKEPAKISNEDYLIYMQK

SEQ ID NO: 312 - protein, 1158 aa, unidentified
  REGION 1..1158: note = Cas Enzyme sequence
KDDRQKADYEKIQSNLRTAIAKRLTGDEAYKRIDKKELIQEDLFNTEWMRKLSEDETALVEEFRKFTTYFGGYNENRRNMYTAEERSTAIAYRLVNDNLPKFVDNIKTFDIVAASPIANDFDNLYADMSQYLNVKDIREMFTLDYYNTLLTQPQISVYNAIIGGKALEDGTKIQGLNERINLYNQKHKDGKLPKFKFLFKQILSDREVLSWLPEAFEKDNEVLQTIESCYQDLTEMVLGDRNLKNLLVNIGSYDLHSIYLANDVQLTNISQRLFKDWNAINRAVMADLKATVKPTKKETESDYLDRLDKLAKKVDSFSIGYLNDCIDKSDLPVKTHVETYFAGLGAVDDEENQRANLFARIAIYHSDVESLLTTEYPEDANLAQDNGAVEKIKTLMDALKELQHFIKPLLGNGDEPDKDENFYGELDSLWQDLDQVTPLYNKVRNYMTRKPYSTEKIKLNFESPTLMAGWDLNKEEANHTVILRKNGLYYLGIMNKTSNKAFNVANLSTGGDCYEKMEYKSLKSRDISHKFFAAKHKNRYAPSDKIKAIKERGSYQKATKDNFSLSDCHAYIDFFKSSLKITDEWSMYNFNFSDTSSYGDIKDFYNELEEQTYKLTFRNVSVDYVDKLVEEGKLYLFQIYNKDFSPFSKGKPNLHTLYWQMLFDERNLADAVYKLNGKAEVFFRKASLQKTHPEHPAHQPIANKNPNNPKKASLFEYDLIKDKRYTVDKFQFHVPITMNYKATGSNVINAQVYDYLKQTEDTYVIGLDRGERHLLYLSLIDPAGRIVKQFSLNEMVNEYKDVVRKTNYHTLLDARESERQKARQSWMTIQNIKELKEGYLSQVVHIISRLMVEYKAIVVLEDLNMGFKRGRQKVEKQVYQKFEKMLIDKLNYLVDKDLPADEDGGLLHAYQLANKFKSFKKLGKQSGFLFYVPAWNTSKMDPTTGFVNLLDTHYETIAKSRVFFNKFKSIRYNAQAGWFEWKFDYNDFDKRAEGTRTDWTLCTYGERIVTFRNKDKNSEWDNKKVNLTEEFKKFFAENGIDIEGNLKEQIAERADKSFFEGLYSLLKLTLQMRNSITGTEEDYLISPVMNARGEFFDSRKSGQGLPENADANGAYNIALKGLWVLQQIRQSKDQKDVKLAISNKEWLQFAQQKPYLKD

SEQ ID NO: 313 - protein, 1162 aa, unidentified
  REGION 1..1162: note = Cas Enzyme sequence
LKRFRPTTEDAEGILSLISGPGHKSATRNVIAAWGDRSEGVDRNELARLAEVASADAQKALGNVGKKGSRAWSDQVLADVEGACGFTYLQVNGAARHSEFAVMLDHAARRVAITHSWIKRAEAERCRFEADALRLDEVPASAKAWLDAYRATRTVASGALDDDGGYRIRRRAIGGWDEIIAKWRRAKCATARDRIAAARETQADPDIEKFGDIQLFEALAQDDTECVWRPGGRVNVELLRDYVAGHEARFKQRRFKVPAYRHPDPLSHPVFVDFGTSRWEIEYAAHAAAQPTGKRKPTEAEAKWFGTPRGVRLGLWNGECVQPTELRWSSKRLTRDLVGQASARKLARVPRADRLGRAAGGVVDAAPVRPAGLFELATWNGRLQAPRAQLDALAARVRAHGWDDRARSMRHRLNWLLTFSAKLECRGPMHTYLDRFQGDEPSRPFVPRTGGEFGIAHDLNKSRKGHAKLIISRLPGLRVLSVDLGHRFAAACAVWQVLSAKELAHETTGRSITRGSSDAQSLLLHTQHLDPATGKNRITIYRRIGADWVSGERTHPGPWARLERQFLVKLQGEEGPTRKAGPMERTAVSDLERAVGRLREASALLPTDVGGLMAEAVRTARLALRRHGDAARIAYAFRPDAVRQLPGGGSELHSPESRVDAIREALVRWFELACGDRWHNAWAAEAWVRTLECDLPTLPANLTPGARKRMRGSIEEQLAPLAARLVARGTDDIHRLWHAHWRDLDGGWQPRLRWLRDWILPRGLRTQKGDTADLASERKNRREAARRVGGLSLARISTVRELYQLQKAFAMRPHPDNLRQNVALRDDDRFDKFGSSVLLVMERLRTQRVKQTASRIIEAALGIGRTPAIPSKDGRARQRKRPRIQVDAPCHVVVVENLRNYRPDELQTRRENRQLLQWAAGKVRDRLTEACQLHGVYLRDVQPNYTSRQCSRSGLPGMRCQDVSVHDFLNRAHWTRMTDDAVKRLSEGGSDSLDAMLRDLRDRWMNAPTGAADRNRPLRIPRTGGDLFVASGPQARDGACIQADLNAAANIGLRALLDPDFPGRWWYVPCDSSTGLPSADRCAGSACFTEGHALFKEGGSELSEGAKGKKPRGRGARDVLNAWRDASAQAVTDGAWMGHAQYWAGVRARVIRELRLYNGLES

SEQ ID NO: 314 - protein, 1163 aa, unidentified
  REGION 1..1163: note = Cas Enzyme sequence
MATKSIKLKLALAGEHKRELRQAVWTTHRLFNEGVAYYMKWLMLMRQQPISDEDAPQGDILELARKAQETNGKPDRPGSDEEVRGLLKRLYVACVPSALKESQPNCQRIAREYIHHLCNPESTMGMGKSKGGAKPRSYFMADGAEKDEQIRKEGARKAERIRTASYVRLRALGILPLFPIATRVSERGSRREWRGEGSRKSKPGRVRTFDYDMLQQALERLNSWESWNHRVKKRRAELAEKQTNLRKQCDLDSPCHQRLIQYERSRTVRLNETALESERGYTIRSRSLRGWTELHERWLKISKADRSEAALRKIVAEMQTRLRGKFGDASDLYPWLAKPENHLAWDERAEKNALPIHARYNEAVAELEAAKEEANYTPPDALLHPLWARSGHSGDQNIHSYHITETDGNLSVEMRLLFEDPEGRVTERDEKIPLRPSGQWNRAQRGDTPPLRLVRFEDVPKEFHTGAKNDAKCTWVAFTDPGTGGLVHGSLGGARLQLERSDFRLGAVPARGKTKREMEFAEGNIGRAYLNLTVSLPNPPKNSAHLALVRPKPKSDTALAVSVDYYLRGSGKEDKRKKPFFLTDVVCGAGKMTDGLRIMAVDLGLRQLAACAVFELTREAPKVKLAFAVADADGLWMVQNRKFLIHLSGEAEDGDAASRRDKIREERFDLRAAVRRLSRLLSIGRLDEPEEKAEELGGMVGSSDWENSERRKKVDGILDPKLLESLKPFAEKPNDPRWPEAVKAVHRQWEASLGKAIAEWRRRGRMRGKQATERGYGGLSLWHVEELQETRRLLNSWSCHSRDYETMKDGSRRPAIVRAKKRWGLAPGEEPVGADLDERLLHHINNLKEDRQNVGADKIVMAALGFEYEGKAKGWVQHHPPCQFILFEDLSRYRFKTDRPRRENSMLMKWAHREIPRTVAMQGEVHGLVVGTVAAEFSSKFRAGAQALTPGVRCHEVTARDLQPGWFRSVMETDIAQKRRKELPGVGQLVPIDGGEWFCTLNADGSLYKTHADLNAAQNLARRFWTRYRDLYRLSCRKADLKGQEVWVPKTIGKRVGAALKQLIKAEACKLIPIDGDPEEGCRMESATLREIGAKKTGDEAPDQEGLADEMEEVAELRGEGMTFFRDPSGIICPADLWFPAKVFWGRVRSRVGAVLAGDDLKY

SEQ ID NO: 315 - protein, 1163 aa, unidentified
  REGION 1..1163: note = Cas Enzyme sequence
MATKTVNLKMVLDRSDKPEAKELRQALWTTHEQVNKAVAEIERILLLCRGRAYWIKDKDKDGKDIDIEFKAEDVPKRALAYIKKHKKINTNNDAEIIKALQQLYEILVPSVLLDKKGEPLKGDSQSVGNSFARPLMRPDPKEGPFPDIAQKILPKSCESWIEEIDKEKYIKNNTDYGKCKIQNTEIEYFFKINNKAAQQWAKNEEGQAFIESMNHLSGAKNRWFKVYKDNDSAWPMLLAENHFEMKQEPRIFVREILWKKLSLLPLISMPFADFKWNSLALRLAVAHLLTWESWNHRCAKEYAKLSGRVNEKETTVRQIDANIIHKIEKYEALRQQELKKNSLANDGNEFKINPRMLRALDHVKEAWSKKNCATSEARKEVLAKLQTELRGKFGDPDFYLWLANDNNTDIWRHEDNPLFEVAQLNALKRLLKRRKKQSLFTQPDAVRHPKWAQFEAQGGTNLKNYKLIQCADGSLSLKLPLLSQTDDGIREKEYTIGLARSGQINDPAIINGDNSKLTFFYADEQYTADMGGSDILFDRPFLEHREIESLRNGEWGEKDGALRVWFKLVLDIEPKPAKPEWLKKQNDRYILVTPPAINHFKSSLLNKKHKDIIEAGLRVLTVDLGIRTFASCSVFELVKGRPEKGLYWLADKEKDLWARHERSFILSMPGDDASIQAQTARYQAYEELSRLKQGKNFIRNLLRLSIIEDIEKRTKELDLFRSGKEKFTGKDLVYKLSSDEIAVLTSHLQRPLEVWKVQIKAIFDKYEEILSNDISNWRITTRPKTSDRQYEMGKSYWGIEYLDDVRDFLKGWSTHAREYGQINRWDRERQGKFANNLLNHINNKKEDRIKTGADLIIQSARGKVYNKKKNKWEDKFQPCRMILFEDLAMYRFRTDRPRRENSQLMRWSHRAIYNESIQQAAIYGIHIDTTGAGFSSKFYARNGCPGIRAKKLTRADLNYINNNEHIKEYLGKDGFCGNLLKEGNIIPWQGGEYFVGFSTKGKLEILHADINAAQNLQRRFWTRYIDTFRLPVTQIDKDGNEWLLQSCGERIKGGLSLLVGVNTPIKFVKAEDGSFKIEKITGKKPKAIDENEDTGLDEFAEELMEQGIEIAGEEGKGKAVFFRDASGLILRNDRFYDSKEFWGRVHRTINKALKEKYEEPNPF

SEQ ID NO: 316 - protein, 1164 aa, unidentified
  REGION 1..1164: note = Cas Enzyme sequence
MPVGTRDRAIFAILAYTGCRVGELVRLKVGSYKANGVHKVLEIHGKGGRERQVPLHKDAEGRLEAWLDASGIRDDSGGPLFRPVIAARGYGREGFATRPMTRRAVQKLVETYVRRLKLDPNVTVHSFRVTALTTARERGSDTIDLQDFAGHADPRTTLTDDDALCVWKPDGTPTAQPLKDFVAATEAEAKKRWFKVPAYRHPDALRHPVFTDFGNSRWSIDFTAHRAPGRLGDMQQRVEKLKGMLADAERKLASATERQCKGRQSKVVDYRDKLHRAEEELAELREAHRLNMGLRNGQTVTPVPLRWSCKRLVADLLHSSPEANGVSRADRLGRAAGNADSNGAVTIMGLFEQDHWNGRLQAPRAQLDAIARHVDKHGWDAKARKLINRIRWLVTFSAQLTPQGPWTELAKRLNLKPDPHYWPHAEANKKRQGHARLLLSRLPGLRVLSVDLGHRYAAACAVWEALPAETMKQEIHGRTIAAGGIGPDAMYCHTRHTDSRGKERTTIYRRIGSDRLPDGSAHPAPWARLDRQFLIKLQGEDRPARKASPDEIEAVEQFEKWVGRKRSDDDLRRDLAVDALISETVRTARLALARHGRRAKIAYQLTAAARTLPGARLQELDEAGRRELILDTLADWHALATDSRWTDESARQLWNSRLAALDGGFTIEPPQQPAQTQDETTKAQRRQAEQALRAKLQPLAQTLAGNETLRRELHQAWCARWSADDDQWKQKLKWLSRWLMPRQLSRMIEVTKKDGRRVKRRQPIREAIAAASNVGGLSLTRITTLTEFRRKVQVGYFTRMRPDGSRAEIRPGFGQSTLDTLERMKDQRIKQLTSRIVEAALGIGIDQDPVWDDVKKKWREHKRPQQRSSDPRFAPCHAVIIEDLSHYRPEETRTRRENRATMDWKSAETRKRLEDHCQLYGLHLRDVNPQYTSRQDSRTGAPGIRCVDVSVVDFLSKPWWRKQVARAQMKTQEQKGKGEDKGNARDHYVLALQAQWSAASEEEKARAAPLRIPIDGGEIFVSADARSPLAGGIQADVNAAANIGLRALMDPDFPGRWWYVPCDPATLKPKADKVKGCILENHGPLAEVKQADQSRPPKPKRKRTAKATKEKEVVNLWRDPAPNLLEPKSWCEYAEYLNRLRYRVIQILRQSAGLSCQDSKEAPW

SEQ ID NO: 317 - protein, 1164 aa, unidentified
  REGION 1..1164: note = Cas Enzyme sequence
MPTRTINLKLVLGKSESTLALRRALWTTHAELNVAVQQIERMLLLCRQDQYWTTDGGDEPAHVAADKCTAEALSMGRAAQKQNGSEGKGTDREVLKALRVLYEKLVPSCLVDENGSPLTGDAQASGAWVSPMMDPESEGGLSVYAKVLDPPPKWVHLKEQEEPGWKEASAAWLQSVEALPLLSATGSPPAWVRRLRNGQDWQDAFIEDQEKKRREIERGNAPVIRELKRLGLLPLVLPHFRMKLNSGGKGVSVWDRLAMRLAIAHLLSWESWNHNTKAEHNAAAAAYNALIEEHVHLKSVFDVLREYERARHERLKEVALASDDRPFRIGSRSIRAWDQIRQDWLQKGKDAASRMEILAQLQSRLRGGFGDPDFFRWLAAEGREHLWREDDAVVPFVKINMAHLLLSRRQEFSLMTFADSRLHPRWIMYEAPGGSNLRNYALETAGEKLLLRIKLLNRNDNGGLTEEEHLCRLAPSGQLSDLTLSRDGKKMLLQYRSAHQDFEGEAGGAEILFDRPYIEEPRRKEEQLESGRIGPVWFKLTLDVHTKAPEEWLDGRGRIQTPPEVHHFNTALSNKSKYRDKIRAGLRVLSVDLGLRSFAACSVFELVEGRPEKGLAFPAADGREENDPRKLWALHERSFTLRLPGEATTTREESARREAAGQVRALRRDMRLLRRMLQLGAEDNDQERDAQLGALLEAMPAGDGVADDDVPGFRREDYEGLRDTSFRSTPELWMQRCQQFHAMAEKQLSQRFGEWRRATRGKSSSWQERREKRAYNGGKSVWAIEYLDSVRRLIMSWSLHGRKFGEINRLNRAEHGTVAAGLLRHINKLKEDRTKTGADLLVQAARGYLTNPDGPGWQQRFAPCRLILFEDLARYRFRVDRPRRENSQLMKWNHREISAETTMQAELYGIITETTAAGFSSRFHASSGAPGVRCRVLTAEDFADELPRPYLAAELGWMLGPSFHGNAEKAREALRWVIRPGMMVPWRGGELFASFGADEKLRVIHADINAAQNLQRRFWTRCGEASRITCLAVGEDGGYHLDHTPGARLLGALQQLENGKGEFHLTPADDGVSYVMTRAGRKKGTKAAEGKARAEDGELDELLADMPEEAGTRRETFFRDPSGILFESNRWIPSKVFWSSTRDRIWQEMQKVSLERQSSDELRL

SEQ ID NO: 318 - protein, 1164 aa, unidentified
  REGION 1..1164: note = Cas Enzyme sequence
NKLGDVWKEKYQNIKLDDKGFKILSNAKILEVLLILYPEKSEFIKKFQRFFMYFDGLNKNRENYYTSEDKATGVANRIINENLMTFLNDRQVFEQILEKIPSLKEYNKFFELENYQYCLIQEDIEKFNEKEIGEINKIKNLFLQQENTKPENKDKNIYLPNLKKLYKQIGCKTKQQKEQVETGESIYPKYLEKIGLGFQITKDTQGKYEVWQALQYINNTYKEKLEKLKKNYQDFFTHWSEYNLNEIWFRKESINTISARWFGGDKWNILTEALKKTGTGKMEKGEYKVPSFVSLWEIKQAMDDLVSYEAENLFREEDKYQKLFKSNLFETFLAIWQYEIDSRFNEIRDSLKVFEEKSKEPFDKTLKDENGKSSHTSIVKNFIEDGYLRLYQMTKYHNLEKKGEKDPRVAEGKFYDALDEFWKDNEIVTYHKAFQATLTKKPYSGDKIKLNFECGTLLGGWASDYESYGALIFKREDVYYLGIIKGTKFNDNEIKTLNKNINDKNKAKRLIYLTQKIDNKNPPRWFIRSKGASFSPMIREGLLNPKDILNIYDNKLYSKTVNKIHYREYLPKLLDYYKEGFIKHKDFKKFTFDWLDSREYETVADFYNHTADMCYKINWEGVNFEALTKLVQQNRLYLFQIYNKDFELDENIGKSKYGETFKADKNIGIKNSHTQIFLELLKTENVKQLKLLGGGELFFRNPSKEKKYKKDKLGKEVLDAKRYYEQKYFLHFPIQIKGKNRNLKNSLLNQIVKDNYDQIKIIGIDRGEKHLLYYSVTDSTGKMIEQGSLNEIQCGDKKVNYNEILSRRAGNMMEARKNWETIGNIKNFKEGYLSQAVYKIYQLILKHNAIVVMEDLNTEFKAKRASKVEKSIYKKFELALARKLNHLILKDKKAHEEGGVLNAYQLTPVIDAGDIGKFEKARQWGILFYVRAHYTSTTDPVTGWRKHKYISNSETEKKIKEFFSPETGIQINYDSEKKCFKFSYQDDRGKPWNLYAFDGMQRFYWNNKDRKMGKFNLYEDFEKLFTGLNKSKNINQQIYNKKLDWKRLVFLWNLLNQIRNTDREKEGDENDFLQSPVWSEKYKCFYDSCKVVENNIPNNGDANGAYNIARKGALLLQRIKNCPEISKFGNDNNGKNPENGYYISDQDWDAAVSDWDKYVSSNSR

SEQ ID NO: 319 - protein, 1165 aa, unidentified
  REGION 1..1165: note = Cas Enzyme sequence
MLQFADLKKKQITICQKLIPIGKTRENIDTFNAMANDEYVSDNKNEIKKLIKEMARFEIDEKLSNIKGSLDFTNLFTLMNKVDESENKEEILQELFFERAALAKTISSELNFKYTSAKTITEKLPKFISNNYDGDEKEKYLELVDKVKSRQAMFNRFEESIDFIAGELIKKNTLVYRLLVENSQIFLSNYKRIKEQDISSIITNLDVDDSIKTVLQNQCISFTPDNYNELLTQAKIDKYNYCISMINSELNVFCSVNKLSYSSYELKKLYKMILCEKDLLFEKINKFTDDEQVIDTYNDFITNVNDSNLFEKINSSAMDYDNIYIRPNFINAYSNITYGKWNIVSDCIKAHVEDLRLAGKNKITYEKYVENISIVKIDTIVNDYSSELGVKVNGRDYIEIIKEQLLHKYKEVTNDNISLKSDASIVSETIRKELDYALGTIRLLKLFDFENENFNSANEMALNEILDTLNPANLLYNMARNYITQKPSQKSKLNLVFDTNGFAGGWSESVESQKRVTLLKDDEGNKYLGIYNLNGCRANNTSVAAVVKNIQENLDTNSTKYYEKMIYSAVPDAAKDIPRLFINKSENNELIKKFKNKEHKENEEFKNELIEFIKRQIALHPTWSKYEFVYKDNYGSYKDFCNDINKQGYMLNWEKIDKSIIDNYVESGCIYLFRIHNNDYSKYKKTYSKVKAHTQYLDYLFSDENSKTKLIKLLGGAEVFYREPQIKNPYMHKKGSVLVNKKYKNGSPIGNEYKDLVIKAQTTALDNVFTKVSSRYIVKDNRYRKEQFELHFPILIGEERATDYEKICKNYIKNSNHTIVIGRGKNHLLYVSIYENNKVINAFPLDTVNGTNFKAKLEQIEELKNEQRKTWKNISSNRELLNGYVSAAIAPITDMVLKYKATVVIEIGDSSSKSRNLLPNRAYKIFKEALMKKLAFLTDKNKEMDEPGGLLHPYHLVNIDTRNPNRSINAAQNGIVMQVPAFYCALTDPESNLCNLTYAKTLKEKKQVLKKIGEIKYNKDEDIFTFIYDISKFNKDMKGVYECNSNGLRLIYNNNSEEKINLSQYLKNMLQCKSIDYKSGIINYDSEDKESIEAMFLIIRYTLQMLNKTFYISPVTNLTVQSNDCTESMINQNMYNRFLLLKDNLLLNKPTKYLSIKDVYSKLKP

SEQ ID NO: 320 - protein, 1165 aa, unidentified
  REGION 1..1165: note = Cas Enzyme sequence
MLQFADLKKKQITICQKLIPIGKTRENIDTFNAMANDEYVSDNKNEIKKLIKEMARFEIDEKLSNIKGSLDFTNLFTLMNKVDESENKEEILQELFFERAALAKTISSELNFKYTSAKTITEKLPKFISNNYDGDEKEKYLELVDKVKSRQAMFNRFEESIDFIAGELIKKNTLVYRLLVENSQIFLSNYKRIKEQDISSIITNLDVDDSIKTVLQNQCISFTPDNYNELLTQAKIDKYNYCISMINSELNVFCSVNKLSYSSYELKKLYKMILCEKDLLFEKINKFTDDEQVIDTYNDFITNVNDSNLFEKINSSAMDYDNIYIRPNFINAYSNITYGKWNIVSDCIKAHVEDLRLAGKNKITYEKYVENISIVKIDTIVNDYSSELGVKVNGRDYIEIIKEQLLHKYKEVTNDNISLKSDASIVSETIRKELDYALGTIRLLKLFDFENENFNSANEMALNEILDTLNPANLLYNMARNYITQKPSQKSKLNLVFDTNGFAGGWSESVESQKRVTLLKDDEGNKYLGIYNLNGCRANNTSVAAVVKNIQENLDTNSTKYYEKMIYSAVPDAAKDIPRLFINKSENNELIKKFKNKEHKENEEFKNELIEFIKRQIALHPTWSKYKFVYKDNYGSYEDFCNDINKQGYMLNWEKIDKSIIDNYVESGCIYLFRIHNNDYSKYKKTYSKVKAHTQYLDYLFSDENSKTKLIKLLGGAEVFYREPQIKNPYMHKKGSVLVNKKYKNGSPIGNEYKDLVIKAQTTALDNVSTKVSSRYIVKDNRYRKEQFELHFPILIGEERATDYEKICKNYIKNSNHTIVIGRGKNHLLYVSIYENNKVINAFPLDTVNGTNFKAKLEQIEELKNEQRKTWKNISSNRELLNGYVSAAIAPITDMVLKYKATVVIEIGDSSSKSRNLLPNRAYKIFKEALMKKLAFLTDKNKEMDEPGGLLHPYHLVNIDARNPNRSINAAQNGIVMQVPAFYCALTDPESNLCNLTYAKTLKEKKQVLKKIGEIKYNKDEDIFTFIYDISKFNKDMKGVYECNSNGLRLIYNNNSEKKINLSQYLKNMLQCKSIDYKSGIINYDSEDKESIEAMFLIIRYTLQMLNKTFYISPVTNLTVQSNDCTESMINQNMYNRFLLLKDNLLLNKPIKYLSIKDVYSKLKP

SEQ ID NO: 321 - protein, 1165 aa, unidentified
  REGION 1..1165: note = Cas Enzyme sequence
MIQMTPVSPQMKTITIEARPMWETKKNLQPYVAEESMDMQRIAKYKEVKEVFDTYARKVIEIATQGVADENVLPTYEKLEDLFNQEKNAKTRALYKKACEDYKKLAASIIKKVADDFQLTKNFGKLFKEDSSAIYKNAALLGMKKEDLEVLGLYNNFSSFFTKYFTALSTTMCGVEHGSISFRIMENMERYWQNKQLVRAMEEDPELYMSIKDSIDKMNLEMCMTQDGIDAYNLLLGNTKNTGINSLLNEYAQKKHVRIKLLKPLYKIPLAKVEKQIVVNSIENDDELRVVVLDSLPVAENILDFAKRCLKLTFDDEIKDTTYIYNKNLHTVSYLMFGQFDLLERALKQVELTALEKEQSIISLSHMDAAMKLIEEEPRKSFADIIHDNMAEALKAEKKIPAIRKLCEEQANIKSERAKIKECYDSILFVRRAISMIYTDEVENSFIEDVVGMRDTCAVFNKTYNMVRNYCTKNPIQKKTNDMFFNKGSFLSSFDADKFKEGTSLSTLLRKDGMYYLYILNPAVSTKLSSLAYVEDGGYDRLVYKQISGLSKMFPKCFVSAKDAVERYGLTEEIREIVANKRYTKDANDRESCLKWIQYCMDSFMKNPVWTKYYHVPFKEAEAYESANDFYTRTERHTIYMDWTEHLNEDYVRKSVMDGSAFLFQLYNHDFSPYHTGKDGNYTRILKQLFSEENIHKLNDTDETALKLASGGARLSFRKASIPYKATHRANEELQNKNALNPKKTSKFTYDICKDRRFMSDKFILHIGVQIGFRNEETYTYNLNQIVNEQILKESPNVLTIRTGEEHLLYYMATDAYGHILEQGDLNIIESQGEKFTMRKDFKEILQKREDEMQLAKEAWDYSIDIKDVKNGYVAYAVRAVLDIRDKYDAIIFLEDYSGDFVNKRRANVKAVYQQFQAALLNKLSNYVPTGKTYSETVQLSAPVSSLDDLKGQKGIVFFVNPSYTANVDRTSGFCNQYYDQFTYENMKKADAVCEKLDVQFDEKNREFLISLDDCIEPDKAWQLHTSGERSFWQNKKLAPFNCTEELADLMKDYHMSEFKEYKSVANKAFYERFFTIMRILLKMHYSDSVSGESYFLSPVTGYDTRSKKKGEPLNSSAEKTYLLMLKGIRDLNAINEKTLLIARDEKGKHKENWMKAIRYNLITE

SEQ ID NO: 322 - protein, 1166 aa, unidentified
  REGION 1..1166: note = Cas Enzyme sequence
MALQKLADSPTVDLPLWELIRAKLVEEAEEKASKRTENGERPAWMNSLQSYLEQKFGFPYRTAKDLIWEHAVLLDHALRRVSVAHTWIKRADAERQTFAQDANQIQRLRPDVVEWLNNYCDRRSIDSGADGGYQIRKSAIDGWELVVKAWSAKECQLESQRIEVVHDIQRGLDSDDKWGDSRLFEELAVDAAYVVWHDDAGVASTEPLKKYVAATTARSNQQRFKVPAYRHPHAFLNPVWVDFGNSRWSISWSALTAVNETRKLTKKLASAKTDAAKQKINSQLQQKPELQAVTLGLWTGAAVENVKLRWQGNRLRRDLDLDHFGRDGVVVSRADRVSRATANASTQPVTVQGVFDQSDWNGRLQLNREELERLYHYLTRQSLALNDRKRWDDKAIRLWERLRWHLTTSAKLMPSGPFLDMVKQGLPDGWSWNEKRRFLNYEPNKSQKRTGRTRVQLARLPGLRVLSLDLGHRYAAACAVWETLSSENLQQACQGAGQIMPDQDAMFCLINTSEPKPRTTVYRRIGPDLLDGKPHPAPWARLDRQFLIKLQGEEQAARRATREEFEGYNRFRAFAGLAAVTAVEELDLNGATLKTPSITRLAGQALRDARLALRRLGDRARIAYSMTATHKPISGGRANKLSDWERVEYVQEALLQWHRLATSREFVSSTARERWDEWIVGKLHGPPLVQLPEEMSRPARSKSEETIQENLKGVATQLVDPSSDLCREMNKLWSDDWKMHEAAWKQQLRWLRQLVMPRLGQKPPKLDVEGRRAWKAKKQAMRGAGGLSYDRLRAFRGLYEVLKAFKMRPEPDDPRKNVPAAGSRDPGQFGRRILNQFEQLRMQRIKQLASRVVEAAMGVGAEPASNLKRMRGASVDPRFRPCHAVIVENLKNYRPEESRLRKVNKRLADWSAANVRKYIEEGCHLHGLLFDDVPAGYTSKQDSRTGLPGVRCEDVTRTAFMEAARRTTSDRPPSPFDQHRRTVVWWTREIERSETRSKERKADARDQLIIALAQAARADKDGTRLPDLLCIPRQGGELFLSSGCRSEVSATRPRMLQADLNAAANIGLAALIDPDSPAAWWRIKVSPTTGATVKGDFPGSPLFELPVVLLAESQRGGKRDRQNAFSNPGMEPLDSRPWFNQWEFWPQVLDRCCQRLRQWYGLDEHR

SEQ ID NO: 323 - protein, 1166 aa, unidentified
  REGION 1..1166: note = Cas Enzyme sequence
MIDAYHLKVINEALEGKKLSALDRTAELYFLGKRTDEEEKELEECFTALRKEIVAFLRSHEKFGILDKKNLIEEELNKTVCSEDELAALKNFEKFTSYFTNFNTVRMNLYSDEKKSSTVAYRLIEENLPRFFDNISVFNKIKDSINQSDLTETLELYNITDIGHLFLVDEYNYLLTQNGIDIYNSVIGKINQIINLHNQQNKNEAKLPKMKVLYKQILADRDKKSFIEEFTSDEELICRLREYSEELGKFLHADSEKSIISFINTLNEATGEGIFVKNDTSLTSLSVICCGSWNYMTEQISSEYDNCYTGKKKLNTEKYDDEKKKALNKYKSYSLKKLQEICDDTDIIKTYSARIYEDIEKIDADAIKVIKTLDNHDAGRKLFKNTNAVGEIKAYLDDVKKLEADIKLLMGTGMEPERNALFYGEYTEVYDNIQKIDALYNMTRNYLTKKPFSTEKIKLNFDKTTLLSGWDKNKEHDNLGVLLEKDGIYYLGIINKDNNKIFDEVHDQKLNSYHKMEYKLLPGPNKMLPKVFFSNARREEFNPSDELLEKYDRGTHKKGENFSVEDCHALIDFFKKSINKHEDWKNFDFHFSPTESYEDISGFYAEVKNQGYKVSFKNVDSEYIDSLVDSGALYLFKIYNKDFSEYSKGNYNLHTLYWKMLFDERNLSDVVYALNGGAEVFYRPASIFEEDKIVHKHGTAIANKRSSTDKPTSTFDYDIVKDKRYTEDRFELHVPITMNFTAEGSGKLNAEINGILKQNDGIHVIGIDRGERNLLYVVVVNPKGEIVHQISLNEIVSKYNGNEVKVNYHELLDNREKQRDAARKSWETIESIKELKEGYMSQVVHVIAQLIIQYNAVIAVEDLNFGFMRGRQKVEKQIYQKFEKMLIDKLNFLVTDKGRGQENPYKAGGSLNALQLTDKFESFKKIGKQTGVIYYVPAWMTSKIDPTTGFVNLFNLKYTNLDEAKRFWGKFESIRFNSEKNYFEISFDYSKYTYKADGSRTKWTICSYGERIEKYRNVMANNSWDDREVDPTELLKQLFDKYGLIYKAGNNLVEDITAVDEGYFFKELYHCLKLILQIRNSSKDGKRDYLQSCVMNDKGYFFNSDSADSTLPRDADANGAFNIARKGLWILEQIKSTDDEKLGKVKLAISNKEWLCYAQEHRSING

SEQ ID NO: 324 - protein, 1166 aa, unidentified
  REGION 1..1166: note = Cas Enzyme sequence
MSYRKDKSNEAKKALDAEQTKMRKQIVNAIKKFKHFDELVKSTPKELLKILSQIYADDAINDFQNFATYFVGFQENRKNVYSDEAISTSIPYRLVHDNFPKFIANIEVYNTLVEQCPEVITEAEKELRPFLEGVTIDDIFKLDYYNSLLTQDGIDFFNCVIGGVSEEGNVKIKGINECANLYRQQHSVKLEKKSISMIPLFKQILFDRESYSFIPRQIEDDKQLVKAIDDFNDYLGHCEKDGRYVNVVEELLCLLKGINEFDKNGIFVVSKRLSEISMKIYKNWSILNDDLKESAERKFGDQTVKKNAKQTEKYLNKDAFNLNELSWRDGHSISDYFAPVENKSSEISAYWNAYCLWRDNHDSKHFLNDSEGTSIVKDLLDSYMDLLHYCSILVVDEANELNAAFYNDYLPLYKELESVIGLYNRVRNYLTKKPSDVKKFKLNFNIPTLVNGWDKNKERDNKSILLFKDGKSFIGVYNSKDMPNLTVSGEEVASYHKMVYKLVPGPNKTLPHVFFSKKGVETYKPSSTILSIYDSGSFKCSNKTFNKADLHALINYYKACIKKNVDWNIFDFTFSPTESYNDISEFFNEISSQGYKINFTDIPASQIDEWVNNGQLFLFQIYNKDYAEGAHGKKNLHTLYWENLFAEENLNNLVLKLNGGAELFYRPKSIQKPVTHTVDSKMLNRRDIDGNPVPEKIYRNLYLYFNGKKEFNELEKEDKDYLSKVIVKDVKHEIIKDRRFTKSEFFFHVPITINANAPGTDMKNDDVLAYLKDNPNVNIIGIDRGERHLLYLTLINQRGEIIKQKTFNTVGNYNYQEKLVQREKERLEARKSWSSIGKIKDLKEGFLSAVIHEIAKMMVEHNAIVALEDLNFGFKRGRFKVERQVYQKFEKMLIDKLNYLCFKDRAVNESGGILRGYQLTQKFVSFQRVGKQSGFLFYVPAAYTSKIDPVTGFVNHFNFNDLTTKDKRREFFLNMEKITIKNGNYEFMFDYRKFKTYQTDYQNIWTVSTRGKRIRTHRDAQGYWISEDIYPSQEIDNLLHSVGIKLEDGQDLRDILVNIEDASFFDRLLYLFKLTLQMRNSNAQTEEDFIVSPVMKDGTYFCSADEQAKGKNEQGLWVSKLPVDADANGAYHIALKGLYLLRNGDDKKIGNAEWLKFMVEKPYKND

SEQ ID NO: 325 - protein, 1168 aa, unidentified
  REGION 1..1168: note = Cas Enzyme sequence
MEQFTNLFPVHKTIKFKVYPIGETFKQMEDLLKDDKERAMAYQVVKCLINAYCQNEVIAPNLKKLSSEQSWTRKLEEFHNARDWDSRSRIQSDLIQIVNKKLPKSFNSKALLERLPCYIEKLSDEDLRRTLHNIHDYEITVNGQKIQDVWDGGLKDFALTCHGKFQKFSGYFKPLEVNLKFLFSGKRNGIAHRIVYQNLVTFERNRKWSQIVERIQSVDDITCDYSECLVQDGIDKYNESIGRLVMWLKEYGDSHSDYRNLHKHFKKLNKQILSPRVVPEWLQKAFNSDEEMILSLRAFLDEIEPQHLRLNQLVQNFDSYDNHIYIFRKALPQFSILLRDNYKALDEELDLPNGQTKCKSVSFAWMPFKKELVEELKKEVLDIFSKINKNSQSVTTYLDGERAKRNDYRQNNQASLCIKNLMESYLALYRTVKPLIGTGEEEDRNEDFYDELTTIWDILQHVKKLYDSVRNWLNTKIYENNSYPVFLNEYTLLKKKDSHAYIKRNGKYYFILYKDIKEKDIINHKGDSAIFYHVDKQDPNHFAANLERWFIFSMKANKAKGRNKPTKAKFVRDHSEFLDDWEIVKSGKYKNTRNKKARIHAISYFQRCLQVEYKEYNWQFRPAEEYESFDDFIDSHKDNLFKIEEYEIDWAHVLQLADEGKIYLFKLYNKDYAKNKVVGSKPNLHTLYWEMMFSRQNLVHYNITLEEPKIFRREKASTPQGVLDMRNIPRRFAKDHLELHIPLHMNVNAHVACDLNQAVLEAIRDGKINHIIGIDRGERNLLYYSVLRLSDGKIIKKGQHSLNITSNNVDYHAKLSEKEKELHDEEKDWKARTGIRKLKEGYLSQAINQLTSLIIKYHAVIVLEDLPDDFISKRQKINKQIYQIFEKKLVDKLSYLVDKDANEGQTGNIHSALQLAKQEFDKEEPNKIRQNGFLFLVPPDYTSAIDPVTGFCNLFDKDCVRNVCSLLSNFESISYDQQHDWFEFTWDYSCLINYTRLTQCDTSLRWTACSNGSRIEWTGSEKMQTRKCETVNLTDSFKTLFDKYNIQYQKGEDIREAICSIRDTDYKKELKRLFFLMLSLRNTVNDGEKQQDSIISPVRDGEGKFYDSREYEEKDDPELPTCGDANGAYNIARKGILTIQKLGSGNDEALSLNEWVNSTREGNIHLRL

SEQ ID NO: 326 - protein, 1169 aa, unidentified
  REGION 1..1169: note = Cas Enzyme sequence
KSSVATRIIHENLPKFCDNSIQFELNRINKNVDKGTDNKEISFSRKDEYLNAYQFLKDNNRDTKIKDRESNNYIEAYPITEDIFTINNFANCLSQEGIETYNKVIGHYNLLINLYNQARKKDKDFKKLLPFKTLFKQIGCGKKKSFIKELKYDTQKEQDEKEKTVEVLNLEKQLLNITDVSKKYFTKQEDEAITSVYSFTKWLKEKDDWAGIYWSKTAIDKISNQYFADWRTIKDRIQNVLQSKDKEQKELKESLKAVVSFDKKREEQLKINDAVELSGLFEILDKEVESGWINYFFKKNILEENESLISEDFTPSQNLILLICADIEKHAKLFCNGFDDILKINDYKNEENILSIKEWLDTAKFALWSLKYFEVKESKIKGSSINPELANMLNDLLHSEDTEWFDWYDLVRNYLSKRPQDDAKKNKLKLNFENSSLLGGWSDGQEKNKGAVLLKNNNKYYIGILNQRNIFDTEKDNNPIYKASDSNVGRLILKSIAFKTVAGKGFVSKYNEKYSEIKTPSVAIKKLQEFIKENYVKKYPILKEVAEKQFSDKKDFDKAVQEALVECYECDFTPINWGVVLKAIATDKDNKKPELGKQLYLFEIYSKDFSENKGDKSKNSNLNLQTKYWQHLFENNSTIQLNGGGELFFREKVDLKEEDKAIHPAKQKIFRRSDKKTESKFNHDIIKNKRFTENRFFFHVPIKVNYLAKTPVQAKINETVNNNFTQSPDIQFLGIDRGEKHLIYYSLLNAKGEMISQGHFDCINNKNYLQAINDATEMRKKKQENWQQKGNISNLKDGYISLVIHEIIEKMKGEDGNYKPTFIILEDLNTGFKRSRQKFEQQVYQKFELALAKKLNYLVDKNVKDINQIGSVANALQLTPAVSNYQDIENRKQVGIMLYTRANYTSVTDPATGWRKTIYLKSGSEADIKKQIVGTKEGKFEDGALSEIGFDGLDYFFIYTDKNTGKEWKLWSGKNGKSLERYRFKRGNSKNESIIESIEVKPLLDKLFEKFDKSKSLKQQIKDGMELQKTNEHTAWETLRFAIDIIQQIRNSGDTNNKQDDNFLLSPVRNEQGEHFDSRPFEKQENPKLPKDADANGAYNIARKGIIMYQHIKHLGEKWNRKVKIDGNDTIDLDLFVSDKEWDLWLTDRDEWEKNINYFASREAKSKPQ

SEQ ID NO: 327 - protein, 1172 aa, unidentified
  REGION 1..1172: note = Cas Enzyme sequence
VFKYKLRTDERAELNTERKHKLDTLQAEIKDDPRAPLMEHLLAGLGGAIGYGMRRATIGGWADLRKDFLRIAKKGEPIDEDELLAAIEKAREESSGGFGSGALFKALCDEKYQPLWLPEWENKQPHHPKNFVRWWVLYSEAKEELKKVWDEDTTQPKPIAFTWPGTENRHSETSFRPLDFDIDITPTPPIYLFDQGSEGKPIILIQTNAKPPKKRQSAEVQPADVPAFTDGDGNALYPLTLSYRRFKRDRIANADGSSVEAEFATPLIVGEFPKFPRKEKDKGKPLDSSASLLPADKRGCWHFMFSFKLERGMQKKLVDETVQIPGEKSVRKNRKWVGLYLRWPIDATTEKPPKKKHVQAVPDASDVTKEPDANFSVKKIWCSVDFKPFDILSVDLGVRYAGAWCRGRVKVGRDADRPGQRTISPAGHAHEIVFDAYDFGTFRLQGEDAKIWRKDKHKGFGSEPELEKCGSRGRITSETERQEFAKLAGQLFAPTAWLPIPSEPDELKFFPDLGGHLAYRLRRRLGRVRFLFKLHWQINGKIKKVGHDYIALDGDDLKTFRCEQRSNVLASLAYIPKEDMPEDSDEGEDDFMRELRLTLAPDDVWAALTYEHDGKTYPLFSKIKGGRTKEEKEKSKGQKAVQKAAGAALKKELASDGVGKWNWQALAKAADTELVHTMRAFAGENSLIAEVARFVWPLQNKKWKWNNCTIAKDGKLVQSLLERDDESSEPKRFIHGMRGLNMKRIRLMQDFRQCCQSLAKLERRFTEENHGLEPSPVRPGDRVHEPAPAFLDKINELRDQRVNQTAHMILAEALGLELMNPTEVMIDGKSKWVLKSERDLHGRYKQKKARVAAIVLEDLSRYRTSQDRSRYENSQLMEWSHRAIIGKLQDMAQVFGIQIITVDARFSSRFCSRTGVPGIRCAQVAKGFDNDYPWKKWKEETFGKADKDGKRQLTERANMIVLAAKALNLSDNLKATLILPMDGGPAFLPVISHSPTKEGLQENADIGAAVNIGLRPVAHPDRLDVFPVLRTEAKADGKLEIKNRRGSLSEAASKAEDRTVQTIEPPAEKKAASAEDDIGGDEELESGKFPYLYAAVRVGNNLSVPIADQHRYQLPLAADGRKLVAGDTVGVGAAQSKDFWPRVKRDCWERIKRINATRLRNLGIEPPKEWNI

SEQ ID NO: 328 - protein, 1176 aa, unidentified
  REGION 1..1176: note = Cas Enzyme sequence
DGGKDSLEEYFLYYNKGKKEDKQIATFEKVQENLRKSIADRLAKDTNFSRINKKELIKEDLLNTDLMRQLTEEEQALVKEFSDFTTYFTGFNQNRQNMYSAEKKSTAISYRLIHENLPKFIDNMKTFDIVANSEVAVQFDNLYQKMETYLNVEKLSEMFCLSYFNVVLTQTQIEVYNAIIGGKSLDDGSRIQGLNELVNLYNQKHKDAKLPKFKLLYKQILSDREAVSWLPEKFEKDNELLSSIQKAYQELSGIILGDSNLKNLLLNIASYDLNRIYISNDTQFTQISQRLFKDWGALHRVILEDLKSTVARGKKESESDYLDRLDKLVKKSESYSIGYLNQCIDKSELPDKPHVETYFTSLGAVHEETEQCANLFTQISIYYMEAQKLLTQEYPTQSNLAQDKQAVDKIKNLLDALKSLQHFVKPLLGNGDEPDKEERFYGELDSLWQEMEQITPLYNKVRNYLTRKPYSTGKIKLNFENSTLMDGWDLNKEPDNTTVILRKDGLYYLAIMNKAYNRVFKADILPDNGECFEKMEYKLLPGANKMLPKVFFSKSRIKEFAPSEKLLQHYADGTHKKGPNFSKADCHELIDFFKASIQKHEDWSKFNFQFSDTSTYEDLSGFYREVEQQGFKISFRSVSVSYVKKLVEEGKIYLFQIYNKDFSPSSKGKPNLHTLYWRMVFDERNLKDVVYKLNGQAEVFFRQASLTNDLTVHPAHQPIANKNPNNPKKTSTFEYDLIKNRRYTVDHFQFHVPITMNFKATGNSMINPQVYQYLKETKDTYVIGIDRGERHLLYLTLIDPQGRIVKQCSLNEMVNEYQNVVRKTNYHDLLDAREAERKQARQSWMTIENIKELKEGYLSQVVHLISQMMVKYKAIVVMEDLNMGFKRGRQKVEKQVYQKFEKMLIDKLNYLVDKDTDAEAAGGLLHAYQLTNKFESFQRMGKQSGFLFYVPAWNTSKMDPTTGFVNLLDTRYESVASSLSFFRRFKQIRYNEDKDWFEFKLDYNDFDKRAEGTRTEWMLCTQGERIITFRNKAKNSEWDSKSVRLTEEFKKFFYQYDVDIHGNLMDTILERTDKSFFEGLYALLKLTLQMRNSITGTDVDYLISPVMNAKGTFYDSRQSGSQLPENADANGAYNIALKGLWVLKQIWESKELKEVKLAITNKEWLQFAQEKPFLKY

SEQ ID NO: 329 - protein, 1177 aa, unidentified
  REGION 1..1177: note = Cas Enzyme sequence
MEHLTNLFQVHKTVKFELRPIGKTEDLINKNGFLLSDDKERAMAYQVVKCLIDDYYQKEVIAPLLEKVKDNEDWNHNLVAYGDASDSNTRRAISQKLAAIIIKAKPNEPSANLLYTQLHNYLQKQNTGDLCHILKDLQYDEIAIKDRTLKAAWNYKLKDFVQDAIDKFNGFTLYFSALAVNMKQLFSRKKNGLAHRIIYQNLYTFVRNKRALDDLRVVIAEFRDEKDIAVTDFSNYLLQDGIDKYNKYIGQLIQRLKEYEDSHPNSSRWHRRFKQLNKQILSPRIAPDWLPAAFTNDEMMVVAICAFMKSVNPQLSALKEIINQIDTYNGPIFIYRKSLRSIAVQMTGDYKGLDDAFVIPKGYSKSESLSLQWTTPEVKQEFLGFLKDNLSAKLLSIQQASCEADEFLNLKKAEGNDYRRNNKASVSINKLMNAYKQLYNLLRPLTGTGDEEVRDEDFYGSYMPIVDALQPINELFDSVRNWLTKTAYSNESYPTYLGVATILKNWSSKAVYLKKDRKYYFCLASTKGEEKRDIHDILKKIWISNNCPKDAVIYLTRTQSPERITANLPRIFIRSKEADKVNSFVEKHPELKTEWEKLKGGGYKSPELKNEAISYFQKCLQLHDDYKYYKYHFRPAKEYDDYDSFVNSLKKEALFFFEEKPICWNELLQLVDDGKVYLFQLYNKDYADNRPGNSTPNLHTLYWEAVFSQQNRLSYDFKLEEPKLYFREKADVVQRTGDIHSVPLRYQKPKMHLHIPILMNANAQNMVDVNQLVLEQIQAGTFSHIIGIDRGERNLLYYSVLNMNGSIVEQESLNVINDVDYHKLLMEKEADLDDEQRKWKARSGIRKLKEGYLSHALHQLTNLIRKYNAILFVEDLDKAFKHSRQKIDMQIYQLFEKMLIEKLSFWVDKKVSDGNHAGSTFCALQLATPGLKQEEKGVRQNGILFFVPPEYTSAIDPVTGFCNLFDREHVKDVRRIFAHFKRVSYNVDKDWFEFEWDYQDVLQYTRLKECATPQPWVVCSMGERIEWTGSERYRNQKCESVDLTTEFKILFEKYNIQYVNGEDLKDAIASINKKEDINELKRLFFLTVSLRNKPNKDTDYILSPVCDANGVFFDSRLVNSEALAKLPVDGDANGAYNIGRKGLLSINKLKNGINEPLSLEEWVQSARQEIYQTTNQT

SEQ ID NO: 330 - protein, 1177 aa, unidentified
  REGION 1..1177: note = Cas Enzyme sequence
GSLDRSDASKKKLEKTQTEFRKKIAKALTSHDHYKELTASTPKDLFLKVFPDHFGKQAAIDTFDGFSSYFTGFQENRQNIYSDEAISTAIPYRLVHDNFPKFLSNIEVYKTLKDNAPSVLSDAENELKDFLNGKPLANIFELNAYNDVLTQSGIDFFNQVIGGISGEGGEKKTRGINEFSNLYRQQHPEFAQKRLATKMIPLYKQILSDRETKSFILESYSTDSQVQESVKEFFESQILNCDIAGRKVNVLKELSSLIKRITEFDLGSIYVNQEDLSNISLELFKSWNTINAVLFKNAENRIGSAEKAANKKKIDAWMKSNEFSIATLNLAIAESDSEEISRVKIESYWNDFKAKVQSILCGDNRRNLDEFLSATFNENNALREDSEVIGKLKTFLDALIELMHSIKPLISDAENRDLSFYNELMPLYDQLSLVVPLYNKIRNYATQKLTESEKFKLNFDNPTLADGWDQNKEEANTAILLLKNGLYYLGIMNAKNKPKIKDFKTSESEDCYDKMVYKLLPGPNKMLPKVFFSEKGLATFKPPKDILDGYNAGKHKKGDLFDIGFCHQLIDFFKESIAKHPDWKKFDFNFSDTSSYEDISGFYKEVTDQGYKITFSKIPTSQIDEWVNEGKLFLFQIYNKDFAPGAKGSPNLHTLYWKSVFSPENLKDVVVKLNGEAELFYRPSSVKKPYSHKVGEKLVNRIGKDGLPLPESVFGELFRYFNGKLDGELSDEAKRYLDVAVVKDVKHEIVKDRRYTQDKFEFHVPLTLNFKADSKNEYMNERVRQFLKDNPDVNIIGIDRGERHLLYMTLINQKGEILKQKSFNIVESVNYQAKLVQREKERDAARRSWSSVGKIKDLKEGFLSQVIHEITTTMIDNNAIVVLEDLNFGFKRGRFCVERQVYQKFEKMLIDKLNYLVFKNKPEGDVGGVLKGYQLAEKFDSFQKLGKQSGFLFYIPAAYTSKIDPTTGFANLFNMTELTSAEKKKEFLSHFDDITYDGKNDRFLFSFDYKNFKCFQTDFIKKWTVYTQGKRIVYDKESKSAKEIFPVEIIKAALAKQNIALTDQLDVLSAINSVEASPKSASFFGDICYAFEKTLQMRNSIPNTDEDYLVSPVMNKKGEFYDSRSCGDTLPKNADANGAYHIALKGLYLIKNVFDAGGKDLKISHEDWFKFAQSRNS

SEQ ID NO: 331 - protein, 1178 aa, unidentified
  REGION 1..1178: note = Cas Enzyme sequence
MATRTIRLKLVVPRGADPERRQALWASHAAINEAARYYEQQLLLMRQREYETEAGVVTSDNIAAELRFLVTKAQGANGKSPGVELDEASDLLHRLYELIVPSALEGKTGKAQEAGGFIGPLTDPKSTGRLGVFEKLDRVEPNWVGALNSRRDQVRAAGDRWLATKDGKACIKVAKKSAKWVKQHAANNPSWPQHFLDSAKKRKSEDGTDIPDWVAGLQEVDDTLLDAANTWLETPTGKEWMSDTGRKATWRNAAIAKEPSWPLQFIAKLEDLKEEAAKGAPPIVKRLRELGALPLFNPLITPQIYAGDGESARSGLTPWDRLAFRLAVGHLLSWESWCHRAASEHAARIKKLQDYRAENLTSDLAPAMARLDEHERERSTELSNRGLGESIYCVQTRGIRGWSDLQAKWASASDKSEAHLKEIAAAEQARLGNKFGDPHVFSWLAESNNHIVWRDSDKPLRVRAVINAMQGLVDRSKERALQTQPDARLHPVWMQWEPLGGANLKNYEVSVCENEQLEVKLPLLKRRADRLYEEKTFGFPIAPSGQLRKASFSSEGGTTHRVSYENDAGETHQATLQSSDLYLHRHHLEQRREEVLEDGDIGPAYFKFVLDVEPLLPAGWDGKKPAFLLHFNHSKGKKSGVENEIKLGSRVLSVDLGLRVFAACAVFELKKKRDAKRLSFAVNFGKQKAFAVHERSFQLKLPGEAVGGAGEAWRQEQLAQIRALRRVLFRYRSVMNLALEADAKKRHLKIAKLVDELADEAGDSIDERNLLGGIDGHTAAADPIWADEVKKTLAEYRKRLARIFRDWRAVTKRAPAGYVGKSMWAVDYFTNVRRLLQSWSLLGRETGNVRRADRDAEGIFAYRLLHHLDGIKEDRLKTGADLIVQAARGFIRDESGKWSQRYKSCEVVLFEDLSRYRMRTDRPRRENSQLMKWAHRKIPDEVKGQGELFGLHVGNTSAQFSSRYCAATGAPGIRALRLTASNLASDFMCEALKKDGLDPDRLQAGDLVPWHGGSRFIAIDKKGHLFETDADINAAQNLQRRYWLQHGDAFRLPCRRVTTEDGDCWVPSSFGARIRGALGGAAVLVPTGHDSGSCELEKVSDARLRKLGGGGDAQQESVGDEELEALNEELIELSDDRETYFRDPSGTVLPHKFWYPSKIFWSIVNNKSRSALPAIERQ

SEQ ID NO: 332 - protein, 1178 aa, unidentified
  REGION 1..1178: note = Cas Enzyme sequence
PLKEAIVIFQKTKSDESKKRLEAEQTIMRKQIAAAIKDFKHFKELTAATPSDLITSVLPEFSDDDSLMSFRGFATYFSGFQENRINIYSQESISTGVPYRIVHDNFPKFLSNLEVYDRIRSVCPEVIKQASEELQPFLEGVMIDDIFSLDFYNSLLTQDGIDFYNRVIGGVSEEGKQKYRGINEFSNLYRQQHKELAASKKAMTMIPLFKQILSDRETLSYIPVQIESEDELVSSIKQFYEHITHFELDGKTVNVLSELVAVLGNIDSYNPDGICISASKLTDISQKVYGKWSIIEEKLKEKAIMQYGDISVAKNKKKVDAYLSRKAYCLSDLCFDEVVSFSRYYSELPQMLNAINGYWMQFNEWCRSDEKQKFLNNPMGTEVVKCLLDAMMELYHKSAVLVMPEEYEVDKSFYNEFIPLYEELDTLFLLYNKVRNYLTRKPSDVKKFKLNFESPSLASGWDQNKEMKNNAILLFKDGKSYLGVLNAKNKAKIKDAKGDASSSSYKKMIYKLLSDPSKDLPHKLFAKGNLDFYKPSEYILEGRELGKYKKGPNFDKKFLHDFIDFYKAAIAIDPDWSKFNFQYSPTESYVDIGAFFSEIKKQAYKIRFTDISESQVNEWVDNGQLYLFQLYNKDYAEGAHGRKNLHTLYWENLFTDENLSNLVLKLNGQAELFCRPQSIKKPVSHKIGSKMLNRRDKSGMPIPENIYRSLYQFYNGKKKESELTTAEKQYMDQVIVKDVTHEIIKDRRYTRQEYFFHVPLTLNANADGNEYINEQVLNYLKDNPDVNIIGIDRGERHLIYLTLINQRGEILKQKTFNIVNNYNYQVKLEQREKERDEARKSWDSVGKIKDLKEGFLSAVIHEITKMMIENNAIVVLEDLNFGFKRGRFKVERQVYQKFEKMLIDKLNYLSFKDREVGEEGGVLRGYQMAQKFVSFQRLGKQSGFLFYIPAAYTSKIDPVTGFVNHFNFNDITNAEKRKDFLMKMERIEMKNGYIEFTFDYRKFKTYQTDYQNVWTVSTFGKRIVMRIDEKGYKKMVDYEPTNDIIYAFKNKGILLSEGSDLKALIADVEANATNAGFFGTLLYAFQKTLQMRNSNALTEEDFILSPVAKDGHHFCSTDEANKGRDAQGNWVSRLPVDADANGAYHIALKGLYLLRNPETKKIENEKWFQFMVEKPYLE

SEQ ID NO: 333 - protein, 1179 aa, unidentified
  REGION 1..1179: note = Cas Enzyme sequence
MDNFKNFTDLKQKQITICQKLIPVGMTRKNIDIFNAMESDEYVSENKGEIRKLIKLLAREKMEEGISKAKSNLSFTKLLGLMNEYNETDSEYKMEVLERLFDERVRLANIIASEFKTKFSCADTITTLLPEYVNEHFNGSEKEEYLNLLEEVKKHQAMFNRFESNIDNMFSPMLKKGSVVYRMLVENTQIFLNNKSKTDKEDFKKIIDLSELDDETKSIIIKRCIDIDEESYAEVLIQEDIDGYNYCIGMLNSESKMFCDKNKLNYKDFELKNLYKAMLCEKTAFFEKIDSFKNDEQIVDSYNSLMSNINAKNIAKTYEKCMGHMDGMHIKPSVLSFYSNVVYGKWNVVRNCIRAYCQDEMNSIKKNKKSLDDYYEAFIKKGITINQISNIVSSYAEELELKVFEKDLSDTIYSYLLHKYACVEEEKTPLKSDESKNAETIRVELEHCIQALRLLKIYDTENDNLNEEMKTLIDEIIDELSPAILLFNMTRNYITAKPTPKKKLALTFNTASFGGGWSESVESSKRVSLLKDDEGNKYLMIYNITGCKANNVSMVSVTEKVKANLLNDKKNIDCYRKLVYSAVPDALKDISRLFINKLEDEEMIKRYKNKEHKENREFLNELISVLKKKINEHPTWSRYGFKFRDEYDSFDDFCDDINNQGYYAKWKYIPKTVIDEYVENGCIYLFKIYNNDYSAYKKAGSKVKTHTRYLDYLFSDENEKTDLIKLLGGLEVFYREPQIKNPYVHKKGSILVNKKYKDGTIIGNEYKELFKKAQTTKLDNVYTRACPYDIIKDKRYTMEQFEVHFPILIGNDNNPENFIEMSKHFVENAKHTVVVGRNRDNLLYVSVYEENALIHSKSLNKVNGTNYKDKLFIIEDAKKNNARNWKTIGSNDALLTGYISAVIKDITDLVLKYNAALVIEMGSNLAKDRNLLPNRVYTKFKEALLHKLEFLIDSEKADDEPGGLLHPYHLTEINKKNPKRSIDTPHNGIVLLVPSFYCGLTDPESNLCNLTYARTKKEKEEVLKKIKGFKYNKEESIFEFVYDMSLFNPNMKGKFTCTSNGDRLVDTENDKVVMDLTHYIEDKLKSLGIEYKSGNEINLISDDGLTNETLFNCIRYTLQMNNGNFFISPVTGFCYTCDGCSNISYNRNLYNRSKLVKENIKSGKKLKFMTIKDIYKPQS

SEQ ID NO: 334 - protein, 1179 aa, unidentified
  REGION 1..1179: note = Cas Enzyme sequence
MNDLKQFTGLYSLSKTLRFELKPVGKTLENIEKNGILERDNQRAIGYKSVKKVIDEYHKAFIDRILNDYERKLDEQQRSIWNESLSEFYRLYHLPTSTPKRKDKIAKVQDTLRKQISDCFKKDRQYGRLFGKELIREDLVEFVNTSQFVDYILSQKGNENLSEDEVQKIQEDTIREIAQFKGFTTYFDGFMNNRENMYVPDDKATSIAHRMIDENLPKFVDNFDAFEKIAASDVAKEFGSLYTKMEAYLNVISIDEMFRMDYFYMVLTQKQIDVYNAIAGELNKLTNEYNQQQKDKAKRLPKLKPLFKQILSERNAISWLPDEFESDNEMLQSIKKCYQDLRENVFEGEHSLKALLHNISDYDLNHIYIPNDLQLTNISQKHFGSWSLIMGAIEEDLKSRTPRKRNESEEKYDERIAKILKGIDSFSIADINRPMQSKTDDFKPIEAYFVQMGAEDNENGQKLNHFTRIENAYADVKALLNTEYPKRKALSQDKKNVEKIKNLLDAIKSLQHFVKPLLGSGSESEKDSQFYGEFIPLWEMLDYITPLYNMVRNRLTKKQCSDEKIKLFFENNGLFLRGWTDSQTESDKGTQYGGYLFRKKNSIGEYDYYLGVSDATKLFRSFKSVPDVDKSDFERLDYYQLKGNTFYGTFYKGDYESESANIKRAIDYFISRNGNSDIKETISEERRKRQSKISTAIGYLKFLRQYDSELYKSLLQDEGFEKCNRAMMSSIRETLMALDRIPSAQEYTDKDYSLFSNMMDDVEVLLKGKVFSYFPVSQSELDEALVREERPLYLFKITNKDLSYAETHEKELRKSRGTDNLHTLYFKALMSGNQNVFDIGSGAVFFREKKIDYTDEQLKKGHHHEILKDKFKYPIISNKRYAFDKFQFHLSISMNYNADNNKDINRMVNAYLKESNTTHIIGIDRGERHLLYLSLIDLQGNIVEQYSLNEIVNEYNGNTYRTNYHDLLNAKENKREEARRSWMEIENIKELKEGYMSQVIHKIAQLMVKYNAIVVLEDLNMGFVRVRQKVEKQVYQKFEKMLIDKLNYLVDKQRDAAELGGVLNAYQLTNKFESFQKLGKQSGFLFYIPAWNTSKMDPTTGFVNLLDTRYENMAKAKVFFGKFKSIRYNAEKGWFEFAFDYNDFTTKAVNTKTQWTLCTYDTRIETKRDPKQNNNYVSK

SEQ ID NO: 335 - protein, 1180 aa, unidentified
  REGION 1..1180: note = Cas Enzyme sequence
LFGNKLIESYKDKEDKKKIIDSDLIQFINTAESTQLDSMSQDEAKELVKEFWGFVTYFYGFFDNRKNMYTAEEKSTGIAYRLVNENLPKFIDNIEAFNRAITRPEIQENMGVLYSDFSEYLNVESIQEMFQLDYYNMLLTQKQIDVYNAIIGGKTDDEHDVKIKGINEYINLYNQQHKDDKLPKLKALFKQILSDRNAISWLPEEFNSDQEVLNAIKDCYERLAENVLGDKVLKSLLGSLADYSLDGIFIRNDLQLTDISQKMFGNWGVIQNAIMQNIKRVAPARKHKESEEDYEKRIAGIFKKADSFSISYINDCLNEADPNNAYFVENYFATFGAVNTPTMQRENLFALVQNAYTEVAALLHSDYPTVKHLAQDKANVSKIKALLDAIKSLQHFVKPLLGKGDESDKDERFYGELASLWAELDTVTPLYNMIRNYMTRKPYSQKKIKLNFENPQLLGGWDANKEKDYATIILRRNGLYYLAIMDKDSRKLLGKAMPSDGECYEKMVYKFFKDVTTMIPKCSTQLKDVQAYFKVNTDDYVLNSKAFNKPLTITKEVFDLNNVLYGKYKKFQKGYLTATGDNVGYTHAVNVWIKFCMDFLNSYDSTCIYDFSSLKPESYLSLDAFYQDANLLLYKLSFARASVSYINQLVEEGKMYLFQIYNKDFSEYSKGTPNMHTLYWKALFDERNLADVVYKLNGQAEMFYRKKSIENTHPTHPANHPILNKNKDNKKKESLFDYDLIKDRRYTVDKFMFHVPITMNFKSVGSENINQDVKAYLRHADDMHIIGIDRGERHLLYLVVIDLQGNIKEQYSLNEIVNEYNGNTYHTNYHDLLDVREEERLKARQSWQTIENIKELKEGYLSQVIHKITQLMVRYHAIVVLEDLSKGFMRSRQKVEKQVYQKFEKMLIDKLNYLVDKKTDVSTPGGLLNAYQLTCKSDSSQKLGKQSGFLFYIPAWNTSKIDPVTGFVNLLDTHSLNSKEKIKAFFSKFDAIRYNKDKKWFEFNLDYDKFGKKAEDTRTKWTLCTRGMRIDTFRNKEKNSQWDNQEVDLTTEMKSLLEHYYIDIHGNLKDAISAQTDKAFFTGLLHILKLTLQMRNSITGTETDYLVSPVADENGIFYDSRSCGNQLPENADANGAYNIARKGLMLIEQIKNAEDLNNVKFDISNKAWLNFAQQKPYKNG

SEQ ID NO: 336 - protein, 1180 aa, unidentified
  REGION 1..1180: note = Cas Enzyme sequence
CVNKTEKMVKDFENIQDNLRKAISSALKKDDRYKRIYKKELIREDLINFLEDEKEKRLVEEFHDFTIYFTGFHENRQNMYSSEAKSTAIAYRLIHDNLPKFIDNMGVFKKVTQTSVADNFADLYSAFEEYLNVNSISEIFELHYYSMVLTQTQIEVYNCIIGGRTLEDGTKIKGLNEYINLYNQQHKDHLPKLKPLFKQILSDREQLSWLQDEFKTGSDVINAVKEYSESYYANIDETIKVLFTSLSDYNLSKIYILNDLPLSDISQQMFGNWSVIPNAIEQDIRNKNPRKTTENEERYTERINKIKKQSKSFSLAYINHCLSGINGADISAYFASLGAINTEKKQCASITSEIAMNYNMLKSILETEYPKEKNLSQDKITVMLLKNLLDSFKSLQRFVKPLFGNGDEAEKDEKFYGELTQLWEILNEITPLYNKVRNYATRKPYSTEKIKVNFENAQLLDGWDENKEKDNAAIILCKDGMYYLGVVKKECRQLLDKPMPFDGECYDKVVYKFFKDITTMVPKCTTQVKAVVDHFKHSSTDFTLYDEKKFDAPVIITKEIFDLNNVLYGGVKKFQIEYKRSTNDEAGYKHAVEVWKAFCIEFLKSYKSTSVYDISSIEKDIDTYSDLSSFYSAVNLLLYKLTYRKVSVNFINTLVYEDKMYLFQIYNKDFSKYSHGTPNAHTLYWKMLFDEQNLKDVVYKLNGQAEIFFRKQSINISKPTHPANIPIDNKNALNVKKQSTFAYDLVKDRRYTVDKFQFHVPITLNFKSSGRNNINMLVREYIKNSKDMHFIGIDRGERHLLYLCVIDNKGNIVEQYSLNNIVNEFMNTDYHQLLNERDKKRQEERSSWQTIEGIKELKQGYLSQVIHKISQLIVKYNAIVILEDLNGGFKRSRQKVESSVYQQFEKALIDKLNFLVDKKKSPTEDGGLLHAYQLTSKFDSFLKMGKQSGFLFYIPAWNTSKIDPATGFVNLFDLRYENVAKSQDFFNKFDSIRYNEIEDWFEITFDYNNFTTKAEGTKTRWCICTYGTRIETFRNVEKNSSWDSKEVNLTDEWKKLFNDYNIQLGADLKEAILLQSKKDFYTMLLYLLKLTLQMRNSITGTDVDYMISPVKDNNGHFFDSRQSNGNMPENADSNGAYNIARKGLWLSKQIKQTEDLNNVKLSITNKEWLQFAQTKPYLND

SEQ ID NO: 337 - protein, 1180 aa, unidentified
  REGION 1..1180: note = Cas Enzyme sequence
MNQFTNLFQVHKTVKFDLRPIGKTAELINSDGFLVSDDKEKAMAYLVVKCLIDEYYQKEVIAPILDNIKDNKEWNGLLEKYDKAKDGLERNAISKKLAGVIDKSKPTKPTAKALYTPLKDYVLTLKNAELQLILKDLQYDEVVIGGKTLRAAWNKELKEFVELAIDKFKNFTPYFETLATNIEQVFSGKKNGVAHRIVYQNLYTFIRNKKALDDLKIMVDEFSGEKEMLVGDFSYCLHQSGIDKYNKYIGKLVQRLKEYSDAHPKFSMWHKRFKKLNKQILSPQITPSWLPAAFTNDEMMVVAIRAFVNNTSPYLPALEEIIRQIATYDDHIFIYRKSLRSIAAQMTGDYTALDGSFEIPKSSSQKESLSLRWMSNEMKNKYFLYLNNSLSSALQSLKKSSSDAQDFLNLKKAGNNDYRRNNQASVCILRLMESYKQLYRLLRPLTGTGDEDDRNEDFYGDFMPIVEALQPINNLFDSVRNWLTKASFSNDSYPIYLGKATLLDNWTNKVVFLKKDGKYFFLMLNGIQKDELQGGSTFDTIVYLPYSQAANRIDANLTRQFVFSKKPNASKGRNEPTMAKFVREHKAELAKEWECIKDGKYKVSDSKEEVEHAIRYFQKCLNMHPDYKNFDFGFLPVEEYDNYTSFVESLKGKLFRIEEKTASWESIIQLVEEGKVYLFQLYNKDYADNRASNSTSNLHTLYWESIFCQKNLLSYDFKLEEPKLYFREKADVVQKTGNIHSVPLRYQKPKIHLHIPILMNANAHKSKDLNLLVLEQIQNGYFSHIIGIDRGERNLLYYSVIDMNGNIDKQNSLNIINGINYHEKLMEKEVELDDERKKWKVRTGIRKLKEGYLGHAIHQLTNLILEKNAILVLEDLSDSFKRDRQKIDMQIYQLFEKMLIEKLSFMVSKNVCDVNQEKSTFRALQLADPKIEMPKTGIKQNGIVFFVPPEYTSAIDPVTGFCNLFDRDRVKDIRNLLACFKSISYNSDKEWFEFEWDYQDVLQYTRLEQCANSFPWVACSFGNRIEWSGSKSCHNLKCENVSLTSGFKALLGKYRVEYRSGENLKEMFGAINKKDDIKELKRLFFLTLSLRNKPDGDTDYILSPVQDVNGAFFDSRSVNKESLPQLPENGDANGAYNIARKGLLSINKLNNGNNEAISIEEWIQSAKYVKIKFTGPTLCV

SEQ ID NO: 338 - protein, 1186 aa, unidentified
  REGION 1..1186: note = Cas Enzyme sequence
MNNVFEQFTNQYSTSKTICFKLIPSEITMKNIEKNGFINRDFERYNNYKVVKKLFDDYHRFFIESSLKDISLDVSELYRLSVEFRNNKEIKKELDAEIKKVKVNIENVFKNNEIFEELFNNSFIEIVDDYTNNQFTDILYSFNGMTGYFGKYNENRRNVYNKSIPSRIVEENFQIFVNNILKFEKVISKYPELKDKIISVITDNNCVANIFNYEQYCNFIIQNGIDNYNNSIGIINQFVNESYQKNEIDSKLKFAKLNKQILSDTISSFVIENFDNIDDTVRSIKSFISDIKKDNFFDLINQLSNNFDYFDSDKVYIYKNNINKISNILFGDYNYIKTLLVDYADEHFNTKSQKNNFIDSDYFTVSILDEIIKVKNIKDILNFDFNVIDKNIEQFLSINDYTKDKSIQIIKNMFDSIQYCKKIFDLLQCQEEQLDKDVIFYNEYKNIYDIFKSFSKLYNQVRNFFTKKNRNKNKVVLKFDNPIFGKGLAFSKEKDYKTFFFKHGNNFYIGIMNKDNMPKFVESNDGDVVQKYIFQSFSNPTKQVPRCCFTQGIKKHFESGTDDIIVNKEVFTNSLRFTKKIFDIYESKSFKNNIEDKNDYIDFIKHFFNSYKNIKNYYDLSKFKSSEEYPTLESFYEDAEKYFYLIDSINVSYEDIKQMELNNQLFTFQIYSKDFSKYRKENSNKNIHTLLFEAIFSEENKKQMFPFRLNGNFEIFFRKKSIDNPTIHKKGEKLLNKTDLNGNRIPNNIYMELFQFINGRLEKDISNEALAYMDKIKINEAHFDIVKDNRYTTDQFEIHLPMILNALSGNKVKIKDFNEEINAYVKKNNCNIIGIDRGERNLLTYTVIDGSTGKEIEHGTLDEVNGVNYNNLLTLRSIERNKARKNWNEIEQIKELKSGYLSWCIHKICNLIVKYNAVICLERLNSKMKKSRAKIEKQIYNAFEKSLINKLSYMINDKKESIFNGKQLVCITDQMNDCIQNGIIYFVDPSYTSKVDPETGFANVFRISEITNNKKKIEFFSNFNSIIFDGNDFVFSFDYKKFNTWKKYKDGKFTVSSIGDRIKRFKNTNGYFDYKTIYPTIELKNIFSGIDYNINENLKSIILSDEQLCSKVFDIFKYIVTLRNTNSECDYIISPVKNNNGEYFDTRKIKNSNADTIASFNIATKGFLYINYSKLKVEDYFNHLKK

SEQ ID NO: 339 - protein, 1187 aa, unidentified
  REGION 1..1187: note = Cas Enzyme sequence
EIRKNISEEFTKSDEYKNFFGKEDSKKLFKTFLPEYLNQINASESDKEAVNEFQKFKTYFSNFLIVRADIFKADNKHNTIPYRIVNENFMIFAGNKRTFSNIIRLIPNALEEIAKDGMKKEEWSFYNIQNVDSWFEPDSFQMCMSQRGIQKYNFIIGLVNSYINLYTQQNPQATEVKRSRLKLRMLHKQILSDRVNPSWLPEQFKEGEEGEKQIYEAILALENDLIKNCFDKKYDLWIQSIDIQNPRIYIAASEMARVSSALHMGWNGLNDVRKTILLESDKKQAKVEKILKQDVSLKDLSDTLNRYADIYKEEQIPSLYQYIEYGSELLQDCAITRKEYHDLLNGNSNTLSLNQNEKLIEGLKAYLDSYQAILHFLNVFIVGDELDKDTDFYAELDGLVESLSEIVPLYNKIRNYITRKVYSLDKMRIMFERSDFLGGWGQSFDTKEALLFQKDNLYYIGIIEKKYTNMDVEYLHEGIKEGNRAIRFIYNFQKADNKNIPRTFIRSKGTNYAPAVRKYNLPIESIIDIYDAGKFKTNYKKINEKEYYESLEKLIDYFKDGILKNKKFHFNWKPSNEYENINEFYNDTNNACFLLEKEEINYDHLKEQANQGKIYLFQISSKDFNEGSKGTPNLQTMYWRELFSNQNCKDGVIKLCGGASIYMRDASIKQPVVHRKNTWLINKWYKVNGQNVVIPDDTYVKFTKIAQERMNEDELTPQERQLWNSGLIQKKKATHDITKDRRFTKKQYMLHAPLTINYKQQDSPRYFNEKVRSFLKDNPDINIIGIDRGEKNLIYITIIDQKGNILKGMQKSFNQIEEKWKEGRTIDYYSKLESVEARHDTARKNWKQIGTIRELKEGYLSQVVHEITQLMIQYNAVIVMENLNMGFKKRRMKVEKSVYQKFEKMLIDKMNYLAFKRDMQGNAIDPYEVGGVMNGYQLTDRFTSFADMGSQNGFIFYVPAAYTSVIDPVTGFVNVFQKTEFKTNDFLHRFDSISWNDKEQSFVFTFDYQNFKCNGTCYQNKWSLYADVDRIETIIKNNQVDRIEPCNPNQKLIDFFDKKGIIYRDGHNIVDDLEKYDSKTISEIIHNFKLILQLRNSMRNPDTGEIIDYIASPVMHNEERFDSRKRNPELPQDADANGAYHIALKGLMFLQKINEYADSDGNMDNRKLKITNEEWFKYMQTRKEYNV

SEQ ID NO: 340 - protein, 1187 aa, unidentified
  REGION 1..1187: note = Cas Enzyme sequence
VKVSFDKFVASQTDALKIPSPGRKPSGLYPVAAVFKFFPAPETLAAFRAATKSLAEAKDKELVSDAVADSRVADQPHFDYFTNLALVSGDGDDERDTRAVWFEFDLAAFIEAIKAPRRYFEDTMKREASADRFRQQITAMEGKGREASSTEEDSEPLPGFDSDERVRLLKIIVQDKLKWVAEAEGDASETGPKEYAIRERTVRGFSEIKRRWRNAVESSNATEKRLLEILAEEQTTHRDDFGSATLYQQLAKPEFHAIWRNEGTQPWHAEDPLTAWLQYKELQADLADKERAIRFTPAHPKYSPRFFIFPKKSEAQPKTANHHHTKPGLLSRHDPGQLSFTGGVILRTEHGLAPTIVRIHYAAPRICRDQLRSSGDTNLYEAPWLQPMMAALGLDKSPERVNFANCRITLQPTNESDIHLTFPIEVNSEKIKTGVSRETVWENQFNLYPDGENFYNASLRWPHEKQRAKPPLPWHEQLDSFRCIATDLGQRDAGAFARMSVLGGSDFDKRPSRFIGEAGGKKWRAALERSGLFRLPGEDAQVWREKSSKDEKNPEDSGKPFDFREELWGERGRPARSWEADDTAELMRLLEVPPDAKELSLLAEGWRSLLSFPEQNDKLLVAMRRYQSRIARLHRWCWFLKGDDKQQKSAWDEIADCEDTRLISGEQIAQAKKHDPRLQTELASQLQKRLELAPVLLVRIANRILPLCSRSWHWEKHPASKAQNTLHHLTQNGPKLDSKERPVWLRGQRGLSLERIEQVEELRKRFQSLNQTLRREVGGKPPIRRDESVPDPCRDLLDKLDNLKEQRVNQTAHMILAEALGLCLAPPPADKKTLRQQRDLHGTYEKITDKSGKWIGPVAFIIIEDLSRYRASQGRAPRENSRLMKWCHRAVRDKLKQLCEIFGIPVVETPAAYSSRFCSRSGIPGFRAEEIAPGFEKTAPWSWIKEKKDDRGQPTTEAAHIQELIQQMAEAQKIPTRSDKPLAKPRTLFAPLAGGPVFIPIVDSIPGAELAPKLVQADINAAINLALRAIADPRLWTIHPRLRTQREGGNKPGKAKNQKTQQTASGTPTEVKLLTREKRKFGELGKPLVIKRASSAKPDDTRQPNFFADLAGLNELAEQLAKKNPREYSWLTKEWTSAEISGGNTTPPLVHGKSFWGTVKAKQWDRIRAINSARLAAWRSKGDDVSM

SEQ ID NO: 341 - protein, 1188 aa, unidentified
  REGION 1..1188: note = Cas Enzyme sequence
MNIYENFTNMYQVNKTIRMGLKPICKTDENIAKFLEEDKERSEKYKIAKKIIDKENRAFIEDRLKDFSISGLDEYLELLKQKKDITKIQKKMRDEISKQLKGFPQFDSKYKFQYITDKEDTEILEYFKKFTTFFTGFNSNRENVYSKEDISTSIGHRIIHENLPKFISNFRILNKAIEALGTGKINEDFKNNEINVTVEELNKIDYFNKVLTQSGIDLYNNLIGILNQNINLYNQQQKVKKNKIGKLETLHKQILSEKDKVSFIEEFAEDNQLLKCIDEYFKEKSCLINVDLKNLLENIDTYSLNGIFIKNDKSLKNISIYLYKDWGYISNLINEEYDYKHKNKVKDDKYYEKRKKAIDKIKYFSIGYIDELLKDKNVPMVECYFKEKINLVVKEFNASLNKFNEYKFTNELKTDEIAVEIIKNLCDSIKKIQGIIKPLIITGNDKDDDFYVEINYIWDELNKFDKIYNMVRNYLTKKDYIEEKIRMMFSKSSFMDGWGKDYGTKEAHIVYHDKNYYLVIVDEKLKLEDIDKLYKPGGDTVHYIYNYQSIDYRNIPRKFIYSKGNRFAPSVERYNLPIEDVIEVYNNKYYRTEYEEKNPKIYKKSLTSLIDYFKIGVNRDMDFEKFDIKLKDSNEYKNINEFYYNLETCCYKLQEEKVNFSVLEEFSYSGKIYLFKIYNKDFSKYSKGTPNLHTLYFKMLFDKENLENPIYKLSGNAEMFFRKGNLDLDKTTIHHANQPINNKNPNNRKRQSVFKYDIIKNRRYTVDKFALHMSITTNFQVYKNKNVNETVNRALKYCDDIYAIGIDRGERNLLYACVVNSRGEIVKQVPLNFVGNTDYHQLLAKREEERMNSRKNWKIIDNIKNLKEGYLSQAIHIITDFMVEYNAVLVLEDLNFRFKEKRMKFEKSVYQKFEKMLIDKLNFLVDKKLDKNANGGLFNAYQLTEKFTSFKDMKNQNGIVFYIPAWMTSKIDPVTGFTNLFYIKYESIEKAKEFFGKFKSIKFNKVDNYFEFEFDYNDFTDRAQGTRSKWTVCSFGPRIEGFRNPEKNNNWDGREIDITEEIKKLLDDYKVSLDEDIKAQIMDINTKDFFEKLIKYFKLVLQMRNSKTGTDIDYIISPVRNKQNEFFDSRKKNEKLPMDADANGAYNIARKGLMFIDIIKETEDKDLKMPKLFIKNKDWLNYVQKSDL

SEQ ID NO: 342 - protein, 1188 aa, unidentified
  REGION 1..1188: note = Cas Enzyme sequence
MNIYENFTNMYQVNKTIRMGLKPICKTDENIAKFLEEDKERSEKYKIAKKIIDKENRAFIEDRLKDFSISGLDEYLELLKQKKDITKIQKKMRDEISKQLKGFPQFDSKYKFQYITDKEDTEILEYFKKFTTFFTGFNSNRENVYSKEDISTSIGHRIIHENLPKFISNFRILNKAIEALGTGKINEDFKNNEINVTVEELNKIDYFNKVLTQSGIDLYNNLIGILNQNINLYNQQQKVKKNKIGKLETLHKQILSEKDKVSFIEEFAEDNQLLKCIDEYFKEKSCLINVDLKNLLENIDTYSLNGIFIKNDKSLKNISIYLYKDWGYISNLINEEYDYKHKNKVKDDKYYEKRKKAIDKIKYFSIGYIDELLKDKNVPMVECYFKEKINLVVKEFNASLNKFNEYKFTNELKTDEIAVEIIKNLCDSIKKIQGIIKPLIITGNDKDDDFYVEINYIWDELNKFDKIYNMVRNYLTKKDYIEEKIRMMFSKSSFMDGWGKDYGTKEAHIVYHDKNYYLVIVDEKLKLEDIDKLYKPGGDTVHYIYNYQSIDYRNIPRKFIYSKGNRFAPSVERYNLPIEDVIEVYNNKYYRTEYEEKNPKIYKKSLTSLIDYFKIGVNRDMDFEKFDIKLKDSNEYKNINEFYYNLETCCYKLQEEKVNFSVLEEFSYSGKIYLFKIYNKDFSKYSKGTPNLHTLYFKMLFDKENLENPIYKLSGNAEMFFRKGNLDLDKTTIHHANQPINNKNPNNRKKQSVFKYDIIKNRRYTVDKFSLHMSITTNFQVYENKNVNETVNRALKYCDDIYAIGIDRGERNLLYACVVNSRGEIVKQVPLNFVCNTDYHQLLAKREEERMNSRKNWKIIDNIKNLKEGYLSQAIHIITDFMVEYNAVLVLEDLNFRFKEKRMKFEKSVYQKFEKMLIDKLNFLVDKKLDKNANGGLFNAYQLTEKFTSFKDMKNQNGIVFYIPAWMTSKIDPVTGFTNLFYIKYESIEKSKEFFGKFKSIKFNKVDNYFEFEFDYNDFTDRAQGTRSKWTVCSFGPRIEGFRNPEKNNKWDGREIDITEKIKKLLDDYNISLDEDIQAQIMDINTKDFFEKLIKYFKLVLQMRNSKTGTDIDYIISPVRNKQNEFFDSRKKNEKLPMDADANGAYNIARKGLMFIDIIKETEDKDLKMPKLFIKNKDWLNYVQKSDL

SEQ ID NO: 343 - protein, 1189 aa, unidentified
  REGION 1..1189: note = Cas Enzyme sequence
LRNHIANCFKDEKELTIVGKDFIKKILPQWLEDSGSLEYKKLIDEFKDRVTYFTGFDNTRKNIYTNQAIATSVAYRVVHDNLPIFIDNLQRFKKLQDYREQIDLVQIERDLKVNINEMMQLDYFNQCLTQTGIDLYHQLLGGIEAKEGVEKVQGLNERVNLAQQQLNKNSIDANSKQTKIKLPQLVTLQKQILSEKRSGAFANPIDNDRELCSLLDKVVYKNDRLLVSIDKTNTDTGEIKQQQVDVNQLMTNTIDALNHADLEQVYIHSDMLNMLSQRKLGVWSFLKEEVWQPYIDSQYSKKTEREKVQKMPLISIADLHNSINYFLKQNEGHDAFNNENQQHTALAKLYHWYNDSGEKPLVTYLSNQWQLLNIGQGKEVKSLSQLHQALTPILQKYGTSLEEKLKSNKEAVRQIKEYLDALTDLQHLVKTYQFKVTKKDAKNVAIKALLQDSHFYNHYQQLLDAVSMIVPIYNRVRNYLTKKPYSIEKYKLNFENGTLADGWDVNKESANFTVILRKKNDRNKYDYFLAIMPTGKGLNRAFEAGNLATTKNKDGYEKLFYKYLPGPNKSLPKSFLSQKGRTNYKPSEELLENYKNKTHTKGDAFNLQHCRDLIDYFKKCIQKHPDWGVFNFTFSNTDSYEDISHFYREIEQQGYKVWFENIAQQYIDNLVSAGKLYLFQLYNKDFSPYSTGKPNLHTLYWLSLFSSQNIADPIYKLNGEAELFYRPKSIEKRNVTIHRKNQPIKHKIGVPQNSQFGHDIIKDKRFTENYYQFHVPITINRASVTDKNLNDAINQYSCDSPNLTILGIDRGERHLAYFTLIDQNKKILEQGSFNKPNGGQDYQKLLDKKEKGRGEARKSWSTIENIKELKAGYLSQVIHKICQMVIEHNAIVILEDLNFGFKRGRFKIEKQVYQKLEKMLIDKLNHLVFKDKAVDEAGGLRNGYQLTAPFTTFEKLGKQTGILYYVPAYHTSKVCPKTGFVDLLYPKYENLTKAKDFFSKFDFIRWNQQNNYFEIGLDYNKFKAKKDITGLRTKWTICTYGDRIHQTKGKVSQQWESRDINLNKQWQTKLEESNIAYTHGNCIVSDIVAKDSIEFWRSLFWVLKMTLQMRNSKPNSTDAKDDYLLSPIAYQPNQFFDSRKASDNEPKDSDANGAYHIALKGLMMLEQRKQQVKKLDFSNKAWYQYIQNQ

SEQ ID NO: 344 - protein, 1190 aa, unidentified
  REGION 1..1190: note = Cas Enzyme sequence
MPTRTINLKMVLGKKAETGKLRRALWTTHKQINQAVAEIERILLLCRGASYWTLDKENNEVQIPESQVVTDALQMARDAQRRNGKEGIGGDEEILKALRLLYEQMVPSCLLNDKGEPLKGDAKSIGSGYSGPLFDPDTCAIKDGKDKDWSGPFAEVSSKRMGDLPNWIIPIEKEAHDTGNVDHFTSKNDEGQACFYRVAPDTANEWFESPAVQNKINENKYFNKDKWKKEKDKGNDVWAELYAKKQMELSRDPRIKIREKLWEELGLLPIGDLFFDKETPGNVWNRLALRLAVAHFLSWESWNHRTKKEHERAKSDLEKLRDDCCGLESNCNTLREYEAERHAELKRVASVDDERPFKILVRSIRAWDRVREAWLKNGKTEKEREQIYKRLQTKLRGKFGDPALFLWLAQDGREHLWKDADSLTPLVKLNAAEWILKKRKKYSLMTFADAHLHPRWTWYEAPGGSNLRKYSIDPTEAGLLVGLTLLVQEPNGVLNEKAFTIPLAPSGQFSGLKVEDAGKGKKRCRYRSSHQSFEGIAGGAELLFHRPYLEHKEREDKDLSQRPGPVWFKLTLDVQTQAPEDWLDGTGRVATPPEVHHFNTALSNKSKHANKLQPGMRVLSVDLGLRTFASCSVFELVQGRPEKGLCFPAADDRDNDDPGKLWAKHERSFKLTLPGETPTKQEKEARKAAWNQIGSRRRDIGRLKNILRLSVITEEQKREDQIKAFFDSFDDASTDSELSKDTFQGLDDQKFKTTPELWQQHCRIFYDKAEKKVSAEFSKWRRSTRPKSASWKDWSERRNYAGGKSIWMVDYLENVRKLILSWNLRGRTYGEVNRQDKKQFGTIASRLLHHINRLKEDRTKSGADLIVQAARGFVPGKEGKGWLEKHEPCRVILFEDLARYRFRVDRPRRENSQLMKWSHREIVAETEMQAQIYGMVVQTTMAGFSSRYLASNGAPGVRCRCLGPDDFEDGLPKRYVVNELEWMLGSSKNKEFIEIQAALKDKFEPGMLVPWSGGELFATLKTDGKTAHIIHADLNAAQNLQRRFWGRCGDAYRIRCRKITTKDEKDVYELDGEPGVRLLGALQQLENGRYLFHLVPDAQAQPKSKRYVMEPLGAKKKKLKAEKDDTTAKGDDLGEALAELDVDADDARVTFFRDPSGVLFDRRYWIPSKEHWSIVKRRVWKAMKPKGRGK

SEQ ID NO: 345 - protein, 1190 aa, unidentified
  REGION 1..1190: note = Cas Enzyme sequence
MKQSTQYDDFTNVYSLSKTLRFELKPDPLTAEYIEKEQMLEKDKSISQSYQEIKEYFDRLHRDFINEALAKVNLDCSHYWELFQAKDKKALQIEADKLRKNFGTAFNLVGRQWSKLAGIKEENEENEGNKDQGKYRDILFKKEVLDIIKARYGQGDARLAALLETFKNFFTYFINFNESRKNFYKLDGTSTAIATRSIDVNLKIFCSNIANVQYLPDGIQLTDEERSLFEIRNYQTFLQQEKIKQYNDLIGTINGKINNYRQANHQKIGFLKILQKQILGDANNPSAKFIEITDDASVFPVLNELINNAEEPFRKFYKELLPKILPDTTDNSIDLSKVYLSKVALNTISNKVCQSWRTFKDILEKKNDFSLDNVLTSLKNNQQQAKEIFRDDVLKNFLADSNDKIFKKWLYNEYQKSYERYCAAKDVLLCKMEQDKSFRKEDQEQKNIIKEFCDAALEVYRMIKYFYIDRSQNSVEVDPIFYNILDPILDDCSVYQYYNEIRNYLTKKPFSQDKIKLNFGNGQLLQGWDENKLKDYKGAILRHGDDYYLGILMGNQVFPANNKEAYLDNTNGHGWELMIYKQIADAQKDVPRLFFAKANLALFQPSDNIKRIKDSKSYLRSSDNFSSQDLYDLIDYYKSCIKKYPNWQCYDFHFLPTEEYKNMKDFTDDIQSCAYKVKFVPVRDQYIKEQQSQRELLLFKITNRDFLPQAHGRDNLHTKYFRALFDQENLQHPVIKLNGGAEIFFRQASITPKLVERGQKCIIENRRYTEDKYLFHFPITLNVNHKITPRAFRAKINNLLYTNPNINIIGIDRGENHLLYISVVNQKGEILDGPRPLDTVNGIDYLGLLEKVSKDRDRARKNWESIAKIKDLKAGYVGQVVKVIADLALQYNAIVVLEDLNTGFKRSRQKIEKQIYQNFELALINKLNYFVKKEAMPGEKGHFLSAFQLTEPITSYQDVGKQTGIIFYVPADYTSITCPQCGFHKSFNFYHKNKTEDEHLLETMDLRYDNDDECFKLTCNLMALSNNKLKLSSKNIQRWRWGTNKRELVSYDITKCLAELFSKLQINYTQERGNLLNLFISQQPTSQDYDALIFYLQLWQKIRNSSPTSPDYIQCPNCGFHSDNGFRGKEWNGDANGSYNIARKGIIILGKIKQFGDNHHDRDQEHIFDDLKWSDLSINTEEWNEYVGRQ

SEQ ID NO: 346 - protein, 1191 aa, unidentified
  REGION 1..1191: note = Cas Enzyme sequence
MRAIDTFISNTEDFEGYSVSKTLTTKLIPVGKTRENIDKFNILETDSLREEAFLRVKKYINNYHRVFIDENLNKCKLEKNDLEQLKTLIQKKENCSMKERKNLTKSIQSLELNLRKSIVKFFELDERFDKLFTEKLFLELLPTICNKDELEDVELFKGFTTYFSIFNKTRKNLYSFEEKNNTIAYRAINENFPIYLKNQMILDDIKENHKELFNNSIFEEFESFNLNYEVSSDFISKYNSFLSGKYDAEGCCIEKGLNQLINEYKQNKGIKIKGLKQLYKNILSEKNALFTIDCFESTAEIKAAIQDFHNNIFLSLENFKKYIKENSLDYANIYVQKKNLNTFSSITAGSVFNLQSTINDKKDFYSLKELEIFVNESNKINEKQIVFDVTKYKDQVLSFDLNKYYSKISFEHITDIQYDKTQALDIKNYLQATLDYFNLLRIVDVSGFDDIELDEEFYLNLEKILFELNPIVKIYNKTRNFVTKSLKQEKKIKLNFDCSVLMDGWTQSVEKTKNGMLFYDSDKDKYYLGIYNQNTKKESYQIVENSSLKKMYLNMIPEPYKMLPHVCFSKKGIETFHPSLEILDGYKKGLHKKSNEVFDIDFCHKLIDYYKSCIKAREEWNCFDFNFKQTQLYNDTSEFFDDVAKGAYKVTLQNIDSEHLFKTVEEGSLFLFEIYNRYLAKKAHGSDIYTNIIRSLFDEKVNNVQLCAGAKVFYRPKLIKEEITHSKGSWIVNKVSKEGFTINSTIYKNIYNHLNYGEKLTSESETLFKSGSIIYKKADRDISKDKRYMSESFSFSFPVKINYKGKDVNTYLFNKRVNEIIKNDDNLNIISINRGEKNLIYIVIINRSGEVLLNKSLNLIQSGNNVINYKNKLEVKEKERANARTNWQEIKNIKSLKEGYLSSVVSEIVNLMLEYNAILVMESLSNEFKSKRQFIESNIYQQFEVAIINKLSCIIDKHKKNEDYGSLLHPYQLVPKFESYEKIFMQFGFIFLLNPAYISKIDPFAGLLNVFNFSELTNNKKRVDFLKKFDFIGIKADKLVFEYDLINFSKDFTGKQIVVGTGNRNIWDNDSKQIISIDINEETERLHNYFNSAINFVDLINEETNKDVLKTLIKVFSSLIGFKSFVYDEWIYISPSAKEVENKKYNIDFIAAYNLANKFRYMLSSLRESGELINIKTVDYFNKLQTLSLTE

SEQ ID NO: 347 - protein, 1191 aa, unidentified
  REGION 1..1191: note = Cas Enzyme sequence
MRAIDTFISNTEDFEGYSVSKTLTTKLIPVGKTRENIDKFNILETDSLREEAFLRVKKYINNYHRVFIDENLNKCKLEKNDLEQLKTLIQKKENCSMKERKNLTKSIQSLELNLRKSIVKFFELDERFDKLFTEKLFLELLPTICNKDELEDVELFKGFTTYFSIFNKTRKNLYSFEEKNNTIAYRAINENFPIYLKNQMILDDIKENHKELFNNSIFEEFESFNLNYEVSSDFISKYNSFLSGKYDAEGCCIEKGLNQLINEYKQNKGIKIKGLKQLYKNILSEKNALFTIDCFESTAEIKAAIQDFHNNIFLSLENFKKYIKENSLDYANIYVQKKNLNTFSSITAGSVFNLQSTINDKKDFYSLKELEIFVNESNKINEKQIVFDVTKYKDQVLSFDLNKYYSKTSFEHITDIQYDKTQALDIKNYLQATLDYFNLLRIVDVSGFDDIELDEEFYLNLEKILFELNPIVKIYNKTRNFVTKSLKQEKKIKLNFDCSVLMDGWTQSVEKTKNGMLFYDSDKDKYYLGIYNQNTKKESYQIVENSSLKKMYLNMIPEPYKMLPHVCFSKKGIETFHPSLEILDGYKKGLHKKSNEVFDIDFCHKLIDYYKSCIKAREEWNCFDFNFKQTQLYNDTSEFFDDVAKGAYKVTLQNIDSEHLFKTVEEGSLFLFEIYNRYLAKKAHGSDIYTNIIRSLFDEKVNNVQLCAGAKVFYRPKLIKEEITHSKGSWIVNKVSKEGFTINSTIYKNIYNHLNYGEKLTSESETLFKSGSIIYKKADRDISKDKRYMSESFSFSFPVKINYKGKDVNTYLFNKRVNEIIKNDDNLNIISINRGEKNLIYIVIINRSGEVLLNKSLNLIQSGNNVINYKNKLEVKEKERANARTNWQEIKNIKSLKEGYLSSVVSEIVNLMLEYNAILVMESLSNEFKSKRQFIESNIYQQFEVAIINKLSCIIDKHKKNEDYGSLLHPYQLVPKFESYEKIFMQFGFIFLLNPAYISKIDPFAGLLNVFNFSELTNNKKRVDFLKKFDFIGIKADKLVFEYDLINFSKDFTGKQIVVGTGNRNIWDNDSKQIISIDINEETERLHNYFNSAINFVDLINEETNKDVLKTLIKVFSSLIGFKSFVYDEWIYISPSAKEVENKKYNIDFIAAYNLANKFRYMLSSLRESGELINIKTVDYFNKLQTLSLTE

SEQ ID NO: 348 - protein, 1191 aa, unidentified
  REGION 1..1191: note = Cas Enzyme sequence
MLSNMHETTVNINKTSMNQFTNLFQVHKTVKFDLRPIGKTAELINSDGFLVSDDKEKAMAYLVVKCLIDEYYQKEVIAPILDNIKDNKEWNGLLEKYDKAKDGLERNAISKKLAGVIDKSKPTKPTAKALYTPLKDYVLTLKNAELQLILKDLQYDEVVIGGKTLRAAWNKELKEFVELAIDKFKNFTPYFETLATNIEQVFSGKKNGVAHRIVYQNLYTFIRNKKALDDLKIMVDEFSGEKEMLVGDFSYCLHQSGIDKYNKYIGQLVQRLKEYSDAHPKFSMWHKRFKKLNKQILSPQITPSWLPAAFTNDEMMVVAIRAFVNNTSPYLPALEEIIRQIATYDDHIFIYRKSLRSIAAQMTGDYTALDGSFEIPKSSSQKESLSLRWMSNEMKNKYFLYLNNSLSSALQSLKKSSSDAQDFLNLKKAGNNDYRRNNQASVCILRLMESYKQLYRLLRPLTGTGDENDRNEDFYGDFMPIVEALQPINNLFDSVRNWLTKASFSNDSYPVYLGKATLLDNWTNKVVFLKKDGKYFFLMLNGIQKDELQGGSTFDTIVYLPYSQAANRIDANLTRQFVFSKKPNASKGRNEPTMAKFVREHKAELAKEWERIKDGKYKVSDNKEEVEHAIRYFQKCLNMHPDYKNFDFGFLPAEEYDNYTSFVESLKGKLFRIEEKTASWESIIQLVEEGKVYLFQLYNKDYADNRASNSTSNLHTLYWESIFCQKNLLSYDFKLEEPKLYFREKADVVQKTGNIQSVPLRYQKPKIHLHIPILMNANAHKLKDLNLLVLEQIQNGYFSHIIGIDRGERNLLYYSVLDMNGNIVEQNSLNIINGINYHEKLMEKEVELDDERKKWKVRTGIRKLKEGYLGHAIHQLTNLIVEKNAILVLEDLSDSFKRGRQKKDMQIYQLFEKMLIEKLSFMVSKNVCNLNQEGCTFKALQLADPKIEMPKTGVKQNGIVFFVPPEYTSAIDPVTGFCNLFDRDRVKDIRNLLACFKSISYNSDKEWFEFEWDYQEVLQYTRLEQCANSFPWVTCSYGNRIEWSGSKSCHNLKCENVSLTSGFKALLGKYRVDYHSGANLKEMLRTINKKDDIKELKRLFFLMLSLRNKPDKDTDYILSPVQDVNGVFFDSRKMNKETKPQLPKNGDANGAYNIARKGLLSINKLNNGNNETLSIEEWVLSAKSNKVKLQT

SEQ ID NO: 349 - protein, 1192 aa, unidentified
  REGION 1..1192: note = Cas Enzyme sequence
LIKKTLPEWLEEKNPEIEGVEDPQAIIKTFEKWTIYFRGFNENRQNFYTDQAKSTSISYRLIHENLPRFIDNIKRYKDAKALNVDFSEVEKSFAAKLDEVFSLEYYNHCLTQKGIDVYNQITGGRSEKGNVKKQGVNEKINLHAQKLKSKISNASDEGKKELEEKSKKVRSCKLEKLHKQILSDSSERSFRLDEIDSDSSLCEAIVSTFEIDDDENLIGKTKDGDFNITKNVEESLRSLKNSNPEKVYVNNRSITVISQNLFKSWNTINNCLEYYAENKRYPVPEGKKETKTLLDQREKWLKQSYFSFADIHKALETYFEQYAEDEFKNEQKHEEINDRLNIKEQKEIAKSKPLFGYFEGLIIRKKDEKNKIFEAKHLLEEIQRTFKEVPTILEEYRNVDEEKLKNEKGKVQKVKLYLDALMDLQNFLKPLFIQLNKKEEEKAIELYEKDTGFYEGFDSLFEVVKQIVPLYNRTRNYLTKKPYSVEKYKLNFENSTLADGWDKNKEKDNTCVLLMKDGQYFLGIMDMDKKHKKIFEGDLPDEGQCYKKIIYKQISDASKDIQNLICINGKFQRKTKKLDELKEKHIPDIAKIRSCQSYKTTNKNFNKEDLITFINYYKKAATKYWDWCDFSFRESDKYDSFKDFTDHVNSQGYKIDFQNISETYIDDCVKKGKLYLFQIYSKDFSPKSRGKPNLQTLYWKALFDEKNRRDIIYKLNGKAELFHRKKSIEYSQLIWDKGHHAGKIRQKYPIIKDRRYAQDTYLFHVSIQCNFKAGAKKPDDFNREVRDSLKDNSEVNIIGIDRGERHLAYYTIINQKGEILKNANGEYLQSSLNKPLGEKDYQALLHKREKERDDARKSWGTIERIKDLKEGYLSQVVHKIAKLMVEHKAVVVFEDLNFGFKRERFKVEKQVYQKLEKMLIDKLNYLVFKDKEPDETGGLLNALQLTAPVGSFRELGKQTGFVFYVPAYHTSKVCPATGFVNLLYPKYETVKKAREFFKKFNKICFNKNCFEFHFDYEKFTNKAEGSRQDWVLCSYGVRLENFKNKQNNQWDTREINLNDEIEKLFKDNSIDCNNGQCLIEKIVQQDKSEFFKSLLRLLRLTLQMRNSKIGTDEDWLISPVKGSKGNFFDSRKADVSMPQNADANGAYHIALKGLLMLEQLREREDVETFKPNLSNEKWYEFLAKRYENKSGN

SEQ ID NO: 350 - protein, 1192 aa, unidentified
  REGION 1..1192: note = Cas Enzyme sequence
HKVCISVSLKDVHLDWMPLKQALEGYQQSKSNESKAVLEKEQTSMRKKISATIKDFRHFKELTAPTPQKLIDDVFPGIYESEALKSFNKFALYFRGFQDNRNNIYSAEAISTGVPYRLVHDNFPKFLADIEVYENIKAVCPEVIEQVATEMQPFLEGVMIDDIFTLDFYNSLLTQNGIDFFNQVLGGVAEEGKQKYRGMNEFVNLYRQQHPELAGRKKALTMVPLFKQILSDRETLSYIPQHIESDQQLVEMLNNFYVRITNYEYNGKTINILKELSDLTGRMKQYNPNGLFLSAKNLTDVSQKLYGKWSAINDLLYEQAVVQYGDPAVAKNKKKIDTYLAKDAFALSEICLDNEHGLSKYYSEMPNAVEQVGSNWLQFKEWCKGEDKQLFLNNADGTEIVKNLLDAMMDILHRCAVFVVPIEYDLDKDFYNDFLPLYAELENVIFVYNRTRNYLTKKPSDTKKFKLNFGTPTLGDGWGVNNERKNKAILLFKDGLSYLGIMNVKGTLKFDETKDTSLPYYKKMICRYLSKPFMDLPHTFFSEKGISTFCPSERIMDIYKNGSFKKDSPSYSIAALHDIIDFYKDAISKHEDWVKYDFSFSPTESYEDISSFYSEIAKQAYKICFTNISEHQVNDWVEKGQLYLFQLYNKDYAEGAHGRKNLHTLYWENLFSEENLNNLVLKLGGQAELFYRPQSIKKAAKHEVGSKMLNRRDKSGMPIPETIYRSLYQYFNGRIPESELTADEKSYINQVIVKETTHEIIKDRRYTKPEFFFHVPIVFNANADGNEYINERALDYLKNNPDVNIIGIDRGERHLIYLTLINQRGEILKQKTFNMVGNYDYHAKLTQREQERDEARKSWQSVGKIKELKEGFLSAVIHEIAVMMVENNAIVVLEDLNFGFKRGRFKVERQVYQKFEKMLIDKLNYLSFKDRKADAEGGILRGYQLAQQFTSFQRLGKQSGFLFYIPAAYTSKIDPITGFANHFNFNDVTNAEKRKAFLMNMERIEMKNGNVEFEFDYRKFKTFQTDYQNVWTVNTLGKRIVFDPEMRKAKDIYPTQEIVTAFKEKGIILKDGTDLKSLIADIEANAKNASFYYAIFDAFKRTLQMRNSNATTDEDYILSPVAVNGKQFCTTDEANKGKDANDNWLSKLPVDADANGAYHVALKGLYLLNNPQTKRIENEKWFQFMVEKPYLE

SEQ ID NO: 351 - protein, 1193 aa, unidentified
  REGION 1..1193: note = Cas Enzyme sequence
MFMEKMFNKFTEQYSLTKMLKFSLEPIGETRETLEKSLQRDHQRFIDFMKAKKLLDEFHREVIIMQSLNSLSLNWKPLFNNLHEYKTTYRAYQADKKSSAKRNNYKQADKSLKQQQKQMRETIASLFHSHSAYPNLFKKELITKEMPIYLKDRADDLKIIQAFQKLNGYFEDYHKNRKNMYKNDKNTAISYRVVNINFIKYCHNIDNLQKIQTECPGILVDVNSEIHTPNYYNYVITSEGINKYNLIIGEINKALNLYDQKQKTNLSRKMRLARLHNQIMFSGEKKYIDSFNTIQEVNQAVKEFYPAFIKEYLSGIKDMFCDMEAKYDCSQIYIKDTSGLSILMYGNWTQIDSFRRTRLQDSKKSEDKINAELKKPATWEEILSLPASQHNIEEIVFSLHDSIINNYHALNFENEDIFTVDLDLIKVFMDSMQDLTRFIKNFNPPKQGDIEFYAQHEYYTTILQEATRLYNKVRNFITQKPDQKNKFQLAFNHTEFLKGWDSSDTQTKKRGTLILTKDNKYYLGVIDKEHINEFLKKLNKIAPSEQGYQRVEYKQVQNPAKDLPRIFFTKKLKLEYVDINTAREANKHKPGDAFDKEFLNILINYYKEKISNYPNWDVYQFQFSNKEYDTIDEFYSEVTEQGYTISFGKCVSEEFINECVSNGLLYLFKIHNKDYADKPTGNKNLHTLYWEAIYKEGSKIKLNGNAEMFYRKPQITDPVIHKKGSIIVNRRDREGKPIPEDTYRKIVAYLNGGPEPEGVDLSKIIYREAPHDIIKDKRYTEEKFLLHVPIKINYYNGNPTKDFNQQVLDVIKNNPDLHILGIDRGEKNLLYVSVINLKGEIVYQKSLNIINKFDYHEKLTQRYQERQQARVNWDTITPIKDFKTGYLSHAVHEITELMVKYNAILVMEKLNAGFKRTRSKFDYSVYQKFENMLISKLNYLTFKESGVSNGYQLTTPQKLEDNTSQNGFIFYVPAAYTSAIDPTTGFANIIKYKYNTMKEAKEFFSKFDKIRFNGSEDYFEFHIDYEKLPTSQQDYINKWVVCTYGDKRYFYSPKEKKTKTVNVTQELKNLFCQYNIDIHGDLKEAICNQTEAKFYERLSFLFKLTMNMRYSNRDEKEDFILSPVKNKQGEFFISCSENNNLPKKLPTDGDANGAYHIALKGLQLISGITKSYGLPNITTTDWFKYAQQRHQEK

SEQ ID NO: 352 - protein, 1193 aa, unidentified
  REGION 1..1193: note = Cas Enzyme sequence
MVKNNIVETDKLIDNLYNTQMKPMLDHLHKEFIHESLSRKIFDENFLQEYFNLIVNYKKLSLKKDRQDNDSKDFKNLEEIIEVKALVLRKCISASFETIGGLWKDKYSKLGIKLKGKTYDILTEPATRKILLKEFPDKEKVLDEFKGFWTYFGGFNMNRENYYSVEAKATSIANRTINENLSRYIDNIISFKQVLDKIPALKEYEQLIAINSYNLYLNQDGIDSYNQIIGGYVDENQKKIQGINEKINLFYQENKIKLPKLKMLYKQIGSDKKGLEIFTVNEGEEWSILKDFFNLQRKEIVHNGNKVRLYESLRKMYRDFFSENKSLPDTIVFDLDKIYLNKISLNTISNNWFISWRTLADLLKIKLDKKTGEQKIPAQISLAQIRDALVLINKDNLESLFKSTNRFGNDRKSEFGENAWISFLSIWSHEIEENFSRLDQLEREFEENSKKEFKKNDKHQTAFIKDVCDAVLAIGRMAKYHLPKDTNLPQDEDFYWITDLVSHEYEIVKYYNAFRNHLSKKPYSKDKIKLNFECGSLLGGWSDGQERNKLGVILNNDGKYYLGILVNRALFRTDLNNNEIYKTSHTTWQRLILTNLKFKTLAGKGFKSENGQSYGEMDPLKSVELLQDFISRKYLKKYPQLTLITQTKFPSKKLFDEKIGEVLKECFTMNFVSFSEEKLFESEKNGEIYLFEIYNKDFSKRTAKNLSSNENIHTSYWKTLFSLENCKLPVFALNADAEVFYRENQKDKLFKKLDNKGKEVIDGKRYSENKIFFHVPITINYGKPKKMNFKDLMNQTIAEKEFNIIGIDRGEKHLIYYSIINPKGEILKQGSLNKINVGASEVDFHQKLTVRAVEMMNARQNWQQIGNIKNFKEGYLSQVVHEIYQLMIEHDAVVVLEDLNSDFKLKRTAKVEKSVYKKFELALAKKLNYLVLKNRSHGELGSASKGYQLTPQVGPGDVGKFEKAKQWGAMFYVRANYTSTTDPVTGWRKHLYIMNSSNIESIKTFFEPKNPLVGIKIFYSEKFGAWGFKYKHRDTGKEWELVATKDKNRFSYDPEKRENKSIDLHKEFESLFAEVKDKSGNIFDQISIITNFKWKSLVYFWNLLNQIRNTDRKMEGNENDFLQSPVYSDKINGFYDSRKYKEYKFELPENGDANGAFNTARKGLILLNRIKDNPVKYDQFIRDIDWDKKVTGV

SEQ ID NO: 353 - protein, 1193 aa, unidentified
  REGION 1..1193: note = Cas Enzyme sequence
MPTRTINLKLVLGKKEATTELRRALWTTHWRINQAVGRIERILLLCRGASYRTIGVNGEEKEVTQSEVEHQALQMAREAQKRNKSIVGSDEEVLKALRILYEQIVPSCVLDDKGNPLKGDAQSIGSGYAGPLLDPDTCKFEEDDEKATCGPFAETASKQFSKLPDWVIEVSKNDFCNDDKESFLRFKNASGVETFYRIDIDAATSWYISDEMQDTIKNNKAFNKDGWKKKKEKNDTSWAVDFAHKQLELADDPRITIRKELWEKLGLLPLDNLYFNKNEVGNLWNRLAMRLAVAHLLSWESWNHSTKKEYEKAKKKFDDLAYEYAGLKDKLKILHEYEKARHQTLKLVAFADDDRQYKIGARAIRAWDSVRTQWQKEGNTVDTRKKILQDIQTKKRGKFGDPDLFIWLAQDGHEGLWKDDDALTPLVKLNVSQRLLEKRKAYSLMTFADARNHPRWAMFEAPGGSNLRNYELNTDNKGLCLVLPLLQDVENDGLAEKGFTIRLAPSGQLSNVEIMKNDKKVALKYRSAHQDFKGALGGAEVLFDRHYLEHTGRSDMAIEYGEVGPVWFKLTLDVQSKAPNDWLDGKGKVATPSEVYHFRTALSNKSKHEAKLQPGLRVLSVDLGLRTFASCSVFELVEGKPKNGLFFPAADGRDENAVNKLWARHERSFKLALPGEDPTKQEKIARAAAMSEIRTLRLDIRRLKDILRLGIVEDEEKRNDLIKALEESLSSETADSALTLDDLSGLDDKKYRSTQELWQQRCQQYYNEAEKKISERFSQWRTHTKPKSSSWQDWRDRRSYHGGKSIWMIEYLDSIRKLIMNWNLRGRSYGQVNRQDKKQFGTIASHLLHHINNLKEDRTKSGADMIIQAARGYIPSKDGVGWIEKFEPCRVILFEELARYRFKVDRPRRENSQLMKWNHREIVSEAKMQAEIYGMIIETTAAGFSSRYLASSGAPGVRSRYLNDEDFSGGLPKDYLVYELEWMIDHSSSMSKEEKKEVLHKKIMPGMWVPWTGGEMFASMKDNKSINFIHADINAAQNLQRRFWNRCRDAYRITCRQVDHENGDRYSLENQPGPRLLGALQQLENGDKEFYLEMEADNNHFIMVEAGKKKTRASEDEQDVGEDDFAEALAEIEENDESGGKRETFYRDPSGMIFDSRHWIPSKHYWFEVKKRVWEKMEKPLILYQEKDDGLQF

SEQ ID NO: 354 - protein, 1194 aa, unidentified
  REGION 1..1194: note = Cas Enzyme sequence
ALGGAELSFKLIDELELLLSERRKIKVAKKENKGVSYSKEEVDNNKKVDKVKGRLREEIVKAFNQRAKYWREEKYPHHKLKKDDVGILFEKEILKVLKDMNPSKVGIISNFDNFFTYFTGFNQSKENYYVVEDKDTAIGNRSIDENLMRFLENRSKFYEALKKINSLSKYEAYFQNKEYCKYLNEEGINAFNLIVGEINKEINLTTQQDKNLFVRVPKLKFLFKQIGCRDKECFILEIGEGEEWVYLNRLKDLQFGIVDKIKKGYEDFFRNIEAFDLESIYLNKASINTISSRWFLNWHRLAELLQAKKLIKAGELEKIPEKICLLDIKECLVGETNYEDIFRAGKITEQFSNGEYSQFFNEENAWEVFLRIWEMEITRNILAIEEKSKSLEVMSQESINCITKEERISFIKDFCDAFLSIERMIKYHKVKESEEKDGDFYEWVDYYLVNTGLNSYYNAFRNYLTKKPFKQDKIRLNLNSGNLADGFDLNKESDNLCVILRRSGVYYLAVISKNSNKVFDKVKNVELYEKDDQGWEKLEYKLLPGASKSIPKQSTQLNEVVKHFSSSNDDYVLEGGRYINPLRISREVFDLNNVAYDKEDIKKISLKKEDGVKKFQKSYLTLSNDLGAYRGALEKWIDFCKEYLKCYDSCAYFDYSHLKESSDYESIDMFYRDIDRASYSTKFVDINKDVLYEMCEKGQIYLFQIYNKDFAEKKKGKDNLETMILKNLFSSTLIKLNGGAGLFYREKSIDVEYDKERNKDKGFGIIKNKRYSEDKFFFHFSVTINFGTSSAKIEDFNKAINESLCQGDYHILGIDRGEKHLIYYSLIDSNGMIKKQGSFNIVGGKDYNQLLAERAEEMRQKRESWEEIGKIKDLKEGYLSQVIHEIYQLVVDNDAIIVLEDLNTQFKAKRTAKVEKSVYKKFELALAKKLSHLILKDKEPEEVGGVLHPYQLTPPVDAGMVDRFEKKKQWGVMFYVRPDYTSTTDPLTGWRKTRYISNSANHEEIVRNFDYRNKDYIKIFFDKDKDCFRFDCDGWSLFSFKEIERYYWSNKEKNASGNYGVSKKYLLDECFSDLFSDIDKTLDINGQILSAWEKKDQRWKTLVFYWNLLNQIRNTDRAKEGDENDFIQSPVWSEEIKGFFDSRCCYNKLLPNNGDANGAYNIARKGLLVLERVKENPVKPDLFIRNEDWDDFIR

SEQ ID NO: 355 - protein, 1194 aa, unidentified
  REGION 1..1194: note = Cas Enzyme sequence
MRAIDRFISNSENFKGYSVSKTITTKLIPVGKTRENIDKFNILETDSLREESFYKVKKYINNYHKYFIEDNLIRCKLEQDDLNKLISLIQQKESCSQKERKNITKQIQAQELKLRKSIVKSFESDERFEKLFCEKLFSELLPTICSEQELKDVELFKGFTTYFSLFNKTRKNLYSFEEKNNTIAYRAINENFPIYLKNQMILNDIKENYEELFNEPVFNEFEKFISTGYGISSYYISQYNSFLSGKYDAEGNCFEKGLIQLTNEYNKKNKSTKIKAFKQLYKNIMSDNNPLFTIDCFETTTEVKETIQTFHEKTSTIVSNFIKYIKEKGLCYENIYVQKKNLNTFSSITTGTVFDLQSTIKENKKELYSINELEIFVNEANKTNEKQIVFDMTKYKEQIQSFNINKYYSKINFEQITDIQYDKTQALDIKNYLQAVLDYYNLLRIVEVNDFENIDIDEEFYLNLEKVLNELNPIVKIYNKTRNFVTKSLKQERKIKLNFDCSVLMDGWTESVEKTKNGLMFYNSEADKYYLGIYNQNAKKETYKIVENSSIKKMYLNMIPEPYKMLPHVCFSKKGIETFKPSQEILDGYKNGLHKKSSENFDIDFCHKLIDYYKNCIETREEWTCFEFDFKETKDYKDTSEFFDDVSNGAYKVTLQNIDKVQFYKSVDEGNLFLFEIYNKYLGKKSHGKDINTNIIRSLFDERINNIQLCAGAKVFYRPQMIKENITHKKGSWIVNKISKEGFTVNSEVYKNIYNHLNYGDKLTTEAEVLFKSGSIVYKKADRDLYKDKRYMSENFSFSFPVKINYRGKEINSYNFNKHVNEIIKDDNNLNIVAVNRGEKNLIYVVVMNRDGKVLLNKSLNLVQVGNQLVNYKNKLEEKEKERAKARVSWQEIKNIRNLKEGYLSCVVSEIVNLIIEYNAVLVMESLSNEFKSKRQSIESNVYEQFEVALINKLSCIMDKHKLNGEPGSILHPYQLVPKFESYEKIFMQFGFMFLLNPAYISRIDPFAGLLNIFNFNELTNSKKRYDFISKFDFIGIRDGKLTFEYNLQNFSKDFSGKQTVVGTGNRNIWDNDSKQIISININEETEILHKYFNSAINYVDLINEQTDKNILKLLIKVFSSLIGFKSFICDEWIFISPSEKEVESKKYNIDFISAYNLANKLRLMLNCLRDTDELINLKTVDYFNKVQTQGLTV

SEQ ID NO: 356 - protein, 1196 aa, unidentified
  REGION 1..1196: note = Cas Enzyme sequence
MYFENLTKQYELSKTLRFNLIPQGKTLENIKNDNIIETDKFRKENAIVVKKLFDKVHNEVINSTLEKGNILGDIDYVADLYFKPSKNTEERQMLDEAFAALRECISKALKEHKLYKELSGTKIFKYAAKDTALTEEEYNILQSFNGFTSYFTNYNDVRATLYSDEAIAGSVANRAVNDNLPRFFDNISVFSLLDGQLSDIPDINDYFTVGMYEQFLSQKGIDAYNEMIGKLNMRINLINNSNKKNNINKKFPKLKELYKQLLSDKKTLFIDMIESDEEAIERLHNFEEEFMPFVSGEAFNSFYNDLYASGGTGVYVKNDVSLTSLSVMIFSKWNEINDMLIDRYDSSYTGKKKKYEDKYIEERKKQLDKYKSYDLASVQALADDKNINILNCYVDKINEDISNIKTSRKLLDNVLYVEHIREKKLAKNLKAVDAIKTYLDYIKTLERDLKLLSGTGDEDNRDIFVYNSLELILSNVTKVDSIYNLMRNYLTKKPFSEEKIKLNFNTPCLLAGWDINKESDYCGIMLLKDDNYYLGILASGCRNAFKNLKACESSEPYYEKMVLKQIPSSAKYLSSKQIYPQNPPEEIVRILEKKKKDSKSLDKTEISTLIDYLQNDFLKNYSMLIDENGENYFNFSFKKPEEYNTLNEFFIDVDCQAYSVKTKKIPEEYINKLVDEGKLYLFKIYSKDFSEYSKGNLNLHTIYFKMLFDERNLKNPVYQINGGAEVFYRPASIDSQDMIVHKAHQPVQNKNINNEKKESVFDYDIIKNKRYTKDQFLLHIPVTMNFGAGKIYNYNNIVNKCISADPDVCVIGINRGERNLLYVSVVDKSGRILEQKSLNVINNTDYYSLLLDRENERNNARKDWKNITDIKNLKEGYLSLAVNEIVKLIFKYNAVVVLEDLNRAFKNSRQKIERNIYQKFEKMLITKFNYLVVDKSREQTEALNTGGALNALQLTSQFESFNRIGKQTGCIYYVPARYIGRTDTTSGFVNLLPNLRYENVTKSQEFFNKFDVCYNSQADEFEFQFDYNDFTDKAKDTKTDWTLSSYGDRILKFKNESTGSWDEEVVDITSELKSLFDEYGIDYISGNNFINDIIKLENRDFFLRLTKLFNLMLQMKNTSLDKTTDYFISPVKNRQGSFYDTRKHNNTLPDCADANDAYNIALKGLWAIDKVRSSEDRVNLVMSDKEWLTYIQSNLI

SEQ ID NO: 357 - protein, 1196 aa, unidentified
  REGION 1..1196: note = Cas Enzyme sequence
MYFENLTKQYELSKTLRFNLIPQGKTLENIKNDNIIEADKFRKENAVVVKKLFDKVHNEVINSTLEKGNILGDIGYVADLYFKPSKNIEERQMLDEAFSALRECISKALKEHKLYKELSGTKIFKYAAKDTALTEEEYNILQSFNGFTSYFTNYNDVRATLYSDEAITGSVANRAVNDNLPRFFDNISVFSLLDGQLSDIPDINDYFTVGMYEQFLSQKGIDAYNEMIGKLNIRINLINNSNKKNNINKKFPKLKELYKQLLSDKKTLFIDMIESDEEAIERLHNFEEEFMPFVSGEAFNSFYNDLYASGGTGVYVKNDVSLTSLSVMIFSKWNEINDMLIDRYDSSYTGKKKKYEDKYIEERKKQLDKYKSYDLASVQALADDKNINILNCYVDKINEDISNIKTSRKLLDNVLYVEHIREKKLAKNLKAVDAIKTYLDYIKTLERDLKLLSGTGDEDNRDIFVYNSLELILSNVTKVDSIYNLMRNYLTKKPFSEEKIKLNFNTPCLLAGWDINKESDYCGIMLLKDDNYYLGILASGCRNAFKNLKACESSEPYYEKMVLKQIPSSAKYLSSKQIYPQNPPEEIVRILEKKKKDSKSLDKTEISTLIDYLQNDFLKNYSMLIDENGENYFNFSFKKPEEYNTLNEFFIDVDCQAYSVKTKKIPEEYINKLVDEGKLYLFKIYSKDFSEYSKGNLNLHTIYFKMLFDERNLKNPVYQINGGAEVFYRPASIDSQDMIVHKAHQPVQNKNINNEKKESVFDYDIIKNKRYTKDQFLLHIPVTMNFGAGKIYNYNNIVNKCISADPDVCVIGINRGERNLLYVSVVDKSGRILEQKSLNVINNTDYYSLLLDRENERNNARKDWKNITDIKNLKEGYLSLAVNEIVKLIFKYNAVVVLEDLNMAFKNSRQKIERNIYQKFEKMLITKFNYLVVDKSREQTEALNTGGALNALQLTSQFESFNRIGKQTGCIYYVPARYIGRTDTTSGFVNLLPNLRYENVTKSQEFFNKFDVCYNSQADEFEFQFDYNDFTDKAKGTKTDWTLSSYGDRIVKFKNESTGSWDEEVVDITSELKLLFDEYGIDYISGNNFINDIIKLENRDFFLRLTKLFNLMLQMKNTSLDKTTDYFISPVKNRQGSFYDTRKHNNTLPDCADANDAYNIALKGLWAIDKVRSSEDRVNLVMSDKEWLTYIQSNLI

SEQ ID NO: 358 - protein, 1196 aa, unidentified
  REGION 1..1196: note = Cas Enzyme sequence
MNIYENFTNMYQVNKTIRMGLEPIGKTCENIAKFLEEDKERSDKYKIAKKIIDKENRAFIEDGLKDFSISGLDEYLELLKQKKDITKIQKKMRDEISTQLKGFPQFDSKYKFQYITDKEDTEILEYFKKFTTYFTGFNSNRENVYSKEDISTSIGHRIVHENLPKFISNFRILNKAIEAFGAGKINEDFKSNGINVTVEELNKIDYFNKALTQSGIDLYNDLIGILNQNINLYNQQQKVKKNKIGKLETLHKQILSEKDKVSFIEEFTEDNQLLDCIDEYFKEKYSLITVDLKNLLENIDTYNLNGIFIKNDKSLTNISNYLYKEWGYIPNLINEEYDYKHKNKVRDDKYYETRKKAIDKIKYFSIGHIDELLKDKNVLAVENYFKEKINLVVKEFNAYLNKFNEYKFINELKTDEIAVEIIKNLCDSIKNVQGIVKPLIVMGNDKDDSFYGDINYIWDELNKFNKIYNMVRNYLTKKDYIDEKIRLTFNNPQLLGGWSYNKESDYSSFILKDNKYYYLAIMNPNSKSKLKDLEKPENDEDTIYKMKYYQASDPAKSIPNLMVINGKTKKKNGRKVNGENIELERLRNEYLPTEINEIRKSKAYLRSSSSFSDEALIKYIDYYKERVKEYFNEIDFKFKETCEYKQFNEFAEDVNLQAYQISFIGVSKKYIKSLIDDNKIYLFKIYNKDFSENSKGIPNLHTLYFKMLFDKENLENPIYKLSGNAEMFFRKGNLDLDKTTIHHANKPINNKNPNNRKKQSVFKYDIIKNRRYTVDKFALHMSITTNFQVYENKNVNETVNRALKYCDDIYAIGIDRGERNLLYACVVNSRGEIVKQVPLNFVGNTDYHQLLAKKEEERMNSRKNWKIIDNIKNLKEGYLSQAIHIITDLMVEYNAVLVLEDLNFRFKEKRMKFEKSVYQKFEKMLIDKLNFLVDKKLDKNANGGLFNAYQLTEKFTNFKDMKNQNGIVFYIPAWMTSKIDPVTGFTNLFYIKYESIEKAKEFFGKFKSIKFNKVDNYFEFEFDYNDFTDRAQGTRSKWTVCSFGPRIEGFRNPEKNNKWDGREIDITEKIKKLLDDYNVSLDKDIKAQIMDINTKDFFEKFIKYFKLVLQMRNSKTGTDIDYIISPVKNKQNEFFDSRKQNEKLPMDADANGAYNIARKGLMFIDIIKETEDKDLKMPKLFIKNKDWLNYVQKSDL

SEQ ID NO: 359 - protein, 1196 aa, unidentified
  REGION 1..1196: note = Cas Enzyme sequence
MYFENLTKQYELSKTLRFNLIPQGKTLENIKNDNIIEADKFRKENAVVVKKLFDKVHNEVINSTLEKGNILGDIGYVADLYFKPSKNIEERQMLDEAFSALRECISKALKEHKLYKELSGTKIFKYAAKDTALTEEEYNILQSFNGFTSYFTNYNDVRATLYSDEAITGSVANRAVNDNLPRFFDNISVFSLLDGQLSDIPDINDYFTVGMYEQFLSQKGIDAYNEMIGKLNIRINLINNSNKKNNINKKFPKLKELYKQLLSDKKTLFIDMIESDEEAIERLHNFEEEFMPFVSGEAFNSFYNDLYASGGTGVYVKNDVSLTSLSVMIFSKWNEINDMLIDRYDSSYTGKKKKYEDKYIEERKKQLDKYKSYDLASVQALADDKNINILNCYVDKINEDISNIKTSRKLLDNVLYVEHIREKKLAKNLKAVDAIKTYLDYIKTLERDLKLLSGTGDEDNRDIFVYNSLELILSNVTKVDSIYNLMRNYLTKKPFSEEKIKLNFNTPCLLAGWDINKESDYCGIMLLKDDNYYLGILASGCRNAFKNLKACESSEPYYEKMVLKQIPSSAKYLSSKQIYPQNPPEEIVRILEKKKKDSKSLDKTEISTLIDYLQNDFLKNYSMLIDENGENYFNFSFKKPEEYNTLNEFFIDVDCQAYSVKTKKIPEEYINKLVDEGKLYLFKIYSKDFSEYSKGNLNLHTIYFKMLFDERNLKNPVYQINGGAEVFYRPASIDSQDMIVHKAHQPVQNKNINNEKKESVFDYDIIKNKRYTKDQFLLHIPVTMNFGAGKIYNYNNIVNKCISADPDVCVIGINRGERNLLYVSVVDKSGRILEQKSLNVINNTDYYSLLLDRENERNNARKDWKNITDIKNLKEGYLSLAVNEIVKLIFKYNAVVVLEDLNRAFKNSRQKIERNIYQKFEKMLITKFNYLVVDKSREQTEALNTGGALNALQLTSQFESFNRIGKQTGCIYYVPARYIGRTDTTSGFVNLLPNLRYENVTKSQEFFNKFDVCYNSQADEFEFQFDYNDFTDKAKGTKTDWTLSSYGDRILKFKNESTGSWDEEVVDITSELKSLFDEYGIDYISGNNFINDIIKLENRDFFLRLTKLFNLMLQMKNTSLDKTTDYFISPVKNRQGSFYDTRKHNNTLPDCADANDAYNIALKGLWAIDKVRSSEDRVNLVMSDKEWLTYIQSNLI

SEQ ID NO: 360 - protein, 1196 aa, unidentified
  REGION 1..1196: note = Cas Enzyme sequence
MYFENLTKQYELSKTLRFNLIPQGKTLENIKNDNIIEADKFRKENAVVVKKLFDKVHNEVINSTLEKGNILGDIGYVADLYFKPSKNIEERQMLDEAFSALRECISKALKEHKLYKELSGTKIFKYAAKDTALTEEEYNILQSFNGFTSYFTNYNDVRATLYSDEAITGSVANRAVNDNLPRFFDNISVFSLLDGQLSDIPDINDYFTVGMYEQFLSQKGIDAYNEMIGKLNIRINLINNSNKKNNINKKFPKLKELYKQLLSDKKTLFIDMIESDEEAIERLHNFEEEFMPFVSGEAFNSFYNDLYASGGTGVYVKNDVSLTSLSVMIFSKWNEINDMLIDRYDSSYTGKKKKYEDKYIEERKKQLDKYKSYDLASVQALADDKNINILNCYVDKINEDISNIKTSRKLLDNVLYVEHIREKKLAKNLKAVDAIKTYLDYIKTLERDLKLLSGTGDEDNRDIFVYNSLELILSNVTKVDSIYNLMRNYLTKKPFSEEKIKLNFNTPCLLAGWDINKESDYCGIMLLKDDNYYLGILASGCRNAFKNLKACESSEPYYEKMVLKQIPSSAKYLSSKQIYPQNPPEEIVRILEKKKKDSKSLDKTEISTLIDYLQNDFLKNYSMLIDENGENYFNFSFKKPEEYNTLNEFFIDVDCQAYSVKTKKIPEEYINKLVDEGKLYLFKIYSKDFSEYSKGNLNLHTIYFKMLFDERNLKNPVYQINGGAEVFYRPASIDSQDMIVHKAHQPVQNKNINNEKKESVFDYDIIKNKRYTKDQFLLHIPVTMNFGAGKIYNYNNIVNKCISADPDVCVIGINRGERNLLYVSVVDKSGRILEQKSLNVINNTDYYSLLLDRENERNNARKDWKNITDIKNLKEGYLSLAVNEIVKLIFKYNAVVVLEDLNRAFKNSRQKIERNIYQKFEKMLITKFNYLVVDKSREQTEALNTGGALNALQLTSQFESFNRIGKQTGCIYYVPARYIGRTDTTSGFVNLLPNLRYENVTKSQEFFNKFDVCYNSQADEFEFQFDYNDFTDKAKGTKTDWTLSSYGDRIVKFKNESTGSWDEEVVDITSELKSLFDEYGIDYISGNNFINDIIKLENRDFFLRLTKLFNLMLQMKNTSLDKTTDYFISPVKNRQGSFYDTRKHNNTLPDCADANDAYNIALKGLWAIDKVRSSEDRVNLVMSDKEWLTYIQSNLI

SEQ ID NO: 361 - protein, 1196 aa, unidentified
  REGION 1..1196: note = Cas Enzyme sequence
MYFENLTKQYELSKTLRFNLIPQGKTLENIKNDNIIETDKFRKENAIVVKKLFDKVHNEVINSTLEKGNILGDIDYVADLYFKPSKNTEERQMLDEAFAALRECISKALKEHKLYKELSGTKIFKYAAKDTALTEEEYNILQSFNGFTSYFTNYNDVRATLYSDEAIAGSVANRAVNDNLPRFFDNISVFSLLDGQLSDIPDINDYFTVGMYEQFLSQKGIDAYNEMIGKLNMRINLINNSNKKNNINKKFPKLKELYKQLLSDKKTLFIDMIESDEEAIERLHNFEEEFMPFVSGEAFNSFYNDLYASGGTGVYVKNDVSLTSLSVMIFSKWNEINDMLIDRYDSSYTGKKKKYEDKYIEERKKQLDKYKSYDLASVQALADDKNINILNCYVDKINEDISNIKTSRKLLDNVLYVEHIREKKLAKNLKAVDAIKTYLDYIKTLERDLKLLSGTGDEDNRDIFVYNSLELILSNVTKVDSIYNLMRNYLTKKPFSEEKIKLNFNTPCLLAGWDINKESDYCGIMLLKDDNYYLGILASGCRNAFKNLKACESSEPYYEKMVLKQIPSSAKYLSSKQIYPQNPPEEIVRILEKKKKDSKSLDKTEISTLIDYLQNDFLKNYSMLIDENGENYFNFSFKKPEEYNTLNEFFIDVDCQAYSVKTKKIPEEYINKLVDEGKLYLFKIYSKDFSEYSKGNLNLHTIYFKMLFDERNLKNPVYQINGGAEVFYRPASIDSQDMIVHKAHQPVQNKNINNEKKESVFDYDIIKNKRYTKDQFLLHIPVTMNFGAGKIYNYNNIVNKCISADPDVCVIGINRGERNLLYVSVVDKSGRILEQKSLNVINNTDYYSLLLDRENERNNARKDWKNITDIKNLKEGYLSLAVNEIVKLIFKYNAVVVLEDLNRAFKNSRQKIERNIYQKFEKMLITKFNYLVVDKSREQTEALNTGGALNALQLTSQFESFNRIGKQTGCIYYVPARYIGRTDTTSGFVNLLPNLRYENVTKSQEFFNKFDVCYNSQADEFEFQFDYNDFTDKAKGTKTDWTLSSYGDRILKFKNESTGSWDEEVVDITSELKSLFDEYGIDYISGNNFINDIIKLENRDFFLRLTKLFNLMLQMKNTSLDKTTDYFISPVKNRQGSFYDTRKHNNTLPDCADANDAYNIALKGLWAIDKVRSSEDRVNLVMSDKEWLTYIQSNLI

SEQ ID NO: 362 - protein, 1196 aa, unidentified
  REGION 1..1196: note = Cas Enzyme sequence
MYFENLTKQYELSKTLRFNLIPQGKTLENIKNDNIIEADKFRKENAVVVKKLFDKVHNEVINSTLEKGNILGDIGYVADLYFKPSKNIEERQMLDEAFSALRECISKALKEHKLYKELSGTKIFKYAAKDTALTEEEYNILQSFNGFTSYFTNYNDVRATLYSDEAIAGSVANRAVNDNLPRFFDNISVFSLLDGQLSDIPAINDYFTVGMYEQFLSQKGIDAYNEMIGKLNMRINLINNSNKKNNINKKFPKLKELYKQLLSDKKTLFIDMIESDEEAIERLHNFEEEFMPFVSGEAFNSFYNDLYASGGTGVYVKNDVSLTSLSVMIFSKWNEINDMLIDRYDSSYTGKKKKYEDKYIEERKKQLDKYKSYDLASVQALADDKNINILNCYVDKINEDISNIKTSRKLLDNVLYVEHIREKKLAKNLKAVDAIKTYLDYIKTLERDLKLLSGTGDEDNRDIFVYNSLELILSNVTKVDSIYNLMRNYLTKKPFSEEKIKLNFNNPCLLAGWDINKESDYCGIMLLKDDNYYLGILASGCRSAFKNLKACESSEPYYEKMVLKQIPSSAKYLSSKQIYPQNPPEEIVRILEKKKKDSKSLDKTEISTLIDYLQNNFLKNYSMLIDENGENYFNFSFKKPEEYNTLNEFFIDVDRQAYSVKTKKIPEEYINKLVDEEKLYLFKIYSKDFSEYSKGNLNLHTIYFKMLFDERNLKNPVYQINGGAEVFYRPASIDSQDMIVHKAHQPVQNKNINNEKKESIFDYDIIKNKRYTKDQFLLHIPVTMNFGAGKIYNYNNIVNKCISADPDVCVIGINRGERNLLYVSVVDKSGRILEQKSLNVINNTDYYSLLLDRENERNNARKDWKNITDIKNLKEGYLSLAVNEIVKLIFKYNAVVVLEDLNMAFKNSRQKIERNIYQKFEKMLITKLNYLVVDKSREQTEALNTGGALNALQLTSQFESFNRIGKQTGCIYYVPARYIGRTDTTSGFVNLLPNLRYENVTKSQEFFNKFDVCYNSQADEFEFQFDYNDFTDKAKGTKTDWTLSSYGDRIVKFKNESTGSWDEEVVDITSELKSLFDEYGIDYISGNNFINDIIKLENRDFFLRLTKLFNLMLQMKNISLDKTTDYFISPVRNRQGSFYDTRKHNNTLPDCADANDAYNIALKGLWAIDKVRSSEDRVNLVMSDKEWLTYIQSNLI

SEQ ID NO: 363 - protein, 1196 aa, unidentified
  REGION 1..1196: note = Cas Enzyme sequence
MYFENLTKQYELSKTLRFNLIPQGKTLENIKNDNIIEADKFRKENAVVVKKLFDKVHNEVINSTLEKGNILGDIGYVADLYFKPSKNIEERQMLDEAFSALRECISKALKEHKLYKELSGTKIFKYAAKDTALTEEEYNILQSFNGFTSYFTNYNDVRATLYSDEAITGSVANRAVNDNLPRFFDNIRVFSLLDGQLSDIPDINDYFTVGMYEQFLSQKGIDAYNEMIGKLNIRINLINNSNKKNNINKKFPKLKELYKQLLSDKKTLFIDMIESDEEAIERLHNFEEEFMPFVSGEAFNSFYNDLYASGGTGVYVKNDVSLTSLSVMIFSKWNEINDMLIDRYDSSYTGKKKKYEDKYIEERKKQLDKYKSYDLASVQALADDKNINILNCYVDKINEDISNIKTSRKLLDNVLYVEHIREKKLAKNLKAVDAIKTYLDYIKTLERDLKLLSGTGDEDNRDIFVYNSLELILSNVTKVDSIYNLMRNYLTKKPFSEEKIKLNFNTPCLLAGWDINKESDYCGIMLLKDDNYYLGILASGCRNAFKNLKACESSEPYYEKMVLKQIPSSAKYLSSKQIYPQNPPEEIVRILEKKKKDSKSLDKTEISTLIDYLQNDFLKNYSMLIDENGENYFNFSFKKPEEYNTLNEFFIDVDCQAYSVKTKKIPEEYINKLVDEGKLYLFKIYSKDFSEYSKGNLNLHTIYFKMLFDERNLKNPVYQINGGAEVFYRPASIDSQDMIVHKAHQPVQNKNINNEKKESVFDYDIIKNKRYTKDQFLLHIPVTMNFGAGKIYNYNNIVNKCISADPDVCVIGINRGERNLLYVSVVNKSGRILEQKSLNVINNTDYYSLLLDRENERNNARKDWKNITDIKNLKEGYLSLAVNEIVKLIFKYNAVVVLEDLNMAFKNSRQKIERNIYQKFEKMLITKFNYLVVDKSREQTEALNTGGALNALQLTSQFESFNRIGKQTGCIYYVPARYIGRTDTTSGFVNLLPNLRYENVTKSQEFFNKFDVCYNSQADEFEFQFDYNDFTDKAKGTKTDWTLSSYGDRIVKFKNESTGSWDEEVVDITSELKSLFDEYGIDYISGNNFINDIIKLENRDFFLRLTKLFNLMLQMKNTSLDKTTDYFISPVKNRQGSFYDTRKHNNTLPDCADANDAYNIALKGLWAIDKVRSSEDRVNLVMSDKEWLTYIQSNLI

SEQ ID NO: 364 - protein, 1196 aa, unidentified
  REGION 1..1196: note = Cas Enzyme sequence
MYFENLTKQYELSKTLRFNLIPQGKTLENIKNDNIIEADKFRKENAVVVKKLFDKVHNEVINSTLEKGNILGDIGYVADLYFKPSKNIEERQMLDEAFSALRGCISKALKEHKLYKELSGTKIFKYAAKDTALTEEEYNILQSFNGFTSYFTNYNDVRATLYSDEAIAGSVANRAVNDNLPRFFDNISVFSLLDGQLSDIPDINDYFTVGMYEQFLSQKGIDAYNEMIGKLNMRINLINNSNKKNNINKKFPKLKELYKQLLSDKKTLFIDMIESDEEAIERLHNFEEEFMPFVSGEAFNSFYNDLYASGGTGVYVKNDVSLTSLSVMIFSKWNEINDMLIDRYDSSYTGKKKKYEDKYIEERKKQLDKYKSYDLASVQALADDKNINILNCYVDKINEDISNIKTSRKLLDNVLYVEHIREKKLAKNLKAVDAIKTYLDYIKTLERDLKLLSGTGDEDNRDIFVYNSLELILSNVTKVDSIYNLMRNYLTKKPFSEEKIKLNFNNPCLLAGWDINKESDYCGIMLLKDDNYYLGILASGCRSAFKNLKACESSEPYYEKMVLKQIPSSAKYLSSKQIYPQNPPEEIVRILEKKKKDSKSLDKTEISTLIDYLQNNFLKNYSMLIDENGENYFNFSFKKPEEYNTLNEFFIDVDRQAYSVKTKKIPEEYINKLVDEGKLYLFKIYSKDFSEYSKGNLNLHTIYFKMLFDERNLKNPVYQINGGAEVFYRPASIDSQDMIVHKAHQPVQNKNINNEKKESVFDYDIIKNKRYTKDQFLLHIPVTMNFGAGKIYNYNNIVNKCISADPDVCVIGINRGERNLLYVSVVDKSGRILEQKSLNVINNTDYYSLLLDRENERNNARKDWKNITDIKNLKEGYLSLAVNEIVKLIFKYNAVVVLEDLNRAFKNSRQKIERNIYQKFEKMLITKFNYLVVDKSREQTEALNTGGALNALQLTSQFESFNRIGKQTGCIYYVPARYIGRTDTTSGFVNLLPNLRYENVTKSQEFFNKFDVCYNSQADEFEFQFDYNDFTDKAKGTKTDWTLSSYGDRIVKFKNESTGSWDEEVVDITSELKSLFDEYGIDYISGNNFINDIIKLENRDFFLRLTKLFNLMLQMKNISLDKTTDYFISPVRNRQGSFYDTRKHNNTLPDCADANDAYNIALKGLWAIDKVRSSEDRVNLVMSDKEWLTYIQSNLI

SEQ ID NO: 365 - protein, 1196 aa, unidentified
  REGION 1..1196: note = Cas Enzyme sequence
MYFENLTKQYELSKTLRFNLIPQGKTLENIKNDNIIEADKFRKENAVVVKKLFDKVHNEVINSTLEKGNILGDIGYVADLYFKPSKNIEERQMLDEAFSALRECISKALKEHKLYKELSGTKIFKYAAKDTALTEEEYNILQSFNGFTSYFTNYNDVRATLYSDEAITGSVANRAVNDNLPRFFDNISVFSLLDGQLSDIPDINDYFTVGMYEQFLSQKGIDAYNEMIGKLNIRINLINNSNKKNNINKKFPKLKELYKQLLSDKKTLFIDMIESDEEAIERLHNFEEEFMPFVSGEAFNSFYNDLYASGGTGVYVKNDVSLTSLSVMIFSKWNEINDMLIDRYDSSYTGKKKKYEDKYIEERKKQLDKYKSYDLASVQALADDKNINILNCYVDKINEDISNIKTSRKLLDNVLYVEHIREKKLAKNLKAVDAIKTYLDYIKTLERDLKLLSGTGDEDNRDIFVYNSLELILSNVTKVDSIYNLMRNYLTKKPFSEEKIKLNFNTPCLLAGWDINKESDYCGIMLLKDDNYYLGILASGCRNAFKNLKACESSEPYYEKMVLKQIPSSAKYLSSKQIYPQNPPEEIVRILEKKKKDSKSLDKTEISTLIDYLQNDFLKNYSMLIDENGENYFNFSFKKPEEYNTLNEFFIDVDCQAYSVKTKKIPEEYINKLVDEGKLYLFKIYSKDFSEYSKGNLNLHTIYFKMLFDERNLKNPVYQINGGAEVFYRPASIDSQDMIVHKAHQPVQNKNINNEKKESVFDYDIIKNKRYTKDQFLLHIPVTMNFGAGKIYNYNNIVNKCISADPDVCVIGINRGERNLLYVSVVNKSGRILEQKSLNVINNTDYYSLLLDRENERNNARKDWKNITDIKNLKEGYLSLAVNEIVKLIFKYNAVVVLEDLNMAFKNSRQKIERNIYQKFEKMLITKFNYLVVDKSREQTEALNTGGALNALQLTSQFESFNRIGKQTGCIYYVPARYIGRTDTTSGFVNLFSNLRYENVTKSQEFFNKFDVCYNSQADEFEFQFDYNDFTDKAKGTKTDWTLSSYGDRIVKFKNESTGSWDEEVVDITSELKSLFDEYGIDYISGNNFINDIIKLENRDFFLRLTKLFNLMLQMKNTSLDKTTDYFISPVKNRQGSFYDTRKHNNTLPDCADANDAYNIALKGLWAIDKVRSSEDRVNLVMSDKEWLTYIQSNLI

SEQ ID NO: 366 - protein, 1196 aa, unidentified
  REGION 1..1196: note = Cas Enzyme sequence
MYFENLTKQYELSKTLRFNLIPQGKTLANIKNDNIIETDKFRKENAIVVKKLFDKVHNEVINSTLEKGNILGDIDYVADLYFKPSKNTEERQMLDEAFAALRECISKALKEHKLYKELSGTKIFKYAAKDTTLTEEEYNILQSFNGFTSYFTKYNDIRAALYSDEAITGSVANRAVNDNLPRFFDNISVFSLLDGQLSDIPDINDYFTVGMYEQFLSQKGIDAYNEMIGKLNMRINLINNSNKKNNINKKFPKLKELYKQLLSDKKTLFIDMIESDEEAIERLHNFEEEFMPFVSGEAFNSFYNDLYASGGTGVYVKNDVSLTSLSIMIFSKWNEINDMLIDRYDSSYTGKKKKYEDKYIEERKKQLDKYKSYDLASVQALADDKNINILNCYVDKINEDISNIKTSRKLLDNVLYVEHIREKKLAKNLKAVDAIKTYLDYIKTLERDLKLLSGTGDEDNRDIFVYNSLELILSNVTKVDSIYNLMRNYLTKKPFSEEKIKLNFNNPCLLAGWDINKESDYCGIMLLKDDNYYLGILASGCRSAFKNLKACESSEPYYEKMVLKQIPSSAKYLSSKQIYPQNPPEEIVRILEKKKKDSKSLDKTEISTLIDYLQNNFLKNYSMLIDENGENYFNFSFKKPEEYNTLNEFFIDVDRQAYSVKTKKIPEEYINKLVDEGKLYLFKIYSKDFSEYSKGNLNLHTIYFKMLFDERNLKNPVYQINGGAEVFYRPASIDSQDMIVHKAHQPVQNKNINNEKKESIFDYDIIKNKRYTKDQFLLHIPVTMNFGASKIYNYNNIVNKCVSADPDVCVIGINRGERNLLYVSVVDKSGRILEQKSLNVINNTDYYSLLLDRENERNNARKDWKNITDIKNLKEGYLSLAVNEIVKLIFKYNAVVVLEDLNMAFKNSRQKIERQIYQKFEKMLITKLNYLVVDKSREQTEALNTGGALNALQLTSQFESFNRIGKQTGCIYYVPARYIGRTDTTSGFVNLLPNLRYENVTKSQEFFNKFDVCYNSQADEFEFQFDYNDFTDKAKGTKTDWTLSSYGDRIVKFKNESTGSWDEEVVDITSELKSLFDEYGIDYISGNNFINDIIKLENRDFFLRLTKLFNLMLQMKNISLDKTTDYFISPVRNRQGSFYDTRKHNNTLPDCADANDAYNIALKGLWAIDKVRSSEDRVNLVMSDKEWLTYIQSNLI

SEQ ID NO: 367 - protein, 1196 aa, unidentified
  REGION 1..1196: note = Cas Enzyme sequence
MYFENLTKQYELSKTLRFNLIPQGKTLANIKNDNIIETDKFRKENAIVVKKLFDKVHNEVINSTLEKGNILGDIDYVADLYFKPSKNTEERQMLDEAFAALRECISKALKEHKLYKELSGTKIFKYAAKDTTLTEEEYNILQSFNGFTSYFTKYNDIRATLYSDEAITSSVANRAVNDNLPRFFDNISIFNLLDGQLSDIPDINDYFIVGMYGQFLSQKGIDAYNEMIGKLNIRINLINNNNKKNNINKKFPKLKELYKQLLSDKKTLFIDMIESDEEAIERLHNFEEEFMPFVSGEAFNSFYNDLYASGGTGVYVKNDISLTSLSVMIFGKWNEINDMLIERYDSSYTGKKKKYEDKYIEERKKQLDKYKSYDLASVQALADDKNINVLNCYVDKINEDISNIKTSRKLLDNVLYVEHIREKKLAKNLKAVDAIKTYLDYIKTLERDLKLLSGTGDEDNRDIFVYNSLELILSNVTKVDNIYNLMRNYLTKKPFSEEKIKLNFNTPCLLAGWDINKESDYCGIMLLKDDNYYLGILASGCRSTFKNLKACESSEPYYEKMVLKQIPSSAKYLSSKQIYPQNPPEEIVRILEKKKKDSKSLDKTEISTLIDYLQNDFLKNYSMIIDENGENYFNFSFKKPEEYNTLNEFFIDVDRQAYSVKTKKIPEEYINKLVDEGNLYLFKIYSKDFSEYSKGNLNLHTIYFKMLFDERNLKNPVYQINGGAEVFYRPASIDSQDMIVHKAHQPVQNKNINNQKKESIFDYDIIKNKRYTKDQFLLHIPVTMNFGAGKIYNYNNIVNKCVSADPDVCVIGINRGERNLLYVSVVDKSGRILEQKSLNVINNTDYYSLLLDRENERNNARKDWKNITDIKNLKEGYLSLAVNEIVKLIFKYNAVVVLEDLNMAFKNSRQKIERQIYQKFEKMLITKLNYLVVDKSREQTEALNTGGALNALQLTSQFESFNRIGKQTGCIYYVPARYIGRTDTTSGFVNLLPNLRYENVTKSQEFFNKFDVCYNSQADEFEFQFDYNDFTDKAKGTKTDWTLSSYGDRIVKFKNESTGSWDEEVVDITSELKSLFDEYGIDYISGNNFINDIIKLENRDFFLRLTKLFNLMLQMKNISLDKTTDYFISPVRNRQGSFYDTRKHNNTLPDCADANDAYNIALKGLWAIDKVRSSEDRVNLVMSDKEWLTYIQSNLI

SEQ ID NO: 368 - protein, 1196 aa, unidentified
  REGION 1..1196: note = Cas Enzyme sequence
MSKKDFSQFTNKYSLSKTLRFELKPVGKTLEKMKTNFAYDQDLQTFLKDQKIEDAYQALKPFIDEIHKEFITSSLESERAKKIDFTSYFEAYKAKKDDKGEKNLRKEIGELYEIGSKKIKENHSVGWKLDNKKISINKEFSLSWGENKKKKRQESEKKNDVNKNLEKKEKKFAKLLKSPDILYAAAAVAGRDGGLDESEIKKHLKAFEGFFTYFSGFNENRANYYDTNEEKATAVATRIIHENLPKFCDNCIQFHGYSKKNKNGKEIKFYRKDEYLNAYKYLKKQNKETKIKDAQSGEMIEAYEIEEKYFGISHFRFCLSQSQIEEYNKVIGHYNLLINLYNQAKFEKKDSDKTKNSFKKLPQFKKLYKQIGCEEKKSEKKDSDKTKSGFKKLSQFKKFDKLEYDKEEDVLEKDKKRQEAGEVLSVEELLKIAAKDGEKYFSDKGKNSAEEVKTVPQFIDWLKENSGDWSGFYWTNKAVNTISNKYFASWYAIFGKIKDASKKYDTVATYNEKREQQIKLRDAVELKGLFELLDQSVDTNIEQWWENFFKKSVWEEPKAKETQEEKKELEQWEKRMEKIKKAKSPSEALIQLFYLDINEHAQTFIDESENILALGEKYEKYKENEESKRKIKAWMEEARSVNAMLRYFLVREGKIKGDILNSELINIVKMLTDGESGEVNWFKWYDLLRNYLTQKPQDNAKENKLKLNFECSTLLTGWSDGQEKSKKSIILRNGGKYFLGILKKASLFDTEKENNPVYIDHFDNERSGRLILANLKFRTLAGRGFIRDYGSSYSTIGQEEPLKAVTSLQELIRRQYLTKYPLLKEIAYKTYTSKKEFDKDVQNVLKNCYVCEFRPVDWSVIQRYVDEGDMYLFEISHKKSNLQHTYWESIFLDQSPHQLSGKGEVFYRKPAIDHKKIKEGYADKPWVIEGKRFTSNEALENNQEISVIDGKSFFFHCSVNLNYQANGNAKPKYALGENNTNVNKYFLNHDDIQFLGLDRGEKHLVYYALVDCNGNMIDQGSLNIDFKDKDGKPRSIKKTKQVYNENTKKWEPKEVDCKNYNDLLDVAAANRDEARKNWQVIGNIKNLKEGYISQVVHEIVTKVTQKPTFIVLEDLNTNFKRGRQKIDKSVYQKFELALAKKLNFVVDKKANPGEIGSVTRALQLTPPVQNYGDIENKNKWELCCTRAQIIRRKLIQ

SEQ ID NO: 369 - protein, 1196 aa, unidentified
  REGION 1..1196: note = Cas Enzyme sequence
MYFENLTKQYELSKTLRFNLIPQGKTLENIKNDNIIEADKFRKENAVVVKKLFDKVHNEVINSTLEKGNILGDIGYVADLYFKPSKNIEERQMLDEAFSALRECISKALKEHKLYKELSGTKIFKYAAKDTALTEEEYNILQSFNGFTSYFTNYNDVRATLYSDEAITGSVANRAVNDNLPRFFDNISVFSLLDGQLSDIPDINDYFTVGMYEQFLSQKGIDAYNEMIGKLNIRINLINNSNKKNNINKKFPKLKELYKQLLSDKKTLFIDMIESDEEAIERLHNFEEEFMPFVSGEAFNSFYNDLYASGGTGVYVKNDVSLTSLSVMIFSKWNEINDMLIDRYDSSYTGKKKKYEDKYIEERKKQLDKYKSYDLASVQALADDKNINILNCYVDKINEDISNIKTSRKLLDNVLYVEHIREKKLAKNLKAVDAIKTYLDYIKTLERDLKLLSGTGDEDNRDIFVYNSLELILSNVTKVDSIYNLMRNYLTKKPFSEEKIKLNFNTPCLLAGWDINKESDYCGIMLLKDDNYYLGILASGCRNAFKNLKACESSEPYYEKMVLKQIPSSAKYLSSKQIYPQNPPEEIVRILEKKKKDSKSLDKTEISTLIDYLQNDFLKNYSMLIDENGENYFNFSFKKPEEYNTLNEFFIDVDCQAYSVKTKKIPEEYINKLVDEGKLYLFKIYSKDFSEYSKGNLNLHTIYFKMLFDERNLKNPVYQINGGAEVFYRPASIDSQDMIVHKAHQPVQNKNINNEKKESVFDYDIIKNKRYTKDQFLLHIPVTMNFGAGKIYNYNNIVNKCISADPDVCVIGINRGERNLLYVSVVDKSGRILEQKSLNVINNTDYYSLLLDRENERNNARKDWKNITDIKNLKEGYLSLAVNEIVKLIFKYNAVVVLEDLNMAFKNSRQKIERNIYQKFEKMLITKFNYLVVDKSREQTEALNTGGALNALQLTSQFESFNRIGKQTGCIYYVPARYIGRTDTTSGFVNLLPNLRYENVTKSQEFFNKFDVCYNSQADEFEFQFDYNDFTDKAKGTKTDWTLSSYGDRIVKFKNESTGSWDEEVVDITSELKSLFDEYGIDYISGNNFINDIIKLENRDFFLRLTKLFNLMLQMKNTSLDKTTDYFISPVKNRQGSFYDTRKHNNTLPDCADANDAYNIALKGLWAIDKVRSSEDRVNLVMSDKEWLTYIQSNLI

SEQ ID NO: 370 - protein, 1196 aa, unidentified
  REGION 1..1196: note = Cas Enzyme sequence
LLKKDKQRAENYEKVKCYIDRFHKEYIESVLSKARIEKVNEYANLYWKSNKDDSDIKAMESLENDMRKQISKQLTSTEIYKKRLFGKELICEDLPSFLTDKDERETVECFRSFTTYFKGFNTNRENMYSSDGKSTAIAYRCINDNLPRFLDNVKSFQKVFDNLSDETITKLNTDLYNIFGRNIEDIFSVDYFEFVLTQSGIEIYNSMIGGYTCSDKTKIQGLNECINLYNQQVAKNEKSKKLPLMKPLYKQILSEKDSVSFIPEKFNSDNEVLHAIDDYYTGHIGDFDLLTELLQSLNTYNANGIFVKSGVAITDISNGAFNSWNVLRSAWNEKYEALHPVTSKTKIDKYIEKQDKIYKAIKSFSLFELQSLGNENGNEITDWYISSINESNSKIKEAYLQAQKLLNSDYEKSYNKRLYKNEKATELVKNLLDAIKEFQKLIKPLNGTGKEENKDELFYGKFTSYYDSIADIDRLYDKVRNYITQKPYSKDKIKLNFDNPQLLGGWDKNKESDYRTVLLHKDGLYYLAVMDKSHSKAFVDAPEITSDDKDYYEKMEYKLLPGPNKMLPKVFFASKNIDTFQPSDRILDIRKRESFKKGATFNKAECHEFIDYFKDSIKKHDDWSQFGFKFSPTESYNDISEFYREISDQGYSVRFNKISKNYIDGLVNNGYIYLFQIYNKDFSKYSKGTPNLHTLYFKMLFDERNLSNVVYKLNGEAEMFYREASIGDKEKITHYANQPIKNKNPDNEKKESVFEYDIVKDKRFTKRQFSLHLPITINFKAHGQEFLNYDVRKAVKYKDDNYVIGIDRGERNLIYISVINSNGEIVEQMSLNEIISDNGHKVDYQKLLDTKEKERDKARKNWTSVENIKELKEGYISQVVHKICELVIKYDAVIAMEDLNFGFKRGRFPVEKQVYQKFENMLISKLNLLIDKKAEPTEDGGLLRAYQLTNKFDGVNKAKQNGIIFYVPAWDTSKIDPATGFVNLLKPKCNTSVPEAKKLFETIDDIKYNANTDMFEFYIDYSKFPRCNSDFKKSWTVCTNSSRILTFRNKEKNNKWDNKQIVLTDEFKSLFNEFGIDYKGNLKDSILSISNADFYRRLIKLLSLTLQMRNSITGSTLPEDDYLISPVANKSGEFYDSRNYKGTNAALPCDADANGAYNIARKALWAINVLKDTPDDMLNKAKLSITNAEWLEYTQK

SEQ ID NO: 371 - protein, 1197 aa, unidentified
  REGION 1..1197: note = Cas Enzyme sequence
MNIYENFTNMYQVNKTIRMGLKPICKTDENIAKFLEEDKERSEKYKIAKKIIDKENRAFIEDRLKDFSISGLDEYLELLKQKKDITKIQKKMRDEISKQLKGFPQFDSKYKFQYITDKEDTEILEYFKKFTTFFTGFNSNRENVYSKEDISTSIGHRIIHENLPKFISNFRILNKAIEALGTGKINEDFKNNEINVTVEELNKIDYFNKVLTQSGIDLYNNLIGILNQNINLYNQQQKVKKNKIGKLETLHKQILSEKDKVSFIEEFAEDNQLLKCIDEYFKEKSCLINVDLKNLLENIDTYSLNGIFIKNDKSLKNISIYLYKDWGYISNLINEEYDYKHKNKVKDDKYYEKRKKAIDKIKYFSIGYIDELLKDKNVPMVECYFKEKINLVVKEFIDYLNKFNEYKFTNELKTDEIAVEIIKNLCDSIKDVQEIVKPLIVIENDKDDSFYGEINYIWDELNKFNKIYNMVRNYLTKKDYIDEKIRLTFNNPQLLGGWSYKKEADYSSFILKDNKYYYLAIMNPNSKSKLKDLKKPENDGDTIYKMKYFQASDPAKSIPNLMVINGKTEKKNGRKDNDGENRELERLRNEYLPTEINEIRKNKAYLRSSSNFSNEALVKYIDYYKERVKEYFNEIDFKFKETCEYKQFNEFAEDVNLQAYQISFIEVSKKYIKSLIDDNKIYLFKIYNKDFSKYSKGTPNLHTLYFKMLFDKENLENPIYKLSGNAEMFFRKGNLDLDKTTIHHANQPINNKNPNNRKKQSVFKYDIIKNRRYTVDKFALHMSITTNFQVYKNKNVNETVNRALKYCDDIYAIGIDRGERNLLYACVVNSRGEIVKQVPLNFVCNTDYHQLLAKREEERMNSRKNWKIIDNIKNLKEGYLSQAIHIITDFMVEYNAVLVLEDLNFRFKEKRMKFEKSVYQKFEKMLIDKLNFLVDKKLDKNANGGLFNAYQLTEKFTSFKDMKNQNGIVFYIPAWMTSKIDPVTGFTNLFYIKYESIEKSKEFFGKFKSIKFNKVDNYFEFEFDYNDFTDRAQGTRSKWTVCSFGPRIEGFRNPEKNNKWDGREIDITEKIKKLLDDYNISLDEDIQAQIMDINTKDFFEKLIKYFKLVLQMRNSKTGTDIDYIISPVRNKQNEFFDSRKKNEKLPMDADANGAYNIARKGLMFIDIIKETEDKDLKMPKLFIKNKDWLNYVQKSDL

SEQ ID NO: 372 - protein, 1197 aa, unidentified
  REGION 1..1197: note = Cas Enzyme sequence
MFKQEITKTLSAALLPYGQTDVSSLQEVIDRDKKRHKYRKDIIKMIDERHKALLSKIKDAPLEFHRLEELLRKRNKDKKDTAARKELEAEQKALCQILIDWLSSNNRMEFAYLTASTPAKIVSEMFAKNPENKKLEVFDKFCTYLSDYSAARNTIYGTANKAGSVGCRLVTENFPIFIKNKDVYAKLSEEYPEILKTVAKNLPEQSGYIGAFASTDDYMMFSVQDGIKNYNAIVGETNKVINLYIQANPDTKTALKKLRMKNFYKQILFDDEALVAAAFPRIYSVKEFASLVHTIWEDVLDSGKVLDDMMVLLKNIRNYDTTGIFIKKNKIAFVSDKLYGEWNRIKDTIGETKDDYTALEALIFSDADFDNLFKDLNKFKSEAVLAYVEVNKFADDEMMSEDAVPHITELMYALNDFRKLVDIIAIPDDNVNSDPDFYNKYKEYSEKTAAIKSAYSTAYTFVTQRPEDISKKFRLSFDYSTFMKGWDIDKITKNEYGATMFSKDGRLFVGVTNKEKCPDFDDIHPANPGEETFRMLSYKKLGNSSRQIKHMFINDSTPDNIRKIVLGKKDDEAYEHSDMVKVIDYYKKCLVSRYSGIYDFNFSETSDYKTINDFFAEVDKFTYKVSFIDIPASQIDEWIAEKKLFMFIVHTKDYKVGAYGTKELFTIFFENLFTEDNLKNDVIRLAGGSSIVMRPKAVENPYRHKVGSILLNKRDKDGKPVPNKIYVSLSKYLNGRLKKKDLSRDALAYLDKVVWHKHQKEHIAVEDIVKDKRYTTDAFILHLPITINPGCRANEYEINEDARKNAKHTIGIDRGERNLLYVNVTDCRTNKVVEHRSLNEIEGYDYQLRLTQLEKERQDQQRNWRTQSQIKHLKKGYVGKAVHIICELMLKYENSIVVMEALPKEMMQKRGSAFGAVYSQFQQALLNKLSYLVVKDRKPLEKGGILNGYQFTIPPKTLEDKPRQYGSVLFVPPGYTSSIDPVTGFTNIFMYKKYDSSNKKAKNFTAKFDSIRINEDGIPELKFDYSNFKTFQKWPDRQWTCIIDGKRILRQKNQKTGVWEYEDVNVREAFNKLFGKYSKLEPGTDVKELIGKIRKTDADIDVKFVKLMKTVFRLRNSNPNTGEDYIISPALDVHGKTFDSRDQRNLELGLPVNGDSNGARNIALKGAMTLHNAGVTGKLVAVGNSEWMQNVQRFSSE

SEQ ID NO: 373 - protein, 1197 aa, unidentified
  REGION 1..1197: note = Cas Enzyme sequence
LAEQQEEIRKNISEEFTKSDEYKNFFGKEDSKKLFKIFLPEYLNQINASESDKEAVNEFQKFKTYFSNFLIVRADIFKADNKHNTIPYRIVNENFMIFAGNKRTFSNIIRLIPNALEEIAKDGMKKEEWSFYNIQNVDSWFEPDSFQMCMSQKGIQKYNFIIGLVNSYINLYTQQNPQATEVKRSRLKLRMLHKQILSDRVNPSWLPEQFKEGEEGEKQIYEAILALENDLIKNCFDKKYDLWIQSIDIQNPRIYIAASEMARVSSALHMGWNGLNDVRKTILLKSDKKQAKVEKILKQDVSLKDLSDTLNRYADIYKEEQIPSLYQYIEYGSELLQDCAITRKEYHDLLNGNSNTLSLNQNEKLIEGLKAYLDSYQAIVHFLNVFIVGDELDKDTDFYAELDGLVESLSEIVPLYNKVRNYITRKVYSLDKMRIMFERSDFLGGWGQSFDTKEALLFQKDNLYYIGIIEKKYTNMDVEYLHEGIKEGNRAIRFIYNFQKADNKNIPRTFIRSKGTNYAPAVRKYNLPIESIIDIYDVGKFKTNYKKINEKEYYESLEKLIDYFKDGILKNENYKKFHFNWKPSNEYENINEFYNDTNNACFLLEKEEINYDHLKEQANQGKIYLFQISSKDFNEGSKGTPNLQTMYWRELFSNQNCKDGVIKLCGGASIYMRDASIKQPVVHRKNAWLINKWYKVNGQNVVIPDNTYVKFTKIAQERMNEDELTPQERQLWNSGLIQKKKATHDIMKDRRFTKKQYMLHAPLTINYKQQDSPRYFNEKVRSFLKDNPDINIIGIDRGEKNLIYITIIDQKGNILKGMQKSFNQIEEKGKEGRTIDYYSKLESVEARHDAARKNWKQIGTIRELKEGYLSQVVHEITQLMIQYNAVIVMENLNMGFKKGRMKVEKSVYQKFEKMLIDKMNYLAFKRDMQGNAIDPYEVGGVMNGYQLTDRFTSFADMGSQNGFIFYVPAAYTSVIDPVTGFVNVFQKTEFKTNDFLHRFDSISWNDKEQSFVFTFDYQNFKCNGTCYQNKWSLYADVDRIETIIKNNQVDRIEPCNPNQKLIDFFDKKGIIYRDGHNIVDDLEKYDSKTISEIIHNFKLILQLRNSMRNPDTGEIIDYIASPVMHNEERFDSRKRNPELPQDADANGAYHIALKGLMFLQKINEYADSDGNMDNRKLKITNEEWFKYMQTRKEHTYF

SEQ ID NO: 374 - protein, 1197 aa, unidentified
  REGION 1..1197: note = Cas Enzyme sequence
MFKQEITKTLSAALLPYGQTDVSSLQEVIDRDKKRHKYRKDIIKMIDERHKALLSKIKDAPLEFHRLEELLRKRNKDKKDTAARKELEAEQKALCQILIDWLSSNNKTEFAYLTASTPAKIVSEMFAKNPENKKLEVFDKFCTYLSDYSAARNTIYGTANKAGSVGCRLVTENFPIFIKNKDVYAKLSEEYPEILKTVAKNLPEQSAYISAFASTDDYMMFSVQDGIKNYNAIVGETNKVINLYIQANPDTKTALKKLRMKTLYKQILFDDEALVAAAFPRIYSVKEFATLVHTIWEGVLDSGKVLDDMMVLLKNIRSYDTTGIFIKKNKIAFVSDKLYGEWNRIKDTIGETKDDYTALEALIFSDADFDNLFKDLNKFKSEAVLAYVEVNKFADDEMMSEDAVPHITELMYALNDFRKLVDIIAIPDDSVNSDPDFYNKYKEYSEKTAAIKSAYNTAYTFVTQRPEDISKKFRLTFDYSTFMKGWDIDNICNNNYGATMFCKDGRLFVGVTNKEKCPDFDDIHPANPGEETFRMLSYKKLGDSSRQIKHMFINDSTPDNIRKIVLSKKEKEAYEHSDMVKVIDYYKKCLLSRYSGIYDFNFSETSDYKTINDFFAEVDKFTYKVSFIDIPASQIDEWIAEKKLFMFIVHTKDYKVGAYGTKELFTIFFENLFTEDNLKNDVIRLAGGSSIVMRPKAVENPYRHKVGSILLNKRDKDGKPVPNKIYVSLSKYLNGRLKKKDLSRDALAYLDKVVWHKHQKEHIAVEDIVKDKRYTTDAFILHLPITINPGCRANEYEINEDARKNAKYTIGIDRGERNLLYVHVTDCKTKKVVEHRSLNEIDGYDYQLRLTQLEKERQDQQRNWRTQSQIKHLKKGYVGKAVHIICELMLKYENSIVVMEALPKEMMQRRGSAFGAVYSQFQQALLNKLSYLVVKDRKPLEKGGILNGYQFTIPPKTLEDKPRQYGSVLFVPPGYTSSIDPVTGFTNLFMYKKYDSSNKKAKNFTAKFDSIRINEDGIPELKFDYSNFKTFQKWPDRQWTCIIDGKRILRQKNQKTGVWEYEDVDVREAFNKLFGKYSKLEPGTDVKELIGKIRKTDADIDVKFVKLMKTVFRLRNSNPNTGEDYIISPVLDVHGKTFDSRDQRNLELGLPVNGDSNGARNIALKGAMTLHNAGVAGKLVAVGNSEWMQNVQRFSSE

SEQ ID NO: 375 - protein, 1197 aa, unidentified
  REGION 1..1197: note = Cas Enzyme sequence
MLSHFTNQYQLSKTLRFELKPVGETLKHIELKGLLAQDETRSQEYQEIKIIIDKYHKAFIEEALHDVSLSKLAEYETAFFDKNRDEKAFEKLQDALRKEIVMQFKKDAHYATLFKKELIKADLQNWQELSDAEKELVSHFDNFTTYFTGFHENRANMYTDEAKHSSIAYRIIHENLPIFLTNKKLFEIISQKAPQLAQETQDALLEHLNGAIVADMFELSYFNRLLSQSHIDLYNQMIGGVKKDELKIQGFNEKINLYRQANGLSKRDLPNLKPLHKQILSDRETLSWLPEAFENYEELVQGVQAYFNSEVLTFECCDGKVNLLEKLPELLNQIQDYDLSKIYFKNDVALTSASQAIFKDYRIIKEALWEVNKPQKSKDLAADEEKFFNKKNSYFSIEQIDGALKSAQLSVKMMEYFQSESSKLIEQIQTAYNDWKQNSSNKELLKTFLDTLLSYQRLLKPLNAPNDLEKDVAFYAYFDTYFASLSGIVKLYDKVRNFMTRKPYSLEKFKLNFENSTLLDGWDVNKEPDNTAILFRKDNLFYLGIMDKKHNKVFRNIANSQEANGYQKIDYKLLPGANKMLPKVFFSNKNRNIFKPDAYLLERYEAGEHKKGDNFDLDFCHELIDFFKTSIEKHEDWKHFGYQFSPTESYEDLSGFYREVEQQGYKISYKNIDTKYIDSLVAEGKLYLFQIYNKDFSPFSKGTPNMHTLYWRALFDEKNLADVVYKLNGQAEIFFRKKSIEYSDEKLKKGHHYDTLKDKFAYPIIKNRRFAFDKFQFHVPITLNFKAQGNENITPQTFEYIRENPDNIKVIGIDRGERHLLYLSLIDAKGKIVEQFTLNQIVNSYNGKEHSIDYHAKLDAKEKDRDKARKEWGTVENIKELKEGYLSHVVHKIATLIVEHGAVVAMEDLNFGFKRGRFKVEKQVYQKFEKALIDKLNYLVDKKKQPDELGGILNALQLTNKFQSFEKIGKQNGFLFYVPAWNTSKIDPVTGFVDLFDTRYASVEKSKAFFGKFKAIRYNEITDYFEFAFDYNDFTDKAKDTRSEWTLCTYGERIVSFKNAEKNHQWDSKTLHLTSEFKNLFGNYTGDLKAAILMHDDKEFFEKLLRLLRFTLQMRNSITGTDIDYLVSPVADEQGNFYDSRKADASLPKDADANGAYNIARKGLMLMRRIQSADDLKKVNLAISNRDWLRYAQGLEQ

SEQ ID NO: 376 - protein, 1198 aa, unidentified
  REGION 1..1198: note = Cas Enzyme sequence
MKEKFKNLYSVSKTLRFELIPEGKTQESFNTSDILITDEDRSESYKEVKKIMDRYHEWFINESLKDFKFNEGILNEYYRLSLKSRSEKENTAFNEIKKSLRSNIVKIAFKKNEIFEKLFKKDVIFLLEEFVKTGKFFDDLSDEEKRKHLDYINKFKKFSTYFTGFFENRKNVYSDEAKHSSIVYRSVDENLPLFLSNLKIFEDIKKKDSSLVDSFNINEFRLIRERSVEKFENVEIDSIDDMFTLTFFNRLLTQNGIDFFNSMLGGFADKQKEKSIEGLNQKLNQSKIEKIKFKPLKKQILCESSHLSKPIEKFESDDDMIQAIQYYYQETQGAIANLAQLWNELLNGDFDYSGIYLSNNQTLTTLSNRWLGHWDAIKECAIDYNTRGETLTVAKNKKENALFNKRQSIKLSDVQVWINNRYENKNLIDFLKMCDWQPPKKVSLQDTFNSFNQSYQEFETIIKNLNNNSLRTSDKAKEKIQSFLDLGITIYKALELFKGNGDELDRDLKFYSTLDTEMNILEDILYSVYNKSRNYLTKKPYSLEKFKLNFDTTTLLNGWAKSKEKDNLGVLLQKDDNYYLAILNTKYKKVFDQVTELKQGAVYKKMTYNLLPGPNKMFPKVFFSKGRQKEFEPSEHILRIYEKGSFKKGADFNLEDCHALIDFFKASIAKNSDWSSYKFKFSDTHTYADLSEFYKEVEQSGYNVQFTDYSAEYIDNLVNEGKLYLFQIYCKDFSPNSKGRPNLHTIYWRALFDPKNLEKPKIKLNGEAQVFYRKKSIFDSSITHPKRKAIKNKQKDADGTVKEKVFNYDLIKDKRFRMDKFQFHVNITLNHGVEQKTTKQINQLVRSELAKNKKINIIGIDRGENHLLYYSLIDQDGNILEQNSLNKIKPSGYIESKEINYHELLDNKEKERGTSRKNWGAIHNIKELKAGYLSQVIHKITQLMIEKNAIVVLENLNMGFKATRSKVEKQVYQKFEKMLIDKLSFMVGKTKSYDEDGGVYQAYQLSTKFVTFEKMGLQNGWLFYVDPSYTSTTDPTTGFAPVYKFKRSEKVEAIKEALKHITQFRLNIEEDYFEFDMNFAELKPNFPHKYNFRVDKSERHIFNVKSKRDKTLEKYIALNLKQELEELFNKYNIDYATGNDVSRSIQGIKQRAFFDQLTFILNTLFKLRYRDEQDDYILSPTPNAEGVCFDSREERKKS

SEQ ID NO: 377 - protein, 1198 aa, unidentified
  REGION 1..1198: note = Cas Enzyme sequence
ENYQKIKEIADRFYRNLNEDVLSKTRLDKLKDYAEIYYHCNTDADRKRLDECASELRKEIVKNFKNRDEYNKLFNKKMIEIVLPKHLKNEDEKEVVASFKNFTTYFTGFFTNRKNMYSDGEESTAIAYRCINENLPKHLDNVKAFEKAISKLSKNAIDDLDATYSGLCGTNLYDVFTVDCFNFLLPQSGITEYNKIIGGYTTNDGTKVKGINEYINLYNQQVSKRDKIPNLKILYKQILSESEKVSFIPPKFEDDNELLSAVSEFYANDETFDGMPLKKAIDETKLLFGNLDNSSLNGIYIQNDRSVTNLSNSMFGSWSVIEDLWNKNYDSVNSNSRIKDIQKREDKRKKAYKAEKKLSLSFLQVLISNSENDEIRKKSIVDYYKTSLMQLTDNLSDKYNEAAPLFSENYDNEKGLKNDDKSISLIKNFLDAIKEIEKFIKPLSETNITGEKNDLFYSQFTPLLDNISRIDILYDKVRNYVTQKPFSTDKIKLNFGNSQLLNGWDRNKEKDCGAVWLCKDEKYYLAIIDKSNNSILENIDFQDCDESDCYEKIIYKLLPGPNKMLPKVFFSEKCKELLSPSDEILKIRKNGTFKKGDKFSLDDCHKLIDFYKESFKKYPNWLIYNFKFKKTNEYNDIREFYNDVASQGYNISKMKIPTSFIDKLVDEGKIYLFQLYNKDFSPHSKGTPNLHTLYFKMLFDERNLEDVVYKLNGEAEMFYRPASIKYDKPTHPKNTPIKNKNTLNDKKASTFPYDLIKDKRYTKWQFSLHFPITMNFKAPDKAIINDDVRNLLKSCNNNFIIGIDRGERNLLYVSVIDSNGAIIYQHSLNIIGNKFKGKTYETNYREKLATKEKERTEQRRNWKAIESIKELKEGYISQAVHVICQLVVKYDAIIVMEKLTDGFKRGRTKFEKQVYQKFEKMLIDKLNYYVDKKLDPDEEGGLLHAYQLTNKLESFDKLGTQSGFIFYVRPDFTSKIDPVTGFVNLLYPRYENIDKAKDMISRFDDIRYNAGEDFFEFDIDYDKFPKTASDYRKKWTICTNGERIEAFRNPASNNEWSYRTIILAEKFKELFDNNSINYRDSDDLKAEILSQTKGKFFEDFFKLLRLTLQMRNSNPETGEDRILSPVKDKNGNFYDSSKYDEKSKLPCDADANGAYNIARKGLWIVEQFKKSDNVSTVEPVIHNDKWLKFVQENDMANN

SEQ ID NO: 378 - protein, 1198 aa, unidentified
  REGION 1..1198: note = Cas Enzyme sequence
MKQSTQYDDFTNVYSLSKTLRFELKPDPLTAEYIEKEQMLEKDKSISQSYQEIKEYFDRLHRDFINEALAKVNLDCSHYWELFQAKDKKALQIEADKLRKNFGTAFNLVGRQWSKLAGIKEENEENEGNKDQGKYRDILFKKEVLDIIKARYGQGDARLAALLETFKNFFTYFINFNESRKNFYKLDGTSTAIATRSIDVNLKIFCSNIANVQYLPDGIQLTDEERSLFEIRNYQTFLQQEKIKQYNDLIGTINGKINNYRQANHQKIGFLKILQKQILGDANNPSAKFIEITDDASVFPVLNELINNAEEPFRKFYKELLPKILPDTTDNSIDLSKVYLSKVALNTISSKVCQSWCTLKDILEKKNDFSLDNVLTSLKNNQQQAKEIFRDDVLKNFLADSNDKIFKKWLYNEYQKSYERYCAAKDVLLCKMEQDKSFRKEDQEQKNIIKEFCDAALEVYRMIKYFYIDRSQNSVEVDPIFYNILDPILDDCSVYQYYNEIRNYLTKKPFSQDKIKLNFGNGQLLQGWDENKLKDYKGAVLRHGDDYYLGILMGNKVFQTNNKEAYLDNTNGNGWELMIYKQIADAQKDVPRLFFAKANLALFQPSDNIKRIKDSKSYLRSSDNFSSQDLYDLIDYYKSCIEKYPNWQCYDFHFLPTEEYKNMKDFTDDIQSCAYKVKFVPVRDQYIKEQQSQKQSQKQSQVGLLLFKITNRDFLPQAHGRDNLHTKYFRALFDQENLQHPVIKLNGGAEIFFRQASITPKLVERGQKCIIENRRYTEDKYLFHFPITLNVNHKITPRAFRAKINNLLYTNPNINIIGIDRGENHLLYISVVNQKGEILDGPRPLDTVNGIDYLGLLEKVSKDRDRARKNWESIAKIKDLKAGYVGQVVKVIADLALQYNAIVVLEDLNTGFKRSRQKIEKQIYQNFELALINKLNYFVKKEAMPGEKGHFLSAFQLTEPITSYQDVGKQTGIIFYVPADYTSITCPQCGFHKSFNFYHKNKTEDEHLLETMDLRYDNDDECFKLTCNLMALSNNKLKLSSKNIQRWRWGTNKRELVSYDITKCLAELFSKLQINYTQERGNLLNLFISQQPTSQDYDALIFYLQLWQKIRNSSPTSPDYIQCPNCGFHSDNGFRGKEWNGDANGSYNIARKGIIILGKIKQFGDNHHDRDQEHIFDDLKWSDLSINTEEWNEYVGRQ

SEQ ID NO: 379 - protein, 1198 aa, unidentified
  REGION 1..1198: note = Cas Enzyme sequence
MKQSTQYDDFTNVYSLSKTLRFELKPDPLTAEYIEKEQMLEKDKSISQSYQEIKEYFDRLHRDFINEALAKVNLDCSHYWELFQAKDKKALQIEADKLRKNFGTAFNLVGRQWSKLAGIKEENEENEGNKDQGKYRDILFKKEVLDIIKARYGQGDARLAALLETFKNFFTYFINFNESRKNFYKLDGTSTAIATRSIDVNLKIFCSNIANVQYLPDGIQLTDEERSLFEIRNYQTFLQQEKIKQYNDLIGTINGKINNYRQANHQKIGFLKILQKQILGDANNPSTKFIEITDDASVFPVLNELINNAEEPFRKFYKELLPKILPDTTDNSIDLSKVYLSKVALNTISSKVCQSWCTLKDILEKKNDFSLDNVLTSLKNNQQQAKEIFRDDVLKNFLADSNDKIFKKWLYNEYQKSYERYCAAKDVLLCKMEQDKSFRKEDQEQKNIIKEFCDAALEVYRMIKYFYIDRSQNSVEVDPIFYNILDPILDDCSVYQYYNEIRNYLTKKPFSQDKIKLNFGNGQLLQGWDENKLKDYKGAVLRHGDDYYLGILMGNKVFQTNNKEAYLDNTNGNGWELMIYKQIADAQKDVPRLFFAKANLALFQPSDNIKRIKDSKSYLRSSDNFSSQDLYDLIDYYKSCIEKYPNWQCYDFHFLPTEEYKNMKDFTDDIQSCAYKVKFVPVRDQYIKEQQSQKQSQKQSQVGLLLFKITNRDFLPQAHGRDNLHTKYFRALFDQENLQHPVIKLNGGAEIFFRQASITPKLVERGQKCIIENRRYTEDKYLFHFPITLNVNHKITPRAFRAKINNLLYTNPNINIIGIDRGENHLLYISVVNQKGEILDGPRPLDTVNGIDYLGLLEKVSKDRDRARKNWESIAKIKDLKAGYVGQVVKVIADLALQYNAIVVLEDLNTGFKRSRQKIEKQIYQNFELALINKLNYFVKKEAMPGEKGHFLSAFQLTEPITSYQDVGKQTGIIFYVPADYTSITCPQCGFHKSFNFYHKNKTEDEHLLETMDLRYDNDDECFKLTCNLMALSNNKLKLSSKNIQRWRWGTNKRELVSYDITKCLAELFSKLQINYTQERGNLLNLFISQQPTSQDYDALIFYLQLWQKIRNSSPTSPDYIQCPNCGFHSDNGFRGKEWNGDANGSYNIARKGIIILGKIKQFGDNHHDRDQEHIFDDLKWSDLSINTEEWNEYVGRQ

SEQ ID NO: 380 - protein, 1201 aa, unidentified
  REGION 1..1201: note = Cas Enzyme sequence
RKFIDDCLANFSINSDYLCEYFTAYKKSERTDNDKEIIKDLQDKMKSAIQTALVTDKRYKRLVGKEMIAELLTNAQDDDTKQMVASFDKFTTYFTGFNDNIKNIYTNEGKSTEVVYRLIDQNLNKFLDNCKLKEIILSNLSSQLDELYSAISEKVCVPFTSSEDLKGKIFEPAYFNSVLTQSGIDFYNRLIGGFTTDDKKKIKGINEYINEYNQTAEKKIPKMKQLYKQILSERSSLSFIPEKFVSDSQLLASINEFYDLVKPEFKEIIRLFTDINSYDTSKIFVKSSELSTISNKIFGDWGAIRSYFYNEYDKANSDKKIKDIEKYEEDRRKALNKIKYYSLANIFGCVKENEFFELLNNDLLDNIKNITSAYSSFSTLPDTSKVLGDENNTEIVKNLLDALMQLKSIFGIFNVECDESKDEMFYGTYEEIAVNFNGLSGLYDKVRNYLTQKPYSQDKVKLNFEFPNLLQGWVDSYTEKSDNGVQYGGYLFRKKNFIGEYDYYLGICHNKKLFRSADNVEEESEYYEKLDYYQLQSKSFYGSKYVGDYQADKNRMNNVLNNFAMRNNIILKENATALANFKIIKSDNNSFAKLIKIPEFTEANNILISNMQATLKNLDRVPKAKIFAEKKYEYFTEVMDDIDCLCKKKIFNYIPISAAHIKEANTNEDKPLFLFKITNKDLEYSQKYQEGLRKGRGKDNLHTMYFRELMDGNGNCFDLGTGEIFYRAKSLDYKETHPANMPIKGKSERNYNKSFTFAYPLCKDRRFMFDQFTLHLSLIANYKLSDNKTVDGCNAKVRKLIRQCDDNYVIGIDRGERNLLYVSVINGQGNIVEQFSANIVEDDYNSQIKTDYHNLLAKREDERNEARKSWKSINGIKDLKSGYLSQVVHKICLLVEKYDAVIAMEDLNSGFKNGRKKVEKSVYQQFEKALIEKLNFLTFKDRNANDIGGLRRAYQLTDKFESFQKMKLQNGIIFYIPAWNTSKIDPTTGFVDMLNTKYGGIEAAGNFFKKFDNISYDSQTNMFAFTFNYSDFGKSFDYKNKWTVYTYGDRIETYQENNKFDCRKVLPTELIKGVFESAGIAYADGHNLVDDICAVKSKDFYVGILKALKLTLQMRNSNAKTGEDYIISPVKNKQGEFFDSRNYSGRNAAMPIDADANGAYHIAKKCLWAINQIKAADEGEYLKTSILIKNQEWLRYMQSGD

SEQ ID NO: 381 - protein, 1202 aa, unidentified
  REGION 1..1202: note = Cas Enzyme sequence
MYYENLTKLYPISKTIRNELIPVGRTAENIKKNRILESDKKRKADYERVKLLMDDYHKQLIDEALQKVQLSNLELAAEVYLNSFKDKNAVDSFGKYQDKLRKEIAELLKAHENFPKIGKKDVIYLLQKMVNDEEDYNSLESFRNFYTYFSSYNKVRMNLYSDEEKSSTVAYRLINENFPKFLDNIKVYSIAKAAGISAENLSEEEQDYLFTVSAFNGTLVQSGIDYYNTCIGMLNSAINLYNQKNKNSGDYRKVPRMKELYKQILSDRTENFIAEFSSDEELISAIGAYSSKLKSVLESDVERLYEVLRESKGDKVFIKNDSKTVFSNIVFGSWIAVDDFICAEYDAAYASKKKDEKYFEKRQKELKKNKSYELGKIILLSEDNDVIEKYILRLQSDIENISRLGAAFDDVVISQHDKQKKLQKNINAVRAIKEYLDAIKDFERDIKLLNGSGQELEKNLNVYAEQEELLITIKDVDLIYNMSRNYLTKKPFSTEKIKLNFNRATLLNGWDKNKETDNLGILFEKDGNYYLGIMSTKANKSFVNPPIAKTDNVYKKVNYKLLPGPNKMLPKVFFAKSNIEYYKPSEDLLAKYKAGTHKKGENFSIGDCRNLIDFFKKSIEIHPDWADFGFQFSNTADYSDLSGFYREVEKQGYKITYTDIDADYVDGLIDKDELYLFRIYNKDFSVYSKGNYNLHTVYFKMLFDERNLHNLVYKLNGEAEVFYRPASIDEEELIVHAANKEIKNKNPRRAINKPTSTFDYDIVKNRRYSKDKFMLHVPITMNFGVDEAYRFNDIVNGFLKCDNRVRVIGIDRGERNLLYVVVVDSDGSILEQISLNSIVNNEYSIETDYHKLLDDKEGSREKARKDWAAIESIKELKEGYLSQVVNVIAKLVLKYNAVICLEDLNFGFKRGRQKVEKQVYQKFEKMLIDKMNYLVIDKSREQLEPYKPGGALNALQLTSKFTSFKELGKQTGIIYYVPAYLTSKIDPTTGFANLFYAKYENTEKAKEFFGRFDSISFNRNANYFEFGFDYKSFTDRACGSRTKWTVCTIGERIIKYRNENKNNNYDDKVINLTEEIKTLFNAKGISFEDGEDLKKQILSINESDFYRELIKLFQETLQMRNSSIDGLRDYIISPVMNSRGEFFNSESSGMSLPKDADANGAYNIARKGLWILEQLAKSSSGEKLKLAMSNEEWLSYAQKHTI

SEQ ID NO: 382 - protein, 1202 aa, unidentified
  REGION 1..1202: note = Cas Enzyme sequence
MIILIKSCYLKGINKERRITKRLKVNIDRFHKEYIESVLVNARVEKIDEYADLYWKSNKDDSDAKAMESLENDMRKQISKQLKSNARYKRLFGKELICEDLPSFLTDKDERETVECFRSFTTYFKGFNTNRENMYSSDEKSTAIAYRCINDNLPRFLDNVKSFQKVFDNLSDETITKLNTDLYNTFGRNIEDIFSVDYFEFVLAQSGIDIYNSMIGGYTCSDGTKIQGLNECINLYNKQDAKNEKSKRLPLMKQLYKQILSEKGSVSFIPEKFNSDNEVLLSIEDYYSSHIGDFDLLTELLQSLNTYNANGIFVKSGAAVSDISNGAFNSWNVLRLAWNEKYEALHPVTSKTKLDNYIEKRDKIYKAIKSFSLFELQNLGNENGNEITDWYISSSKECNSKIKEAYLQARELLKSDYEKSYNKRLSKNGKATELVKNLLDAIKDFQHLVKSLNGTGKEENKDELFYGKLTSYYDSVADIDRLYDKVRNYITQKPYSKDKIKLNFDNPQLLGGWDKNKESDYRTVLLRKDDFYYLAVMDKSHSKAFVDAPNITSEDEDYYEKMEYKLLPGPNKMLPKVFFAAKNIDTFQPSDRILDIRKRESFKKGATFNKSECHEFIDYFKNSIEKHDDWSQFGFEFTPTENYNDISEFYREISDQGYSVSFNKISKSYVDELVDNGYIYLFQIYNKDFSKYSKGTPNLHTLYFKMLFDERNLSNVVYKLNGEAEMFYREASINDKEKITHQANQPIKNKNPDNEKKESTFEYDIIKDKRFTKRQFSLHVPITINFKAHGQEFLNYDVRKAVKYKDDNYVIGIDRGERNLIYISVIDSNGKIVEQMSLNEIISDNGHRVDYQKLLDTKEKERDKARKNWTSVENIKELKEGYISQVVHKICELVVKYDAVIAMEDLNFGFKRGRFPVEKQVYQKFENMLISKLNLLIDKKADPTEDGGLLRAYQLTNKFDGVNKGKQNGIIFYVPAWDTSKIDPVTGFVNLLKPKYTSVSEAKKLFETIDDIKYNANTDMFEFCIDYGKFPRCNSDYKKTWTVCTNSSRILTCRNKEKNDMWDNKQIVLTDEFKSLFGEFGIDYKGNLKTSILSISNADFYRRLIKLLSLTLQMRNSITGSTLPEDDYLISPVANDRGEFYGSRNYKGTNAALPCDADANGAYNIARKALWAISVLKSTPDDMLNKANLSITNAEWLEYTQK

SEQ ID NO: 383 - protein, 1202 aa, unidentified
  REGION 1..1202: note = Cas Enzyme sequence
MKTFIDKFTGLYPVSKTLRFEARPVPATKEWLESDDCHVLFNDITRDEYYPVLKQLLDDYYRYYIEEALAGFRLDEDLVHSAFIFYTEKDFEKLESGLEKLRKNLVKVFDSRKDYLLGSGQLKDLIRLNFKKKKEVLDSHLVSWIKDNPQYTAKQREDFLAAIGSFEGFVTYLGDYKQTRDSLFTDEKIASSIAYRVIHENMLLYFSNIRIYERIKETYPDLYKQINKFEEFFIPESFSGILSQSQIDRYNYNCIGRPVDDIDYKGVNILINEYRQKMDISSNELPCMAVLYKQILSDRESFMPESIKNEAEAIEIARKGYDVAFDNLCNLEELFKQNIKNNNHDNIYIKCSAINDFSKIVLGDWKILGETLKNAKYKGDVISLGQLLELNSFPILEFFNDTLESVIGSLSVEKVNELKSDLDKMLSEIQKYKPFFLFKGTKPLDVPDNGISFANEFKTIYEQLTEFIGVYNRIRNFATKKPYSMDKIKLNFDNPSLLAGWDLNRESTNGSYLFLKDGKYYLGIANNESRDLFTDIRKKNVASHDTNDVYNKVEYKQISGAAKMLSKVFFADKNVELYGHLLTDRIIDIKANKLYTTAANDKAALAEWIDFLKAAIAIHPEWNNYFNFKFRDSSEYANINEFYSDVDNQAYTLTTIPVSAEYIDELVDSHKMFLFQLYNKDFSEHSKGKENLHTMYWKGIFSKENLEAINDGTMPFIKLNGEAEMFMREASIPRKITHPREVPIATKNPVYKPMDSVYHYDIIKDKRFTERKFFFHCPITLNYRAAIKGNFNVKINEFVTGNPDINIIGIDRGERNLLYYTVINQKGNILAQGSLNRIGHKYTAKNKDFTAITDYRLLLDIKEQERNNARQAWGVIKNIKDLKAGYLSQAVHEICQLMLQYNAVVILENLDIGFKRSRAKVEKQIYQKFEKAMIDKLNYLVFKDRGYHENGSFGKGLQLSAPFESFSRIGKQTGCIYYVSPSYTSQIDPKTGFVNLLGSKLKYESIAKAQDILKRFDSISYNASNEYFEFAFDYKNFGVEMEKTNWVVCTCGSRRPEYSPEEKKIKNYHVTTELKALFDSQGIEYADGKDILSAIVSVKDKSFLEGVLFHLRLALKMRYIGEAPEDDFFLSPVEFAPGNFFDTREASQNEPQTADANDAYHIALKGLMTIQSIKDGKLAKYKVGGEKAAWFKYMQSQEFRKA

SEQ ID NO: 384 - protein, 1202 aa, unidentified
  REGION 1..1202: note = Cas Enzyme sequence
MYYENLTKLYPISKTIRNELIPVGRTAENIKKNRILESDKKRKADYERVKLLMDDYHKQLIDEALQKVQLSNLELAAEVYLNSFKDKNAVDSFGKYQDKLRKEIAELLKAHENFPKIGKKDVIDLLQKMVNDEEDYNSLESFRNFYTYFSSYNKVRMNLYSDEEKSSTVAYRLINENFPKFLDNIKVYSIAKAAGISAENLSEEEQDYLFTVSAFNGTLVQSGIDYYNTCIGMLNSAINLYNQKNKNSGDYRKVPRMKGLYKQILSDRTENFIAEFSSDEELISAIGAYSSKLKSVLESDVERLYEVLRESKGDKVFIKNDSKTVFSNIVFGSWSAVDDFICAEYDAAYASKKKDEKYFEKRQKELKKNKSYELGKIILLSEDNDVIEKYILRLQSDIENISRLGAAFDDVVISQHDKQKKLQKNINAVRAIKEYLDAIKDFERDIKLLNGSGQELEKNLNVYAEQEELLITIKDVDLIYNMSRNYLTKKPFSTEKIKLNFNRATLLNGWDKNKETDNLGILFEKDGNYYLGIMSTKANKSFVNPPIAKTDNVYKKVNYKLLPGPNKMLPKVFFAKSNIEYYKPSEDLLAKYKAGTHKKGENFSIGDCRNLIDFFKKSIEIHPDWADFGFKFSNTADYSDLSGFYREVEKQGYKITYTDIDADYVDGLIDKDELYLFRIYNKDFSVYSKGNYNLHTVYFKMLFDERNLHNLVYKLNGEAEVFYRPASIDEEELIVHAANKEIKNKNPRRAINKPTSTFDYDIVKNRRYSKDKFMLHVPITMNFGVDEAYRFNDIVNGFLKCDNRVRVIGIDRGERNLLYVVVVDSDGSILEQISLNSIVNNEYSIETDYHKLLDDKEGSREKARKDWAAIESIKELKEGYLSQVVNVIAKLVLKYNAVICLEDLNFGFKRGRQKVEKQVYQKFEKMLIDKMNYLVIDKSREQLEPYKPGGALNALQLTSKFTSFKELGKQTGIIYYVPAYLTSKIDPTTGFANLFYAKYENTEKAKEFFGRFDSISFNRNANYFEFGFDYKSFTDRACGSRTKWTVCTIGERIIKYRNENKNNNYDDKVINLTEEIKTLFNAKGISFEDGEDLKKQILSINESDFYRELIKLFQETLQMRNSSIDGLRDYIISPVMNSRGEFFNSESSGMSLPKDADANGAYNIARKGLWILEQLAKSSSGEKLKLAMSNEEWLSYAQKHTI

SEQ ID NO: 385 - protein, 1202 aa, unidentified
  REGION 1..1202: note = Cas Enzyme sequence
MFLGFINKYQLSKTLRFELKPIGKTLELIEKKGLITEDETRSEDYKRAKELIDEYHKEFIHQALSGIRLGGLDRYEELFFIQNRDEKTQKEFEKLQDDLRKQIVAGFKAHKAFANIDKKELIKVELPEFLTDEKDREIVARFDSFTTYFTGFHENRKNIYSDKAQHSSIGYRVIHENLSIFLANKRAFELVQQNFPEIAQIAQDSLLEHLEGGVVEDMFELDYFSLTLTQKYIDIYNTMLGGKVLEDGTKVQGLNEHINLYRQKHNIEKRKLPNLKALHKQILSDREGMSWLPDAFENRDELNSTVESFYKESIVEFACCDGVVDITEKFVETLSDDSNYDLSKIFVKNDISLTAISQEIFKDYRVIKDALWQKHLADNPKAIKSKDITADEEKYFSRKNSYFSILEIEKALDEAGQAQKLLDFFKVREIESSKTVKESFADWQNNKEDKKLTKSLLDSMLNLQRAIKPLFVKAEIDKDIAFYASFDTYFESLSGIVKLYDKVRNFESKKPYSLEKFKLNFENSTLLDGWDLNKEPDNTSVLFKKDGLFYLGIMDKKHNKIFTKISENNSKDIYQKIEYKLLPGANKMLPKVFFSNKNIDYYAPSEALLANYRDGVHKKGDNFDLDFCHELIDFFKSSIEKHPDWRNFEFSFSDTSSYEDMSGFYREVEQQGYKISYKDIDSSYIDQLVDDGKLYLFQIYNKDFSPYSKGTPNMHTLYWKMLFDETNLKDVVYKLNGQAEIFYRKKSIEYSKEKMLQGHHYDKLKDKFAYPIIKDRRFAMDKFQFHVPITLNFKAVGSDRLNDDTNELIRTNRNNIKVIGIDRGERHLLYLSLIDSSGRIVEQYSLNQIINSHNGKKHIVDYHQKLADKEKERAEARENWGVVENIKELKEGYMSHVIHRIATLMVKHNAIVALEDLNFGFKRGRFKVEKQVYQKFEKMLIDKLNYLVDKQKSPNELGGLLKAFQLTNKFVSFEKLGKQSGFLFYVPAWNTSKIDPVTGFVNLLDTRYQSIEKSKEFFSKFDAIRYNDQKGYFEFEFDYKNFTTKADGTRTKWTLCTYGTRIKTFRNRDKNHQWDNVEVDLTAEFKSLFGLHSGDLKELIISQDRKEFFETLLYLLRLTLQMRNSVTNSEIDYLISPVADKNGNFYDSRVASDDLPRDADANGAYNIARKGLMIIEKIAKSKSGEKLNLTISNKEWLAYAQR

SEQ ID NO: 386 - protein, 1203 aa, unidentified
  REGION 1..1203: note = Cas Enzyme sequence
LLLNNLLGGCMFMEKMFNKFTEQYSLTKMLKFSLEPIGETRETLEKSLQRDHQRFIDFMKAKKLLDEFHREVIIMQSLNSLSLNWKPLFNNLHEYKTTYRAYQADKKSSAKRNNYKQADKSLKQQQKQMRETIASLFHSHSAYPNLFKKELITKEMPIYLKDRADDLKIIQAFQKLNGYFEDYHKNRKNMYKNDKNTAISYRVVNINFIKYCHNIDNLQKIQTECPGILVDVNSEIHTPNYYNYVITSEGINKYNLIIGEINKALNLYDQKQKTNLSRKMRLARLHNQIMFSGEKKYIDSFNTIQEVNQAVKEFYPAFIKEYLSGIKDMFCDMEAKYDCSQIYIKDTSGLSILMYGNWTQIDSFRRTRLQDSKKSEDKINAELKKPATWEEILSLPASQHNIEEIVFSLHDSIINNYHALNFENEDIFTVDLDLIKVFMDSMQDLTRFIKNFNPPKQGDIEFYAQHEYYTTILQEATRLYNKVRNFITQKPDQKNKFQLAFNHTEFLKGWDSSDTQTKKRGTLILTKDNKYYLGVIDKEHINEFLKKLNKIAPSEQGYQRVEYKQVQNPAKDLPRIFFTKKLKLEYVDINTAREANKHKPGDAFDKEFLNILINYYKEKISNYPNWDVYQFQFSNKEYDTIDEFYSEVTEQGYTISFGKCVSEEFINECVSNGLLYLFKIHNKDYADKPTGNKNLHTLYWEAIYKEGSKIKLNGNAEMFYRKPQITDPVIHKKGSIIVNRRDREGKPIPEDTYRKIVAYLNGGPEPEGVDLSKIIYREAPHDIIKDKRYTEEKFLLHVPIKINYYNGNPTKDFNQQVLDVIKNNPDLHILGIDRGEKNLLYVSVINLKGEIVYQKSLNIINKFDYHEKLTQRYQERQQARVNWDTITPIKDFKTGYLSHAVHEITELMVKYNAILVMEKLNAGFKRTRSKFDYSVYQKFENMLISKLNYLTFKESGVSNGYQLTTPQKLEDNTSQNGFIFYVPAAYTSAIDPTTGFANIIKYKYNTMKEAKEFFSKFDKIRFNGSEDYFEFHIDYEKLPTSQQDYINKWVVCTYGDKRYFYSPKEKKTKTVNVTQELKNLFCQYNIDIHGDLKEAICNQTEAKFYERLSFLFKLTMNMRYSNRDEKEDFILSPVKNKQGEFFISCSENNNLPKKLPTDGDANGAYHIALKGLQLISGITKSYGLPNITTTDWFKYAQQRHQEK

SEQ ID NO: 387 - protein, 1203 aa, unidentified
  REGION 1..1203: note = Cas Enzyme sequence
MSNIYSDFTNCYGVSKTLRFSLIPQFETGENIKKNGVLFSDKEKSENYEKVKPILDKCHIKYIEEKMVGYCDDWGELYEALVDVQKDKSLKPNLETVQKKYRKKISAYLKKDVRTLAPKELIGGALSGKYYVQEMEENIDLFHSFNKFATYFTNYQTARENMYEEDGSTAISYRVVNEIFPQFVFNMRLFNNLPSEVVEQIQKNTEILTGSYSLNQIFSIDFFNNVVSQKGIDFYNTIIGGITLSDGLTKHKGINESCNVCFQKGLLSKKVVFKLLYKQILSDRETLSFVSEMFESDEELNKALKAYSTMLNETLTNYGVEIEGIFKKENVDIGKIYIDKKAVSFLSMIAYENDWSAIKKRLADNKIKEKDEYTLFELQQCSEVDLLEKAHDSIGNLIKEILEAEKHLSFNSKISSYVEIKNYMDSVQKLEKTLKIFAADEDNEKDSLFYGVFDTVYKVLRENIALYNMIRNYATKAPYSTEKYKLNFNSPTLLDGWDKNKENSCLGMIFKKDGKYYLGIMNANNKPKIKEGKIKTEGSYEKMMYKYLPGPNKMLPKVFFSAKGLSTFGASDYIINNYNEKRHIKSEKNFDLKYCRDLIDFFKEKINEHPDWSKFGFSFSDTSAYENISDFYSEISKQAYQVSFSYIEEKEIKEAVKEDKLYLFQIYNKDFSEQSTGKPNLHTIYWKELFTEENLKAPIFKLNGEAEIFYRPASVENPFMHKKNSILIRKKDNQGNSVEDGIYKAAVLDAENGMSLTELENKYPNLLFRKAPHDIVKDKRYTQERFAFHVPITMNNGVDEKYKKFNESVLRQIEGRDDFYIIGIDRGERNLIYISCIDQKGNIVYQKSFNSVSETDYHKKLDLLEKMRLDERRSWEAVTKIRDVKAGYLSQVVHEIVKLMTKYPSIIVMEDLNFGFKRGRIHIEKQVYQNFEKALIDKLNYCVLKNVPSDTEGGVRHAYQLTAKFDSFERLGKQSGFIFYVPARNTSKIDYYTGFVNLFTSAQLKYESVNKSKEFFKLFDYIGYDSSDCFKFDFKYSNFDLKQTDYMDKWSVYTIGENRIAHTKVDGYDTTKEVDVTKEMKQLFEEYGIDYKSNLQEQIIAIEDKLFFKTLLWLFSVTVQLRYENAENDFILSPVQKDGKFFDTRKAKENEPKDGDANGAYHIAIKGLQLVKTQLQNGKIIADEKGQQFYNFLKFVQDKNYQK

SEQ ID NO: 388 - protein, 1203 aa, unidentified
  REGION 1..1203: note = Cas Enzyme sequence
MSNIYSDFTNCYGVSKTLRFSLIPQFETGENIKKNGVLFSDKEKSENYEKVKPILDKCHIKYIEEKMVGYCDDWGELYEALVDVQKDKSLKPNLETVQKKYRKKISAYLKKDVRTLAPKELIGGALSGKYYVQEMEENIDLFHSFNKFATYFTNYQTARENMYEEDGSTAISYRVVNEIFPQFVFNMRLFNNLPSEVVEQIQKNTEILTGSYSLNQIFSIDFFNNVVSQKGIDFYNTIIGGITLSDGLTKHKGINESCNVCFQKGLLSKKVVFKLLYKQILSDRETLSFVSEMFESDEELNKALKAYSTMLNETLTNYGVEIEGIFKKENVDIGKIYIDKKAVSFLSMIAYENDWSAIKKRLADNKIKEKDEYTLFELQQCSEVDLLEKAHDSIGNLIKEILEAEKHLSFNSKISSYVEIKNYMDSVQKLEKTLKIFAADEDNEKDSLFYGVFDTVYKVLRENIALYNMIRNYATKAPYSTEKYKLNFNSPTLLDGWDKNKENSCLGMIFKKDGKYYLGIMNANNKPKIKEGKIKTEGSYEKMMYKYLPGPNKMLPKVFFSAKGLSTFGASDYIINNYNEKRHIKSEKNFDLKYCRDLIDFFKEKINEHPDWSKFGFSFSDTSAYENISDFYSEISKQAYQVSFSYIEEKEIKEAVKEDKLYLFQIYNKDFSEQSTGKPNLHTIYWKELFTEENLKAPIFKLNGEAEIFYRPASVENPFMHKKNSILIRKKDNQGNSVEDGIYKAAVLDAENGMSLTELENKYPNLLFRKAPHDIVKDKRYTQERFAFHVPITMNNGVDEKYKKFNESVLRQIEGRDDFYIIGIDRGERNLIYISCIDQKGNIVYQKSFNSVSETDYHKKLDLLEKMRLDERRSWEAVTKIRDVKAGYLSQVVHEIVKLMTKYPSIIVMEDLNFGFKRGRIHIEKQVYQNFEKALIDKLNYCVLKNVPSDTEGGVRHAYQLTAKFDSFERLGKQSGFIFYVPARNTSKIDYYTGFVNLFTSAQLKYESVNKSKEFFKLFDYIGYDSSDCFKFDFKYSNFDLKQTDYMDKWSVYTIGENRIAHTKVDGYDTTKEVDVTKEMKQLFEEYGIDYKSNLQEQIIAIEDKLFFKTLLWLFSVTVQLIYENAENDFILSPVQKDGKFFDTRKAKENEPKDGDANGAYHIAIKGLQLVKTQLQNGKIIADEKGQQFYNFLKFVQDKNYQK

SEQ ID NO: 389 - protein, 1204 aa, unidentified
  REGION 1..1204: note = Cas Enzyme sequence
MKQSTQYDDFTNVYSLSKTLRFELKPDPLTAEYIEKEQMLEKDKSISQSYQEIKEYFDRLHRDFINEALAKVNLDCSHYWELFQAKDKKALQIEADKLRKNFGTAFNLVGRQWSKLAGIKEENEENEGNKDQGKYRDILFKKEVLDIIKARYGQGDARLAALLETFKNFFTYFINFNESRKNFYKLDGTSTAIATRSIDVNLKIFCSNIANVQYLPDGIQLTDEERSLFEIRNYQTFLQQEKIKQYNDLIGTINGKINNYRQANHQKIGFLKILQKQILGDANNPSTKFIEITDDASVFPVLNELINNAEEPFRKFYKELLPKILPDTTDNSIDLSKVYLSKVALNTISSKVCQSWCTLKDILEKKNDFSLDNVLTSLKNNQQQAKEIFRDDVLKNFLADSNDKIFKKWLYNEYQKSYERYCAAKDVLLCKMEQDKSFRKEDQEQKNIIKEFCDAALEVYRMIKYFYIDRSQNSVEVDPIFYNILDPILDDCSVYQYYNEIRNYLTKKPFSQDKIKLNFGNGQLLQGWDENKLKDYKGAILRHGDDYYLGILMGNKVFQTNNKEAYLDNTNGHGWELMIYKQIADAQKDVPRLFFAKANLALFQPSDNIKRIKDSKSYLRSSDNFSSQDLYDLIDYYKSCIKKYPNWQCYDFHFLPTEEYKNMKDFTDDIQSCAYKVKFVPVRDQYIKEQQSQKQSQKQSQVGLLLFKITNRDFLPQAHGRDNLHTKYFRALFDQENLQHPVIKLNGGAEIFFRQASITPKLVERGQKCIIENRRYTEDKYLFHFPITLNVNHKITPRAFRAKINNLLYTNPNINIIGIDRGENHLLYISVVNQKGEILDGPRPLDTVNGIDYLGLLEKVSKDRDRARKNWESIAKIKDLKAGYVGQVVKVIADLALQYNAIVVLEDLNTGFKRSRQKIEKQIYQNFELALINKLNYFVKKEAMPGEKGHFLSAFQLTEPITSYQDVGKQTGIIFYVPADYTSITCPQCGFHKSFNFYHKNKTEDEHLLETMDLRYDNDDECFKLTCNLMALSNNKKQDNNELKLSSKNIQRWRWGTNKRELVSYDITKCLAELFSKLQINYTQERGNLLNLFISQQPTSQDYDALIFYLQLWQKIRNSSPTSPDYIQCPNCGFHSDNGFRGKEWNGDANGSYNIARKGIIILGKIKQFGDNHHDRDQEHIFDDLKWSDLSINTEEWNEYVGRQ

SEQ ID NO: 390 - protein, 1205 aa, unidentified
  REGION 1..1205: note = Cas Enzyme sequence
MKKIDMFKNKYSVSKTIRFRLIPQGNTLANFEKNYLENDEQRAKEYELVKEYINRYHQAFIEKVLANLVLDEDDLKEYLELSEKRNKTDDDENRLSAIKTSLRDQIAGSFIAGDNREEFDKLFKKELLDELLPNIIDEKEKEVTNHFLRFSTYFTGFNQNRKNIYSNEDKPSSIAYRCISENLPKFVHNIIAVKKAKEKISNDTLKLVYISDDFNLDSLEEIKTFNKVLSQNGIDRYNDVVNGYVRDDGQKVQGLNEIINLFNQTQERNNRVPLLNSLYKQILTDSGDVSFIDEFSSDEEVIETLKENKKYISSALIELSDLISHFEDYYEELVISTQYIPEISTKLFGEWDYILNCYTKKCGENSKKKSTDEIYELAKKEFNKPKFYSVSYLDSLINVDKRENKIMSLVFNLLDETMNNVNKAYIEFDNEFANSTYFSNSDKKIETIKHYLDEVKELERIIKNIGLKHIDQLVDSLLYSKLLAVYENISSIDLIYNMVRNYVTRKPYSDKKIKLNFDNPQLLGGWDKNKERDYRSVLLRDDDKYYLAIMDKGNTKCFLSYPNDGDCYEKMEYKLLPGPNKMLPKVFFAKSNVDYYDPTGKYTKVYEKGTFKKGKDFVDKDLRTIIDFYKESINKHGDWSKFNFVFRDTKDYTDIADFYNDISMQGYNVSFVKISKDYVDKLVEEGSIYLFQLYNKDFSKFSKGNPNMHTIYFRMLFDEDNLKDVVYKLNGECEMFYRKASLKKEKPTHPANVAIKNKNPNNDKHESKFAYDLIKDKRYTENQFFLHMPITMNYKQKSTYNSLNSEIKNAIVKSENNYIIGIDRGERNLVYICVIDNEGKIVEQESLNTIVSGNNYSVDYQGLLNEKEKERQSARKDWKTINNIKEIKEGYLSQVVHKICELVVKYDAIISLENLNMGFKNSRIKIEKQVYEKFEKMLIEKLSYLVLKNSEKKASGGALRAYQLASNQISTSAIQNGIIFHIPAWLTSKIDPTTGFANLFSIKYKSIDETKAFINKLDRIDYNKNEELFEFDIDYSKFNTSVNDFKNKWTLCTYGNRIVTFRNKEKNNQWDNKEVDLTKEFSVLFSKYRIDINGNIKDQTLSINEKDFFVEFIHLFKLMLQMRNSITGNVDVDYIVSPVRNRSGEFYDSRVRKEGLPLDADANGAYNIARKLMMIVRKLKETTNIEKEQLTVSNPEWLEFAQTNE

SEQ ID NO: 391 - protein, 1206 aa, unidentified
  REGION 1..1206: note = Cas Enzyme sequence
MKKFANLQKEVKTVKFGLKPIGMTEKFIKDRGLLDAQYSINDRLEEAKLVLDRVYLDVLSRSMSSIDPKIADGLYDVWLKDQKKFTNSNEFNSAKDTFVGKIKGYIRELIKTEKENYDFNVNNILNDIDTFCGGDDVLKSELHSIKNDFSGRSAYFTEYCTSKNPALFGTETNSSSYRVFNENLVTFFKNVKAFRSISPDQMTTVLKFVDGLDEIMVPDNGLKYILQSDIDVYNKVIAEYASARQELQSKDKGLSLPKLEKLAKQILSEAEKKFQPIESDEEVFSFLDENIEDLTSAILKLKELFSGIGSIYDKEKILIAKKVKAKKDEFSMISNACMHSWDGIKNLIIENWKAENPKGKENVKDKKANKFYKQLSNISLLELEKITNSDAATSYLIGLGEKNDRELQEADLASLAINAYNVFKEEHEKGLDKRLKNIDNSKNINAFFDTLIRLKDFISQIYVGEGIDDTCEFYQELLPAKCKLEEVVSEWVRIRSYLTKKDYIQNELRVYFGLNANLMGGWTHKENGEFPKRSIMFKGVGDDYYVGILAGVSSAKKILNGEIGDGRFRYLDITNYDKKNIERLVQTFCGGKKPDEDGLIKVLTSKEWAQKYPKLVLEKTDGFSSTDEIYKSLCHQEMRWVACSREAVDTMVESGDLYLFKLSCRDFSKHSKGNPQLYTMYLRALLSDDNPIGRYFINGNGKITFRPRTVVDNTNIGDFAIHRANFPIDNKRNIEGGEKSATYPYDIEKNKRFKSDSWFISLPLSVNEGKKITQKEINDLVNGMISTGEIKHVIGIDRGERNLVTVSIVNKDTMEIVEQRSLNIIGNTDYNKLMDEMSENVKDDRNNLRLESSMRNMSEGYVSHAVNEIVQLVRKYNAVIAMENLDNLGRGKIIKNIYTKFENQLLDKLSFMVFKDVDKNDIGGVYNPLTMAIKKTDQTKYEKTLSQNGIVFSVLPQYTSSIDPVTGFANVLDMQNVKTIDSIKKFFYSFDYIRYDKEHDHFVFGADWKKFKLKNSVKVNELNRTEWTLVSSGIRIRYKKTKNSSHRTIEEHDPTEELKRAIGRSGNNFMECGNIKNIIMNQDSHDILDEFLDAVKLILQMRNSKGEEDYILSPALDENGKQFDSRERHGQTMPKDGDTNGAYNIARRAVMLIRNGDDNKYDSNVHWLNFAQTEGRMQTLGNVQSTNFDNEFKTNELCYSASKRVG

SEQ ID NO: 392 - protein, 1207 aa, unidentified
  REGION 1..1207: note = Cas Enzyme sequence
MENIRKSNFLEEDEKRAKDYELIKKAIDDFHRRFIDSSLQGIQLNWQPLADALAKYNAQKDATDKKVVESEQKKLRKDIVDIFKKDPRFDDLFSEKLLSKYIFEDLASTDNPENLDAIESFRKFSGYFIGFHENRKNVYSSEDITTSISNRAVNINFSKHIENCDRYAEAKRIMPDAIESFKIEPFNEGIDLDKVFSVDGFNEVILQDGIERYNRVLGGFKPEIGNKIRGLNEFLNLGYQNGLSKQKIRMVPLHKQILSIESTTSFVPWAFESDAELLHTIFTFYNDLIQNKIFERAVELLSRYREYDFESIFIRQMDLTSISRELFGEWDTLGSMIQTYYADERGDPLQERTRKPVNKKLSLKYHRLSDVIGAIQLSGSEVKFEKYISNISECHSRILDCREKACLSPEVILSDSETSHVPIKNLLDSIQKFMHMFSPFNIKDEAKGDETFYSDFNEIFDALFRVVPLYDKTRNYFTKKDLSTKKIKLNFGNPTLASGWDLNKEFDNTAIIFTRGEKYYLGVMNPKDKIKTWTYDGDPAPYKKMVYKLLPGPNKMLPKVFFSKKNIEYYAPSAEILDGYEKGIHKKGDDFDLKFCHKLIEFFKESIEKHPDWKEFKFRFSPTDSYEDISGFYREVEEQGYKITFVDVSPSLVDEYIGSGKLFLFQLYTKDFSERSKGTPNMHTLYWKSAFSEENLKDIVIKLNGEAELFYRKKSDIRKIVVHKKGDVLIGRTTLDNEPIPEETYQEILSYEKGLTKTLSENAKLYENRIRKSVANYDIIKDRRYTEDRMYFHVPLTFNFKSKKENNINRKAIDYAMTQKDLHVIGIDRGERNLVYVTIINSKGEIVKQKSFNTIEKFNYQEKLNQREKERDQARKNWNSIEKIADLKEGYLSGVVHEICKLIIEYNAIVVMEDLNFGFKRGRFKVEKQVYQKFENMLIDKLNYLVFKNASPKDLGGALNAYQLTNVLESFSKLGKQSGILFYVPAAYTSKIDSDTGFINAFNLSGITNDENKVKFIQKMDSIMYDSRTDSFAFSFDYSNFLVSQAMYINKWTVYTVREWAIFNQKERKQILIEPTQKMKNILKQHNIEYESGEDILHDIVAHKKGDPKLIQEVYSSFINSIRMRYTYEGVDKIISPVLNHEGRFFETGSTKNSPEDADANGAFNIARKGALMLELIKKDNDPNAKKIDIPKMEHVKWLEYVKSGKI

SEQ ID NO: 393 - protein, 1207 aa, unidentified
  REGION 1..1207: note = Cas Enzyme sequence
MVNLSKTKFFEQDEERSKSYVIMKKIIDDYHKQFIDDCLSKMSVNWQPLADAIESSKKNKDDKSKINLKNEQKKMREEIEILFQSDNRFEDLFSEKLISKLIAPEVISRNNLDEIKALKDFNKFSGYFLGLHENRKNMYSEDEKHTAIAYRIVNENFAKHIENCHKFLIIKEQMPELIQTLINEIRINSDANLDKIFSVNHFNNLVRQKDITVYNEIIGGVSSESMKAHQGINEYLNLYSQKIDNKKRIKMTPLFKQILCDRQTHSFIPQFFSNDLEIMNAVDEFNKDMEMQNIFSRSIYLLDHCTEYDTSKIYVNQKDIPFISTEIFGSWNVLGGLMQLSKADELGDERLEKTRKKIDKWLATPEFTLDVIIKSIEKGGLEDNFKKYVKNAVSILPEIEKGRSKICLKPEISLLGNESEIQALKSFLDSMMYLLHMMKPFYVREDADRDLGFYSEFDEVYESFSALIPLYNKIRNYVTKKPFNMEKIKLNFSNPTLAAGWDLNKEWDNTAIILRRDKKYFLGVMDPKKNIDFKKEVFGESTDYYEKMVYKLLPGPNKMLPKVFFSKKNYDKFSPSEYICIGYDEGKHKKGKDFDLKFCHDLIDFFKISISKHEDWKKFDFKFSPTNSYEDIGQFYKEVEKQGYKVSFSKIPVKAIENYVDEGRMFLFQLYTKDFSDKSKGTKNMHTLYWNEAFSDENLKDVVVKINGDAELFYRKKSNIDVLPHKAGDVLVDRKDSDGNPIPEKVYYELFRYKTGRISELSIEAKPYADRIRCKEAHYDIIKDRRYTEDHMFFHVPLTLNFKVDRNININKMVIDHILPYKDLRIIGIDRGERNLIYVSVIDRQGNIIDQKSFNIIDNFDYHIKLDQREKERADSRKSWNSIEKIKDLKEGYLSKVIHEISKMVIENNAIVILEDLNFGFKRGRFKVEKQVYQKFESTLINKLNYLVFKDIDSGMSGGVLKAYQLTDEFDSFTKLGKQTGVLFYVPASYTSKIDPTTGFVNIFNTTKVTNTNARKEFLQKFESIYFDAAENAFAFRFDYRDFDVSQTDFKNIWTVYTKGTRIKYIPKERNNHIIDPTQEIRESLLKYEIKYSDQEELLGKILSSESRSDLINTVYYAFQDTLQMRNSDQNEDLIKSPVRNGDGTFFCTNPENRKLPVNADANGAYHIALKGELMLRMLEKEYKPDSKMVKIPIIDTASWLRFVQTR

SEQ ID NO: 394 - protein, 1207 aa, unidentified
  REGION 1..1207: note = Cas Enzyme sequence
MVNLSKTKFFEQDEERSKSYVIMKKIIDDYHKQFIDDCLSKMSVNWQPLADAIESSKKNKDDKSKINLKNEQKKMREEIEILFQSDNRFEDLFSEKLISKLIAPEVISRNNLDEIKALKDFNKFSGYFLGLHENRKNMYSEDEKHTAIAYRIVNENFAKHIENCHKFLIIKEQMPELIQTLINEIRINSDANLDKIFSVNHFNNLVRQKDITVYNEIIGGVSSESMKAHQGINEYLNLYSQKIDNKKRIKMTPLFKQILCDRQTHSFIPQFFSNDLEIMNAVDEFNKDMEMQNIFSRSIYLLDHCTEYDTSKIYVNQKDIPFISTEIFGSWNVLGGLMQLSKADELGDERLEKTRKKIDKWLATPEFTLDVIIKSIEKGGLEDNFKKYVKNAVSILPEIEKGRSKICLKPEISLLGNESEIQALKSFLDSMMYLLHMMKPFYVREDADRDLGFYSEFDEVYESFSALIPLYNKIRNYVTKKPFNMEKIKLNFSNPTLAAGWDLNKEWDNTAIILRRDKKYFLGVMDPKKNIDFKKEVFGESTDYYEKMVYKLLPGPNKMLPKVFFSKKNYDKFSPSEYICIGYDEGKHKKGKDFDLKFCHDLIDFFKISISKHEDWKKFDFKFSPTNSYEDIGQFYKEVEKQGYKVSFSKIPIKAIENYVDEGRMFLFQLYTKDFSDKSKGTKNMHTLYWNEAFSDENLKDVVVKINGDAELFYRKKSNIDVLPHKAGDVLVDRKDSDGNPIPEKVYYELFRYKTGRISELSIEAKPYVDRIRCKEAHYDIIKDRRYTEDHMFFHVPLTLNFKVDRNININKMVIDHILPYKDLRIIGIDRGERNLIYVSVIDRQGNIIDQKSFNIIDNFDYHIKLDQREKERADSRKSWNSIEKIKDLKEGYLSKVIHEISKMVIENNAIVILEDLNFGFKRGRFKVEKQVYQKFESTLINKLNYLVFKDIDSGMSGGVLKAYQLTDEFDSFTKLGKQTGVLFYVPASYTSKIDPTTGFVNIFNTTKVTNTNARKEFLQKFESIYFDAAENAFAFRFDYRDFDVSQTDFKNIWTVYTKGTRIKYIPKERNNHIIDPTQEIRESLLKYEIKYSDQEELLGKILSSESRSDLINTVYYAFQDTLQMRNSDQNEDLIKSPVRNGDGTFFCTNPENRKLPVNADANGAYHIALKGELMLRMLEKEYKPDSKMVKIPIIDTASWLRFVQTR

SEQ ID NO: 395 - protein, 1209 aa, unidentified
  REGION 1..1209: note = Cas Enzyme sequence
MYENFTNMYKLSKTLRFGLKPQGATLRYMEERGVLEEDEARAEAKKQVQSLADRYHKDFIDKTLKPVHLEGVDAFETAYTSKDPDSGEALRAAATDLINQISAAFHKDKAFGSMFSGKLFSKILPDFYKDDEEALETLSIFDGFTTYFSGYNSNREYIYDASGGSGTIGKRLISDNLPTFIDNNRKLTRIKETIPEDISVAESELDVLLDGRSVGYFFSTDNYDTFLTQDGIDRYNQVIGGYSKEDGTKIRGLNEYINLYNQKVSDRNDRLPMLTQLKKMILSEKTSLSFRPEPFTEDNEVLGAIRTFDSEFKNAEESLARTVIGLCGYDTSGIYIQYKDLRDISNSVFDSWRYIDGLLSDKYDRESNASEKQKSTKTYIKKKKAFFNKKNLYFSVADLDALPGIDGKISEYLTGAAGFHKLTIDSARKDMLKCSSERSDSDRALKRDSHAKAALKAYLDAVTDFRRFISSFMVKTADKDDVFYSDLEPGYRILSEITPLYNKTRNYLSGKLYTDEKIKLNFGSAVLLGGWSESTESTKRGTILIKDGHYYLGIIAKGQGDLFAKIPDATTDDVYQKMRYNQISVPSRDMPHVVFSDAGIEFFKPGSDILDIYKRKTFLKGESKKPSKNFNLEDCHTMIDFYKECLTKYPTWKILDLNLKETSEYDGINPFYNDVARDAYSIKFRNVDKAVVDKLVEDGRLYLFEIWHKDFSEHSHGKPDLSTIYWRALFDPRNLDNLVYKLNGGAEIFYRKSSIKEHDIIRHKKGDVVMAKNPKTPKQSKVLKYDIIKDRRFTVDHFQLNVPITINAAAPDFAFMNTEARMAIHKADSPHVIGVSRGENSLLYVTVIDPEGKVIEKRSLNIIGNTDYADLLARREAERNAERRSWETVTGIKQMKEGYLSQVVRILADLMLKYDAVLAIEDLSSNFKQSRQKIEKAVYQQFEEKLIKKLNYLVNKDASDDEAGSLYRAYQLAGDAPAFDRKTGFGKQTGFVFYVSPWNTTAIDSNTGFMNLFDTRYQSVAASRNFWHSFDNIAYDEIQDAYRFDFDYSYFVSPDRQDMLKGTKTNWSVYAKGERILTTKTDKGIKHEVVNVEDKISELFDKYSIGHGDSIKADICAVQDKAFHEELMKLFGLTVGMRCGSSVNSPVLGHNGVFFSASSDENGAYNIARKGLMIIERLRNASDEEVTARGKDGVSLTISANDWLKYTQK

SEQ ID NO: 396 - protein, 1210 aa, unidentified
  REGION 1..1210: note = Cas Enzyme sequence
MYEAFTNKYKLSKTLRFALEPQGATLSHIEANGILEEDQIRAEEAKKVKKLANDYHKAFIDRILDSLSLHGIEAYEFAFFDDSEKSDEILACYAKDLREQITAAFKNDPAFESLGSGKLYTEVLPAYFAEDKDALASLSLFQKFTTYFRDYNEKKLVMYDASGDKDMPKRGTIACRVIDENLPIFLINSNRISCISKSAIDLSQMEEDLELLLQGETLSSFFGSENYSAFLTQRGIDRYNQVIGGYTKEDGTKIKGLNEYINLHNQKASKTDRLPMLKKLKKQILSEKTTLSFIPEAFDSDEEVTESILAFDESFKEPAEELTRLMENIRDYDTGCIYISSDLLRSISNKVFGSWHYIDDLLSDKYDRDSGTTEKQRETKKYKDKKEKDLRAVKEYSVGELDAMPGIDGKVSKYIAGAAGFSLSAIDIARKDMLRRFELRSERNDRSLKRDDFAKSAIKGYLDACLDFKKLVASLDPSNKTPDFDFYFEREPYLDDIYPVTTLYNKTRNYLSGKLYKNEQVKLNFDAGDFLGGWAESQESVKRGTILIRDGEYYLGVIAKGQGDLFSRVPDAKTNDIYQKMRFNQIANPARDIPKAVFSKKGIENLKPADNVLEAYRNKSFIAGEKFNIDDCHSVIDYYKRCIREYGNWHLYNFDLKETADYKGINEFYRDISLAAYDLRFRDIDRAEIDSLVEEGKLYLFKLKNKDMSAKSTGKPNLFTMYWNAVFSELGIKTTQFRLCGGAEMFYRKASIKEADIIRHREGDRVEAKNPNTRLRAKTLKYEIIKDRRFTMDHFQLNVPITINATSPEFCNINTEARLAIKESDNSHVIGVSRGENSLIHITVLDSKGNIIESRSLNVIEAADGRKTDYARLLAEREAARDEQRRSWATIEGIKQLKEGYISQVVHILTDLMIKYDAVIAIEDLNLNFKQSRQKVEKAVYQQLEEKLIRKLNFLVDKDAEPNEPGGVYRGYQLTLPFQTFEKVGKQTGFIFYVSPWKTTDIDPATGFINLFDTRYTSRDSAVRFWSMFDGISYDAGENCYRFDFDYSKVFENDRNKKALLDGTRTGWSIYIKGEKLAMQKTGKGVKYVNLDLGKAIEDLFDKYDVGSKEDLREEICAITEKAFHEELLNIFGLAARPRSGSKIKSCVKDDNGRFYEGLADANGSYNIARKGLVIVDRIREASAEALTAKGKGAVSVAVTGNDWLRSTQN

SEQ ID NO: 397 - protein, 1211 aa, unidentified
  REGION 1..1211: note = Cas Enzyme sequence
MNNNLFKDFTNLFSLTKTLRFELRPTLETKSLAEVIKEDKDIDRLYNEEMKPMFDKLHEEFITDSLENVKLSVDKLVALEKSLLEKKEFRKDKKLIKEIIYELENKKEEEIVVLQKYLREEVVKLFNKKGDEWRDEKYPNLKLKDVGYKILTEARVLEILKLKNPDKKEIIEKFGNFFTYFSGFIQNRENYYSNEDKSTSVANRVINENLARFLDNKQKFEEVFKKVPQIKKFEEVFSLENYDKCLTQLGIEKFNLEIVGEINKELNLFSQQNKGVLPKAPKLKFLYKQIGCGKRIFGLFSIIVGNEWKELENLQNNKDDGKSFSQKELLEKIRKLYKFFFDKPSDYELDKIYFNKQSINTISSMWFINWHKLSELLSGKRIIKNKNKETGEYTIPKKISLADLKNILESETNVEDLFKKGKINEDEIKENKSVGVYEKLFSSNGWETFLAIWKYEINKSFQDLDNKFSEFEIKKQTKFQNLDKKERVFFIKEFCDAFLAIERMVKYHKVDENNDTDDNFYETIDLYLQETELRKYYDAFRNYLTKKPFDENKIKLNFENGSLLGGWSDGQERNKGAVILKNGDKFYLGILKDRGFFRTDKENKLYVEDSNWKRLILTNLKFQTLAGKGFLGKYGKSYGEIGKVDPLKAVSLLQEFIQKNYLTKYPKLRVISEKEYNNKKEFDKEIKEALEQSFDMHFNSINFDVLKDGVKNEKLYLFEIVNKDLVGKERKGNNNIHTLYWLEMFLDGNLQSPKLALNGGGEIFFRQGQRDKLITKIVNEKEVLDAKRYADDKFFLHVPITINYGKPKNIKFKELINNFVKENIDNVSILGIDRGEKHLLYYSLVNNNGEIIKQGSFNKIKCGNKIVDYNELLSKRAKEMMEARQSWETIGKIKDLKEGYLSQVIHEIYKLVIENNAIVVLEDLNTEFKAKRTAKVEKSVYKKFELALVKKLNHLILKEKEANELGGSLNAYQLAPYIKPGDVGKFEKAKQWGIMFYVRPDYTSQTDPVTGWRKTIYISNAETIINIKKKWKDANIKIYFDSDKKCFKFSYDKWELCAYPNLERLYWNRSEKNVDGKFGNMKKYSLHKEFECIFEGMDKSKNISDQMFDKEDFNWKSFIFYWNLLNQIRNSDKSKNENESDFIQSPIWSEKINDFFDSRKKYQIDLPENGDANGAYNIARKGIMIVDRINENPQKPDLFIKNTDWDNFSQK

SEQ ID NO: 398 - protein, 1211 aa, unidentified
  REGION 1..1211: note = Cas Enzyme sequence
MNGLNLKELTKRNKVVKSCTFELVPQGATSKTIEQSKFLNTDADWKQLISEIAPYIDAFIRNIVSCALSRVELDCSKDEMDEVKLASEINLAINSALNEKYGIYVKQIKSAKFINSVLPDFVDTLDLDENESIAVHNVLEELRGKTELVNEFLTSRVTALNTSVARRVCENFERYQENVKVFEKLQASSLWDTIVALYPNAGDFANVDSYNECITQEQIDTYNDMINGISDENGIIVKGIRGLINEYRMLEKNEKLPSPKELYKQILIPGKKAFSIICIDNDDELYDVISEASEHAVAAGKRFCDLIDNASAYDIVVQYKNLHTISHIVTGEHRTIPDAVKDVMYAAINQQIEAATTAKKRLALQKKVDDIEKALKKCDWTMDELEKISNLGIFSAYKTSAKNAYLLASGTVGTIPALTKDIRNNDAQREELKSIFNVWTEFRDLVRLVKRQTLDKGYHAFYDALDEIIFELSYMAKAETLTIAYVTRKPKDVSKKALASMGYQARMGAAWLQPDKKLSICDMTILKRDGKYYLYMLAPGVKPVNITTDKSDEYVFVQKKGQDASKALPKVTFYTASKFFEENPDAEEFVITNNVTEPVTISRELFDMKENGLFKTDAVKKGLITQEEYEKNLFEILSFYRHFMDVYTEYSKFDVQTKSDLHDYKDSGEFFTDVNAANVSSEWLPADTKKMDEMVDKGEALMFLITNRNMYSQFGKKTAYAELFLTAMSDSNMGVFLNSSPKMYFRAKSITKPIVHKKGSILVHKHDTNGNKIPKAIYDEIYKYYNNKLFATDLSQEARDYIDRGLVGKKKADTDIVKDNRYTEDKWMIQFSYTKNRTVIPASTKLNDIIRQNAANMNVLSIIRSETDLAYYMVTAPDGTVLEKQSLNIIDGRDYWSELSTISAKRKDEKSQSWNYSRQVKDQRDPYIVRAISVIARKVIEYNAIVVIERIRPEIKNRFDAMDNTVFKKFEGMLISRLADLYFSDVPAGEPGSVMNPYQLCENSGNDYQDGIVFFVSNAYTGNVDNQTGFVNIFDLGNVGTVSAKRLFLSKFDSIVYDPAQNRFVFDFDYDNFVTKTCMKKTKWSILAGGEALIFNREFKYNTYYPETASMITKIMAEKNVSLSDNLAKLAATGELPGDVTTALFDAFRRAISGVISKHEDMPKRYISPVTGEAVIYNDNAAENLTRRFRFNMAELEKDKTAREEWIDNIA

SEQ ID NO: 399 - protein, 1212 aa, unidentified
  REGION 1..1212: note = Cas Enzyme sequence
KRAESYEKVKEYIDRYHKSYIESVLSALTLSDLDSYAELYYKSGKSDADKDKLNKAEETLRKQISKALTETEGYTVMFSADIIKKILPEFLTDKEEKAVVAEFDSFYTYFIGFAENRKNMYSKEAKASAIPYRCINDNLPKFLDNAKSFNLIKAMITQDSLNKLNEDFIGLTGTTVECIFELKYFSSVLSQSGIDKYNEVIGGYTCSDGTKVQGLNEHINLYNQQVAKEDKSKHLPLLKPLFKQILSDKDSVSFIPEKFSSDDELLQTVNTFYKCSTADTESAEITIEKIRALFSEFDSYDTNAIYVSNGIAVTEISNAVFGSWNTISDGWNAEYSIAHPIKKNQNLEKYEDERRKSYKKIESFSIAELQRLGNIAKSDSSDRTIIKHLSSAVSTAVSDIRNKYIAVEKLLTEKYTAEKKLFSNDDAIALVKNFLDSIKTLERLIKPLNGSGKEEDKDSFFYGEFSPAISALASIDRLYDKVRNYLTQKPYSKDKIKLNFENPVFLSGWTTTKERNNSSIILKDEKYFYLGIMDKDSKSAFVNYPKPQGEDDILQKMCYYQIADPSKDVHNLMVIDGNTVRKTGRIDKKDNQNHILEELKETYLPKDINRIRKTRSFSVLSENFSRDNLNTFIDFYKERIFQYYAEVEFHFKPSCEYKDFSEFTNDAKSQSYHVTFSSISRKHIETLIEKGQLYLFRIYNKDLSEHSKGIPNLHTLYFKMLFDERNIKNVVYQLNGGAEMFYRKASISDAEKVVHPKNQPIKNKNPENQKSESLFSYDIIKDRRFTKRQFSLHIPITLNFKAQGISGINERVRRSLKHSDDNCVIGIDRGERNLIYICVVNSKGEIVEQTSLNEIIGDNGYKVDYRDLLDRKEKERESARQNWTSVENIKELKEGYLSQVVHKICELVIKYDAVIAMEDLNSGFKNSRIKVEKQVYQKFEKMLTDKLNYLVDKKLDPEMNGGILNAYQLTNKDYNRKGVQDGFIFYIPAWLTSKIDPSTGFTDLLKPKYTTVPAAKDYFSRFKSIIYNREADMFEFSFDYSDFPKGSQDYLNSWTICSNGERILTFRNAEKNSAWDNKTVVLTAEFKRLFKEYGIDICSDIKAAILEREEKDFFLRLTNILKLTLQMRNSITGNVDIDYLISPVRNSTGQFYDSRYSDGTLPENADANGAYNIARKALWSIDVLKNTADEDLSKAKLSITNKDWLKYAQEAK

SEQ ID NO: 400 - protein, 1213 aa, unidentified
  REGION 1..1213: note = Cas Enzyme sequence
MNIYENFTNMYQVNKTIRMGLKPICKTDENIAKFLEEDKERSDKYKIAKEIIDKENRAFIEDRLKDFSISGLDEYLELLKQKKNLTKNQNEMKKEISKQLTEVQKKMRNEISTQLEGFPKFDSKYKFRYITDKEDIKILEDFKNKKFTTYFKGFNDNRKNVYSKENISTSIGHRVVHENLPKFISNFRTLNKAIEVFGTGKINEDFKNNGINVTVEELIKIDYFNKVLTQSGIDLYNNLIGILNQNINLYNQQQKVKKNKIGKLEILYKQILSKTDKVSFIEEFTEDNQLLECINEYFKEKCSLITVDLKDLLENIDTYNLNGIFIKSDKFLGNISNYLYKDWWYISNLINEEYDYKHKNKVRDDKYYETRKKAIDKIKYFSIGHIDELLKDKNVLAVENYFKEKINLVVKEFNAYLNKFNEYKFINELKTDEIAVEIIKNLCDSIKNVQGIVKPLIVMGNDKDDSFYGDINYIWDELNKFNKIYNMVRNYLTKKDYIDEKIRLTFNNPQLLGGWSYNKESDYSSFILKDNKYYYLAIMNPNSKSKLKDLEKPENDEDTIYKMKYYQASDPAKSIPNLMVINGKTKKKNGRKVNGENIELERLRNEYLPTEINEIRKSKAYLRSSSSFSDEALIKYIDYYKERVKEYFNEIDFKFKETCEYKQFNEFAEDVNLQAYQISFIGVSKKYIKSLIDDNKIYLFKIYNKDFSENSKGIPNLHTLYFKMLFDKENLENPIYKLSGNAEMFFRKGNLDLDKTTIHHANKPINNKNPNNRKKQSVFKYDIIKNRRYTVDKFALHMSITTNFQVYENKNVNETVNRALKYCDDIYAIGIDRGERNLLYACVVNSRGEIVKQVPLNFVGNTDYHQLLAKKEEERMNSRKNWKIIDNIKNLKEGYLSQAIHIITDLMVEYNAVLVLENLNFRFKEKQMKFESNVYQKFEKMLIDKLNFLVDKKLDKNANGGLFNAYQLTEKFTNFKDMKNQNGIIFYIPAWMTSKIDPVTGFTNLFYIKYESIEKAKEFFGKFKSIKFNKVDNYFEFEFDYNDFTDRAQGTRSKWTVCSFGPRIEGFRNPEKNNSWDSREIDITEKIKNLLDDYNVSLDEDIKAQIMDINTKDFFEKLIKYFKLVLQMRNSKTGTDIDYIISPVKNKQNEFFDSRKQNEKMPMDADANGAYNIARKGLMFIDIIKETEDKNLKMPKLFIKNKDWLNYVQKSDL

SEQ ID NO: 401 - protein, 1213 aa, unidentified
  REGION 1..1213: note = Cas Enzyme sequence
MNIYENFTNMYQVNKTIRMGLKPICKTDENIAKFLEEDKERSDKYKIAKEIIDKENRAFIEDRLKDFSISGLDEYLELLKQKKNLTKNQNEMKKEISKQLTEVQKKMRNEISTQLEGFPKFDSKYKFRYITDKEDIKILEDFKNKKFTTYFKGFNDNRKNVYSKENISTSIGHRVVHENLPKFISNFRTLNKAIEVFGTGKINEDFKNNGINVTVEELIKIDYFNKVLTQSGIDLYNNLIGILNQNINLYNQQQKVKKNKIGKLEILYKQILSKTDKVSFIEEFTEDNQLLECINEYFKEKCSLITVDLKDLLENIDTYNLNGIFIKSDKFLGNISNYLYKDWWYISNLINEEYDYKHKNKVRDDKYYETRKKAIDKIKYFSIGHIDELLKDKNVLAVENYFKEKINLVVKEFNAYLNKFNEYKFINELKTDEIAVEIIKNLCDSIKNVQGIVKPLIVMGNDKDDSFYGDINYIWDELNKFNKIYNMVRNYLTKKDYIDEKIRLTFNNPQLLGGWSYNKESDYSSFILKDNKYYYLAIMNPNSKSKLKDLEKPENDEDTIYKMKYYQASDPAKSIPNLMVINGKTKKKNGRKVNGENIELERLRNEYLPTEINEIRKSKAYLRSSSSFSDEALIKYIDYYKERVKEYFNEIDFKFKETCEYKQFNEFAEDVNLQAYQISFIGVSKKYIKSLIDDNKIYLFKIYNKDFSENSKGIPNLHTLYFKMLFDKENLENPIYKLSGNAEMFFRKGNLDLDKTTIHHANKPINNKNPNNRKKQSVFKYDIIKNRRYTVDKFALHMSITTNFQVYENKNVNETVNRALKYCDDIYAIGIDRGERNLLYACVVNSRGEIVKQVPLNFVGNTDYHQLLAKKEEERMNSRKNWKIIDNIKNLKEGYLSQAIHIITDLMVEYNAVLVLENLNFRFKEKQMKFESNVYQKFEKMLIDKLNFLVDKKLDKNANGGLFNAYQLTEKFTNFKDMKNQNGIIFYIPAWMTSKIDPVTGFTNLFYIKYESIEKAKEFFGKFKSIKFNKVDNYFEFEFDYNDFTDRAQGTRSKWTVCSFGPRIEGFRNPEKNNSWDSREIDITEKIKNLLDDYNVSLDEDIKAQIMDINTKDFFEKLIKYFKLVLQIRNSKTGTDIDYIISPVKNKQNEFFDSRKQNEKMPMDADANGAYNIARKGLMFIDIIKETEDKNLKMPKLFIKNKDWLNYVQKSDL

SEQ ID NO: 402 - protein, 1214 aa, unidentified
  REGION 1..1214: note = Cas Enzyme sequence
PTFASNNDPCLGERLGLSASCIEGSHGRRRADHRAGGGGHDARQRGQATRCRLIALHGAASKFVLRPGRNTGGRGWSRLEPIPIASALGAMSWAMPVRSINLKLLIPRDDSHASLRQTLWVTHSEVNAATRYYEEQLLALRAEPYERGQTSSNQPASKVTPEEARALALSVARARQAENLRRAGSASTVVGSDDDVLAAVNDLYRKLLPEETGEGSAQDANAYLSPLTTPGSKGFAAAADKLGRPRPNWVAMPPDDPAAADAAVAWFDSAASAEWQKDTGSPAKWLRAARQNKSDWPKLFREKLEELQQKSAQGPEAVIARLQTLHLLPLFEPYFPKRMVEQVRGGVTPWDRLAFRLAVSHLLSWEAWCRRASDDRDRRIKRRDDYAAANITSDIGPLIEKIRVFETARAQELSRLGLGQAEYQLRPRQLRGWADLREAWRKAKARDAGALRTIVAEHQTRKKGKFGDPHVFLWLAEPAQHDLWSGAADVVTSVATLNAIQALVDRSRETATMTLPDARLHPRAVQWAAIGDTNLRPYRVAVDDRGIARAKLSLLGRDVSEKLVEREESFVLSPSGQMRDMRLSMRDKKQSIEFLNDGGETFTGTVGSADLLLDRRHLTRAREEEIQAGAIGPAWLKLVLDLDLNMPAGWDRKHARFRLHFLSASGSKSKAEDALRAGARVLAVDLGIRAFGACSVFVLQQARPSASAMCFEVPLADGTSMHAVHERSFHLQLPSEEPGRDGELWRRSQEEQLRRIRGCFARYRRLMRLAGAEVDVRSAVLDEIIPTLGDASTFAFESAAVDVLAVQRKSPLPIWDNAVGSLLRAYRIGLAPTIRDWRKAGRERQSFTRSGKSMWAVQHLTDVRRTLMSWSLLGRQSGEVRRLDRSGRGIFAAHLLEHIDNLKADRLKTGADLIVRASMGYVRDKAGNWLQRHAPCDVVLFEDLSRYRMRTDRPRRENSQLMRWAHRAVPGEVAMQGMLHGLEICETSAAFSSRYHARTQAPGIRCRALTRDDLGNAWLRADLEQVGIDLEVCRAGDLVPRDGGEVFACLDGGGNLVRIDADINAAQNLQRRFWTRHSTAFRLPCTLGDRNGQPIWVPRPMGKRLSGAIGGTGLLVPTGHDTGSCRWEQLKTRGAARSGSEGEEVKFGGDEEEDIAALAEEAEIESGRVEVFFRDPSGGVLPAGLWYPSKTFWGIVRARTIAALKRGLGAGGSA

SEQ ID NO: 403 - protein, 1215 aa, unidentified
  REGION 1..1215: note = Cas Enzyme sequence
MFIFAAENKRIKNFMKHQITKTLSAELKPYRNTDVDALKKIIDVDEKRYNSRKDVIKIIDERHKNFINIIRDFQLSDELSFEKLEELINKHNKDKKDKTVAKQLESMQKSICNELIGWISSKNSDEYNLLTAPTPDKIIKELIVKEPENMTIRLFDRFSSYLSDYCTARKNIYSPDNKQNSIGHRVITENFQIYVKNKNAYVKLSNDYPMIIESVEAAIQEFHDELTGFTNTGDYMKKFSVQDGITKYNAIVGEFNKVINFYIQKNPDEKKHLKYLRMKTMRKQILFDVESVFSTLPKIYNEAELKHTIKNLWEVILNNGTILDNMSALLNRLDKFDMNGIFFKKNKAGALSKKLYGDALEANRILTEKYGKKVMEKRNYFPLSDIIVQDTDVNKFFQDTKCYSTETRVCFATINSSDNIMTDDMIKYVKNFMERLNDFRRISEVIAITEDISADSDFYNNYMEYVDGISVISKAYSIVKTFVCQRPKDISRKFPLTFDYPSFMSGWDIDKLTNNVCGAAIFVKDGRIYIGVSNKNLNPDYKRLRPVKDDEPVFRMVSYKQLGNPKTQLPRLFKTDAPADILRIFDEKIDGEAYKREDMLKLVDYYKEKLQERYHDVYDFRFSETSSYKNINDFFTEVSKFTYRISFIDVSESQIDEWIDNKQLFMFVVSTKDYAPGAHGSKELFTMYLESLFSEDNMKENIIRLNGGSSIMMRPQVIDKPYKHKTGSVVLNKRDTAGNPIPEEIYVRLFNCLNGKIDRNELLKEELSYMDRVRYKKTDHEIIKDRRYTEDKFIVHLPVTINPGCEVKDNDFNIKVREQFRNGEFEHIIGIDRGERNILYVNVMDLNGNTVYEKSLNVLDGYDYQMKLTQLEKQRKDEQRNWKAVSQIKHLKEGYVGKAVHEICRLMLEYNAIVVLESLNKKFTTSRSAAFGPAVYAQFQNALLNKLSYMVLKERKPMEEGGILNGYQFAFVPKRGIGDNPKQFGRVFFVPAGYTSKIDPVTGFTSLFNFNEYESSNKKAEKFTAGFDSIRINEDNVAELKFDYSKFKTYIKWPEHKWTCVISGTRILNKKNPETGYLEHETVDVRKELDRLFDNYGKELRLDTDIKALMEDIRKEDANIDKEFVKFMKVVMHMRNSNPETGEDYIISPAVDKNGQTFDSRDERNCKFGLPVNGDSNGARNIALKELITLENEKTTGVFKSITNEEWFCGVHKFS

SEQ ID NO: 404 - protein, 1215 aa, unidentified
  REGION 1..1215: note = Cas Enzyme sequence
MKINGFIHQYPLSKTLRFKLIPYGRTLEHFTTNISLQKDEELARLYQRVKGYIDEYHRHFINEVLSSVAALDVSAYASLYYKASKDPNDKKKLENEGNALRKKIATHFSSHKNYKTLFDKDLICNILPAWVEDEEKKREIEHFHQFTTYFVGFYENRKNFYTEEAKATGIANRCINDNLPKFLDNARSYEKLTQNFSAGDLSALLADVSGLTPTPIEEFFSLDGYKNFLSQNGIESYNHIIGAVNSHVNQFNQTHGKSEFVPKFKVLFKQILCEGKHFFAIPEAFTSDNEVLGAVNDHYTTVISSIERLNDLFCGIEGYNSSGIYLRNNTAVSELSYRITGSWHSIKDAWEKEYDNSIPNKKKRNDTFYENQEKTWKNISAFSLSALQGYTGDQTLPITDYLKKRSGILFGYILDCYRKAEDLIGKPYTNKSKRLAKNDDDIALIKNLLDALKAFELFAKPFSVSADAGDKDDRFYAVFDECYNDLSDLDRLYDKVRNYITQKPYSTDKIKLNFDNSQFLNGWDKNKEKDYRNVLLRKGNDYYLGIMAKDSSRLFLTYPNEDSNGWEKIEYKYISKPFMDLPKNAFSEKYRELMNPSKEILDIRSEKTYIKDNNNISNFSLSDCHKMIEYYQNFIALYPNWVEFNLHFKSPHEYNDINEFFTDVADQGYKLSFNPISEAFIEDHVASGELYLFRIYSKDFSENSKGTPNLHTLYFKMLFDERNLNDVVIQLCGGAEMFYRYPSIKPEELIVHHKGEPIKNKNSHNTKEFSTFEYDIIKDRRYSQPQFSLHIPIKLNYKSTGKDRINAAVRKALKASDKNYVIGIDRGERHLIYVTVVDNDGNIVEQFSGNCITNEYNDCVHTTDYRELLDRKEKERLSARQNWTTIEGIKELKEGYGSQIVHKICQLVVKYDAIIAMEDLNSGFKNSRAKVEKQMYQKFEKMLIDKLNYLADKNKPVLENGGILKAYQLTEKFESFKKIHSQNGFIFYVPAWLTSKIDPTTGFVDLLNPRYTSVEDGKAFIRKFDSIVYNPSEKLFEFSFDYRNFPKGSTDFTGKWTVCSYGKRIETRRDPEANNRFISSEMDITHEWESFFKKWDIAVSENDMKEQILMHDKKDFYVGFMHLLKLTLQMRNSIPGTETDYLISPVRNRNGEFYNSTNYSSTSPLPSNADANGAYNIARKAMWMISKIKNTPDSDLKKACPPITNKEWLEFAQTV

SEQ ID NO: 405 - protein, 1216 aa, unidentified
  REGION 1..1216: note = Cas Enzyme sequence
MDYFQAKQILENDEKLKENYQKIKEIADRFYRNLNEDVLSKTRLDKLKDYAEIYYHCNTDADRKRLNECASELRKEIVKNFKNRDEYNKLFDNKKMIEIVLPKHLKNDDEKEVVASFKNFTTYFKGFFTNRKNMYSDGEESTAIAYRCINENLPKHLDNVKVFEKAISKLSKNAIDDLDATYSGLCGTNLYDVFTVDYFDFLLSQSGITEYNKIIGGYTTSDGTKIKGINEYINLYNQQVSKRDKIPNLKILYKQILSESEKVSFIPPKFEDDNELLSAVSEFYANDETFDGMPLKKAIDETKLLFGNLDNSSLNGIYIQNDRSVTNLSNSMFGSWSVIEDLWNKNYDSVNSNSRIKDIQKREDKRKKAYKAEKKLSLSFLQVLISNSENDEIRKKSIVDYYKTSLMQLTDNLSDKYKEAAPMFSENYDNEKGLKNDDKSISLIKNFLDAIKEIEKFIKPLSETNITGEKNDLFYSQFTPLLDNISRIDILYDKVRNYVTQKPFSTDKIKLNFGNYQLLNGWDKDKEREYGAVLLCKDEKYYLAIIDKSNNRILENIDFQDCDESDYYEKIVYKLLTKISGNLPRVFFSEKHKELLSPSDEILKIYKNGTFKKGDKFSLDDCHKLIDFYKESFKKYPKWLIYNFKFKKTNEYNDIREFYNDVALQGYNISKMKIPTTFIDKLVDEGKIYLFQLYNKDFSPHSKGTPNLHTLYFKMLFDERNLEDVVYRLNGEAEMFYRPASIKYDKPTHPKNTPIKNKNTLNDKRASTFPYDLIKDKRYTKWQFSLHFPITMNFKDPDKAMINDDVRNLLKSCNNNFIIGIDRGERNLLYVSVIDSNGAIIYQHSLNIIGNKFKGKTYETNYREKLATREKDRTEQRRNWKAIESIKELKEGYISQAVHVICQLVVKYDAIIVMEKLTDGFKRGRTKFEKQVYQKFEKMLIDKLNYYVDKKLDPDEEGGLLHAYQLTNKLKSFDKLGTQSGFIFYVRPDFTSKIDPVTGFVNLLYPRYEKIDKAKDMISRFDDIRYNAGEDFFEFDIDYDKFPKTASDYRKKWTICTNGERIEAFRNPAKNNEWSYRTIILAEKFKELFDNNSINYRDSDDLKAEILSQTKGKFFEDFFKLLRLTLQMRNSNPETGEDRILSPVKDKNGNFYDSSKYDEKSKLPCDADANGAYNIARKGLWIVEQFKKADNVSTVEPVIHNDKWLKFVQENDMANN

SEQ ID NO: 406 - protein, 1216 aa, unidentified
  REGION 1..1216: note = Cas Enzyme sequence
LENDESKAADYPVVKKLIDEYHMVCILESMKNVHLDWAPLKEAIEDYQKTKSDEAKKRLEAEQTMMRKQIAAAIKDFKHYKELTAATPSDLITSVLPEFSDNEALKSFQGFASYFIGFQENRNNIYSPDAISTGVPYRLVHDNFPKFLSNLEVYDKIKATCPEVIQQASEEMRPFLEGVLIDDIFSLDFYNSLLTQDGIDFFNRVIGGVSEEGKQKYRGINEFSNLYRQQHKELAVSKKALTMMPLFKQILSDRDTLSYIPAQIETEEELVASIVQFYEHITHFERDGKTINVLNELVALLSKIDTYNPDGICVTANKLTDISQKLFGKWSVIEEKLKEKAVQQFGDISVAKNKKKVDAYLSRKAYCLSELCFNNDNNFSHYYSELPQTLNAICGYWMQFNEWCKSDEKQKFLNNPTGTEVVKSLLDAMMEISHKCSVLVMPEEYEVDKSFYNEFIPLYEELDTLFLLYNKVRNYLTRKPSDVKKFKLNFETPSLADGWDQNKERANKAILLFKDGLSYLGIMNAQNMPNLNQKWSADESHYSKMVYKLIPGPNKMLPKVFFSKKGLDTFNPSRHILRIKEEETFKKGSPNFKLADLHDLIDFYKDAINRHPDWSKFNFQFADTNAYEDIAGFYRDIANQAYKITFSDIPAWQISDWIDNGQLYLFQLYNKDYAEGAHGRKNLHTLYWENLFTDENLSNLVLKLNGQAELFCRPQSIKKSVSHKMGSKMLNRRDKSGMPIPESIYRSLYQFYNGKKKESELTAAEKQYVDQVVVKDVTHEIIKDRRYTKQKYFFHVPLTFNANADGNEYINENVLNYLKDNPDVNIIGIDRGERHLIYLTLINQRGEILKQKTFNVVNSYNYQAKLEQREKERDEARKSWDSVGKIKDLKEGFLSAVIHEITKMMIENNAIVVLEDLNFGFKRGRFKVERQVYQKFEKMLIDKLNYLSFKDREVGEEGGILRGYQMAQKFVSFQRLGKQSGFLFYIPAAYTSKIDPVTGFVNHFNFNDITNAEKRKEFLMKMERIEMKNGHIEFEFDYRKFKTFQTDYQNLWTVSTFGKRIVMRIDDKGYKQMLDYEPTKDIINAFKNKGLQLTEGSDLKAMIADIEANAANASFFSTMLYAFQKTLQMRNSNAATEEDFILSPVARDGHYFCSTDEANKGKDAEGNWVSKLPVDADANGAYHIALKGLYLLRNPETKKIENEKWLQFMVEKPYLE

SEQ ID NO: 407 - protein, 1216 aa, unidentified
  REGION 1..1216: note = Cas Enzyme sequence
MQEELAKISQIKTKGVIMGAIEEFVSNTPQFAGYTVNKTLSVGLRPVGKTRENIEQYKLLEKDKERAKAFLRVKKYLTKVHGIYIGDRLTAYSFEPEEVKNLWNLYDAWKHAEKKDRKAAKKEYEKAQEDARKKIAKFLTADTMYSKLFKAEVLTDVLPGYFSGVQETADIKLFIGFFTYFGNYNIAKRKMYDYNNKGTVSYRVVNDNITLFFDNQNILSAIKNYPELYKENAFQKLEKIYADTFKASSAFIGEYNLCISGVFDEEGNNIEKGVNQLINEYCALNKGVRIAYLKPLYKNILSEKKPLFTVDVFETTEEVTDEVKTFEESIEKPYSKFVSYINSDSYSYSGIYIAKKNLNTFSHFISGDPFIVEYAVKDKYKKEYGERDCFSIAEIIESVKEYNEINEKTADCNFERYFNVVKTFKPELYFSKIPFEKITDLQFDKTQAVELKEYLQTLLDHYNTVRMVKVYSQDDDNYKPDEKFYFELDTLIDAYKPIVKLYNKIRNFVTKKLSSEKSIKMNFDCPQLLDGWDYAVEKTKNGMMFYDSENDVYYLGIYNAKTKKPDFEICEDSKFKKMYLKMIPEPYKMLPHVCFSQKGIETFKPSEEILEGYKKGLHKKGSDFDINFCHKLIDFYKDCIAKREEWNVFNFKFSPTETYADTSAFFEELSKDAYNVELHGIDRAKLDAAVEEGSVYLFELYNKHLDKKAHGKNLYTQIIRSLFDKNCNNIQLCAGAEIFWRPALIKKNITHPKGSVIVNKVSKEGFTIENEVWFNIYKYLNHFTDHLTPEAKTLLDSGSVVYKNADRDLIKDRRYTEENFSLHFPVKINQKAGDMFAYEFNKKVLETVRNDKTVNILSINRGENNLIYAVLMNRNGEVIFDKSFNLIESGKQNVNYKNKLVVKSKERNAARTNWQEIDGIKDLKKGYLSCVVAEIARLIVKNNAILVMESLDTTFKSSRQYIESNVYQQFEAAILDKLSCLILKENDADSAGGLYHPYQLVPKFQSFEKIFLQWGFVFFINSAYISKIDPANGIANIFNFAELTNNEKRINFFKKMDSIKIENNHINFEYNLEGDFKGKQTVSAIGERNVWNPKEKTFERISLEKIAEELSDKNGNATDLLSYIKNEKPLPAFTEKLLKAFIATVSFKTFTLDEWTYVSPDNKTNQFTGKSMDYIGAYNLGNKFRIMLERDNGDGFLNNIKASEYFAELLNIIQKN

SEQ ID NO: 408 - protein, 1220 aa, unidentified
  REGION 1..1220: note = Cas Enzyme sequence
MKDLKRFIGIYPVSKTLRFELRPVGKTLEWIEKNKVLESDEQKAEDYPKVKTLIDEYHKVCIRESLKDAHFDWMPLRLALEKYQKSKSDEDKAALEKEQAVMRKQIATAIKEFRHYKELTAPTPQKLIDNVFPGIYESDALKSFNRFSVYFRGFQENRNNIYSAEAISTGVPYRLVHDNFPKFLADIEVFGNIKANCPEVIEQAATELQPILEGVMFEDIFTIDFYNSLLTQDGIDFFNQVLGGTAEEDKQKYRGINEFSNLYRQQHPELTAKKKALTMIPLFKQILSDRDTLSYIPQQIESEQQLIDLLNLFYSHITAFDHNGKTVDVLIELTKLTGRINDYNPDGIYLSAKSLTVASQKLFSKWSVITDRLYEQAIKRFGDVSVAKNKKKIDAYLSQDAYALSEIPLDDDHSLSMFFAELPQTIEIISSYWLQFKEWCKGEGKQLFLNNADGTEIVKKFLDSIMEILHKCSVLVVSVEHDLDKDFYNDFLPLYAELENVIIVYNRVRNFLTKKPSDTKKFKLNFGVPSLGDGWDQNKERDNKAIILFKDGKSYLGIMNAKDMPMIKERNESTPSSYKKMIYKLLADPAKDFPHTFFSKKGIDTYHPSRYILDGREQGKYKKGETFDKKFMRVFIDFYKDAVAKHPIWSKFNFVFSPTESYEDIGAFFSEVSKQAYKIRFSYVEESQINEWINNGQLYLFQLYNKDYAEGARGRKNLHTLYWESLFSPENLSNIVLKLNGQAELFYRPQSIKQPVIHKMGSKMLNRRDKSGMPIPEAIYRSLYLYFNSKKTESELTLVEKSYLDQVVVKDVTHEIVKDRRYTKPEFFFHVPITFNVNADGNEYINEQVLEYLKDNPDVNIIGIDRGERHLIYLTLINQRGEILKQKTFNMVGNYNYHAKLEQREQERDQARRSWQSIGRIKELKEGFLSAVIHEITMMMIENNAIVVLEDLNFGFKRGRFKVERQVYQKFEKMLIDKLNYLSFKDRKTDDAGGILRGYQLAQQFTSFQRLGKQSGFLFYIPAAYTSKIDPVTGFVNHFNFNDITNAEKRKAFFMKMERIEMRNGDIEFEFDYRKYKTYQTDYQNIWTVNSSGKRIVMRLDENGRKKMTDYYPTQEIVRAFKEKGMLLNEGADIKALLADIDASPMNASLYGVMFYAFQKTLQMRNSNSTTEEDYILSPVAQNGKQFNTDTEANKGRDTNGIGFQNSLLMPMPMVHTTSH

SEQ ID NO: 409 - protein, 1221 aa, unidentified
  REGION 1..1221: note = Cas Enzyme sequence
MNTLKDFTNLYQLSKTLRFELKPVGKTLEHIQNSGILENDEHRAESYILVKKIIDEYHKHFIEDSLEDLKLDSNDLSEYYLYFQIRNREESQQKAFGTVKSKLRKQISKSFDTKRLFGKELIREDLLGFITEETDKQLVQEFKNFTTYFTGFHKNRKNMYSSEEKSNTIAYRLIHENLPKFINNMTIFDKIKQPLANNLQTLYNGFNEYLNVREIAELFTLDYFSKVLTQKQIDVYNLMIGGKTLENGTKLQGLNEYINLYNQQQTDRNARLPKLTPLFKQILSDRETISWLPEMFANDNELLESIEKVYQEIPFGEIKSIIEKLHEYDLPKIYVRNDLGLTDISQHLLGNYAAIPNAIKENIKQSNPQKGTEQQENYEERINKLFKSRGSFSIDLINKVIPEKSLVTYFKNCNKTEENPDLLNRIQNCYLQVKNLLNTDYPAEKSLKQDKQNIEKIKQLLDSIKEFQRFIKPLLGKGDEANKDAIFYVEFEKLWHELDRITPLYNMVRNYVTQKPYSTEKIKLNFENSTLLNGWDVNQERDNISIILRKGELYYLAIINKKNNTIFLKENTPSTGNCYEKMEYKLLPGANKMLPKVFFSESRIDEFKPSKQLLENYNNETHKKGEKFNLEDCRNLIDFFKQSINKHEDWKNFGFQFSDTSTYQDLSGFYREVEQQGYKITFRNISEDYINQLVEEGKLYLFQIYNKDFSPFSKGTPNMHTLYWKMLFTPENLQNVIYKLDGQAEVFFRKKSLNYTDETWQKGHHYDKLKNKFAYPIISKRRYALDKFQFHVPVTMNFKAVGNERINELVNQFIKNNGIEHIIGIDRGERHLLYLSLIDLNGKIVKQFSLNEIGNEYKDNIYKINYRDLLDKKETERDDARKSWNEIETIKELKEGYLSQVIHKITQLIIEYKAIVVLEDLNFGFMRGRQKVEKQVYQKFEKMLIDKLNYLVDKKKQVADEGGLLNAYQLTNKFESFKKEGKQNGFLFYVPAWNTSKIDPVTGFVNLFNVKYESVSKAQEFFKKFDCIRFNQIDDNNCRFDFYFDYKNFTDKAEGSQTKWTLCSSNDTRYRWNKSLNQGKGAQEEVKVTEALKLLFSDKDYNIAYGDGKDLRERISNQTSAKFFKELMSLLSTLLSMRHNNGKKCDEEQDFILSPVEPFFNSLHATDEHPKDADANGAYNIARKGLWVLQQIGKATDLKKVELTVKNKEWLRFAQNKNTQS

SEQ ID NO: 410 - protein, 1222 aa, unidentified
  REGION 1..1222: note = Cas Enzyme sequence
LIPQGETEQMLRLRKMIETDQKRAEEAALVKKMIDRYHKAFIDKCLAELNLQGVEEYADLYFAQQKSDEQFTAMDELASDMKKQISHCFTSQPEFKSLFGKEMIKKILPAFVEKNEAEVVDHFSRFTTYFINFNSIRQTLYTAEGRACEVAERVIAQNLPRYLDTCRAGTQILTSLDPEKIELLSSVFANVFQIDVCSIFEPAYFRSFINQTGIDIYNQILGGVTLKDGTKIFGLNELINIYNQQHKDCPKLPKLQPLYKMLLSDRSTLSFIPDKFESDNQLLNAIHAFLSEKDENTGLDAKDCFTSIASLLQCLNDFDLEHIYVSASSVADLANSLYGDWAFLQKGMYALYDAEHTDKEHEKASYAEKRQKALKACKSFSVSELQNAATAANSAGKDLTDIPVYIKAKAQEALLDFELKLSQAYELISQPYEGKKGLRNNKSATAQIKDLLDAMLELQHIAKIFEGSGREEDKDELFYGDFKPMLDQCSELIPLYNKVRNYMTSKPYTTEKFKLNFNTGDFLSGWAQKMDRKAAMLAEKDGKYFLMIFDDKLPASDQALLLSENNEAPATLLQYMFQKPDMKTTPRLFIRTKADRFSPAIEELNLPIQDVIELYDKGLFKREYAKIDPAGQLDALHKLIDYFKIGFSRHPSYQQFDIKWRDTEEYTSIDQFYRDTIRCCYQIQKAPLNWAYLLDLVKEGRAYLFQIYNKDFSEHARGRENLHTLYFRMLFDERNVAKICFQLNGGAEIFFRPASISMDDAVVHPANQPINNKNPLNPKKTSTYSYDIIKNKRYTRDQYELHIPITMNFSYEGTEHINRKVREVLRNEKETYVIGIDRGEKNLLYICVVDSQGRIIEQKSLNQIIVEQTTGGQCVTDYHDLLKRREGERQKARQSWNSVEDIKNLKQGYLSLAVSEICRLAVKYDAVIAMEDLNAKFKNSRAAIESATYQQFEKQLISKLNFLADKRLEPEELGGVLNAYQLTEKFESFQSMGKQNGFLFYMSPWMTSRIDPVTGFVNLLRPRYENSSKAKEFFASFDSICFDEAKNLFVFKIDLDRFLNTEVSPRRKWTLASFGQRIEQTQNREGKWCSHSVDLTEEFKALFKEYKVDMSAHDLIKQILEVNEAWFYKELIRLTALMLQMQNSEIGTDEEYLISPAMDENGNFFWSRTASGDLPQNAAANGAYNIARKAQWALRQIRSANDEEFMKAPIVPKNADWLASIQ

SEQ ID NO: 411 - protein, 1222 aa, unidentified
  REGION 1..1222: note = Cas Enzyme sequence
MKEFTNLYKLSKTLRFELKPIGKTLENIEKSGILEQDKQRAKDYKKVKKLIDEYHKHFIEESLKNIKLDDYSLEEYCKLYTTREKDDNQKKSFKTVGDRLRKQIVKQFKDSKSEKLFSKELIEEELPKFFEGEEDNKELIRKFDKFTTYFTGFYENRENMYSDEEKSTAIAYRLINENLPKFINNLYVFEKIFNSEVAKHLQTLYKDIEEYLNVDNIADIFQLNYYSNILTQTQIDVYNLIIGGKTLEDGTKIKGLNEYINLYNQQQSEKSKKLPKFVVLFKQILSDRVSSSWLPEKFENDNEMLQGLREAYSKMEESILNLRELLRNINDFDLSKIYLCNDISLTDISQKLFGDYSKIINAVKDEIKEKNPLKKNENQENYDERINKLFKDNNSFSIKDINDYVKEKSLADYFINLGRNDEQEDLFMQIEKKYSVVEVLLNTPYPSEKSLIQDKKSIEFIKEFLDSIKNLQHFVKPILLNGDEADIDTGFYSEFEKSWAELDKITSLYNKVRNYVTQKPYSIEKIKLNFENSTLLAGWDLNKEKDNTSIILRKAGIYYLAIMDIDNRKVFETAEADGIGCEKMEYKLLPGANKMLPKVFFSDSRIKEFNPSEKLLENYNKETHKKGDNFNIADCHALIDFFKVSINKHDEWKNFNFKFSDTKTYQDLSGFYREVEQQGYKITFRNISEAYINKLVEEGKIYLFQIYNKDFSEFSKGTPNMHTLYWKALFDENNLNDVVYKLNGQAEIFFRKQSIKNENKIIHKANEAIDNKNKDNAKKQSIFNYDIIKDKRYTIDKFQFHVPITMNFKAIGNERINETVNKFIKDNGIGHIIGIDRGERHLLYLSLIDINGNIVQQFSLNEIINEYNGNSYKTNYHDLLEKRESERDKSRKSWQTIETIKELKDGYISQVIHKITQLMIEYSAIVVLEDLNFGFKTSRQKVEKQVYQKFEKMLIDKLNYLVDKKKNKNELGGLLNAYQLTNKFESFQKIGKQNGFLFYIPAWNTSKMDPVTGFVNLFDTRYTSIEKSKEFFEKFEDIKFNADKNYFEFFVDDYTKFTPKAEETRPNWTICTNGERIETFRNKDKNNKWDSKEIVLADSFIDLFKKYGINYKSELKQQIINQNEKTFFEELLYLFRLTLQMRNSITGKETDYLISPVADKTGNFFDSRNNKTNLPTNADANGAYNIARKGLWVIEQIKKAANLKKVNLAISNKEWLQFTQNK

SEQ ID NO: 412 - protein, 1223 aa, unidentified
  REGION 1..1223: note = Cas Enzyme sequence
MGKSIFSEFTSLYSLTKTLRFELKPVEGTKSLKEVIEQDKKIDKYYNEEMKPMFDKLHEKFINESLHEVNLPIEYIEKLYHFFLELRSLNKDKKKNLDKILKIEGEKGEMVLLQKKLRVSVVDCFDQFAKKWQEDFLKEISFKKNNHEFLKEESVLDLLMALFPEKESIIKEFKGFFTYFSGFNQNRENYYSSDAKATSIANRIVNENLYRFFDNCFKYREFLANNAVFLDFGSIFELSFFNKCLSQKNIENYNNVIGELNKSVNLYSQKNPGIFKTTLKFKELYKQIGCGKKKLEIFEIVKGKEWDLLSSLFENQLGKSGEFLLEKGQKFYENFFKNIDRFDLNKIYFNKSSLNTISDLWFANWHKLSDVLRESGILKKDKNYKLNGESSIPREISLFELKEALLNQTEVESIFKEGVVYEGETVGRYRLLFKSNAWDTMISIWKFEIERNIDIIKKLYLQFGEKKQKSFDIKNDTKFVKEVCDAFLGFERMVKYHKVIDTNETDDLFYDFIDQYFERSVLLKYYNAFRNYLTKKPYSKEKIKLNFGSGHLLSGWSRDFGTYSALIFKKDSEYFFGIVNGTKFSEEELKSLYGNVEEEKQAERLVYWVQKIDNKNPPRWFIRSKKTNFAPLVREGVLDPSSIIDIYDKKLYSKSDNKLEYRRYLPKLLDYFKEGFLKHPDFINFRDNFIWNNSNDYDSVVEFYEHTANMCYKIDWEKINFDGLLELSKNNRIFLFKIHNKDFSKYSTGQKNLHSLLFLELLKKENVLSLKLLGNGEIFFREKSIDKNLKINKKSHKVFVNNRFTEDRVFLHFPVEIKSKNKPKRINELISNSNNVNILGIDRGEKHLLYYSLVDSNGKLLKQGSFNKIKCGDKIVDYHDLLSKRAEAMKDARVDWATIGSIKELKEGYLSQVVHEIYKLVLDNNAIIVLEDLNSEFKAKRTAKVEKSVYKKFELALARKLNHLILKDKKTLDEGGVLNAYQLTPPINAGDVSKFEKAKQWGIMFYVRANYTSTTDPLTGWRKTIYISNSDSIDVAKKKWKDSKINISFDSDKNCFVFSYDKWSLFSYEGLERLYWNRDEKNLEGKMGVMKRYNLFEEFNKLFAEVEGNINDFIFKSDKFSWKSFIFFWNLLNQIRNSDKNRVGDDSDFIQSPVWSEKHKMFFDSRKIQNENLPKNGDANGAYNIARKGLMLLDRINEKPEKPDLFISDVQWDGFAQNNGGVL

SEQ ID NO: 413 - protein, 1223 aa, unidentified
  REGION 1..1223: note = Cas Enzyme sequence
MKKIDNFVGCYPVSKTLRFKAIPIGKTQENIEKKRLVEEDEVRAKDYKAVKKLIDRYHREFIEGVLDNVKLDGLEEYYMLFNKSDREESDNKKIEIMEERFRRVISKSFKNNEEYKKIFSKKIIEEILPNYIKDEEEKELVKGFKGFYTAFVGYAQNRENMYSDEKKSTAISYRIVNENMPRFITNIKVFEKAKSILDVDKINEINEYILNNDYYVDDFFDIDFFNYVLNQKGIDIYNAIIGGIVTGDGRKIQGLNECINLYNQENKKIRLPQFKPLYKQILSESESMSFYIDEIESDGLLLELLKASLINDSAINKAINELKELFNNISEYDSNGIYVNNGIPITTISNDVYGQWNTISNAWNEKYDSLSNARDKESEKYFKKRRKDYKKIQSFSLSELQELGDKDVNICKKIDTLVSEMIDEYKLNVESIQYLFDITEFEKPLATDIKKVEQIKNALDSLKRVEKYVVPFLGTGKEENRDEVFCGELTRCIDVIKEIDSVYNKTRNYLTKKPYSKEKFRLYFENPQLLDGWDINKESDYRSTMLRKDGKYYIAIMDREFSSCLKNVLPGDDNYQKMVYKQIQNAANYLSTKQILPQDPPKEIVNILAKKKKDFTSLKRQEINTLIDYCANDFLFNYEKIRDKNGECYFDFNFKDSTEYETLKYFYNDVERQAYSIGYEEISSEVVNQLIDEGKLYLFQLYNKDFSDKSHGTPNLHTMYFKALFDEKNNGNIRLNGGAEMFMRRASLNKKDVVVHKANQPIKNKNMLNLKKTTTLPYDIYKDKRFTEDQYEVHIPITMNKVPNNPYKINHMVRELLAKDDNPYVIGIDRGERNLIYVVVVDGQGHIVEQLSLNEIINENNGISIRTDYHALLDAKERERDKSRKQWKQIENIKELKEGYISQVVHKICELVEKYDAVIALEDLNSGFKNSRVKVEKQVYQKFEKMLITKLNYMVDKKKDYNKPGGVLNGYQLTTQFESFSKMGTQNGIMFYIPAWLTSKMDPTTGFVDLLKPKYKNKADAQKFFSQFDSIRYDNQEDAFVFKVNYTKFPRTDADYNKEWEIYTNGERIRVFRNPKKNNEYDYETVNVSERMKELFDSYDLLYDKGELKETICEMEESKFFEELIKLFRLTLQMRNSISGRTDVDYLISPVKNSNGDFYNSNDYKKEGAKYPKDADANGAYNIARKVLWAIEQFKMADEDKLDKTKISIKNQEWLEYAQTHCE

SEQ ID NO: 414 - protein, 1223 aa, unidentified
  REGION 1..1223: note = Cas Enzyme sequence
VLYMSKLYSEMHNLFQVSKTLRFELKPIGKTKEYFEEYILNKDEEKAEIFKKVKKYCDEYHKHFIEECLKDFENEDFKQLLNNYINLYSNNSKNEKEEKEFENIKKELRKMISAQFKKNDLYKGLFGKEIIKNYLKDYYRENDEILNEVSLFDDFTTYFTGYNQNRENMYSEEEKHTAIAYRLIDENLPTYIKNIKAFGIILNEIPDIKKQIQDNLNLDTEKYFTNIKNYTHTISQKQIEEYNLAISGKSEEKNKIQGINELVNLYNQKNKTKLPKLKELYKQILSDSTSTSFVLDLLQNDKEIIDSINLYYKIFEKEILNKDEFKETLSNINKYNLEQIYINNDLSLTALSKDVYGDWAYIQELLEKEWESNYTGKAKKGTDKYTEAKEKDLKKIKELSIAKIDELIKKYETEDKKIGKIVEHYKNELPKLFKQVNEKYSECKNVLEKNYEENSNELLKDKNAIEKIKDLLDSIKSVQEFVKLLIPRNKALETDSSFYNNLNYNTLTEIIPLYNKVRNYLTKKPFSTEKFKLNFDCPTLLSGWDLNKEEANLGTLFEKDGNYYLGIINKDNRKIFSSYKNNSDNNSYKKIEYKLLPGPNKMLPKVFFSTSRIEEFNPSDELLSKYNKGCHKKGSDFDLSFCHELIDFFKSSIQKHEDWSKFNFNFSKTSTYEDISQFYKEVEHQGYKITYTDISSEYIDKLVDEGKLYLFQIYNKDFSKYSKGKPNLHTLYWKAIFDEDNLKDVVYKLNGGAEIFYRKKSIEGKVTHPKNQPIDNKNPNNPKKQSTFEYDLIKDKRYSLDKFMFHVPITLNFKAIGENKLNDRIKSEIKKFDDVHIIGIDRGERHLLYITVINSKGEIVEQCSLNKIGIKHETDYHELLDRKEKERDNARKSWGTIENIKELKEGYMSQVVHKIVELMFKYNAIVVLEDLNSGFKNSRKKVEKSVYDKFETMLVNKLEYLVNKDVQGKFEQGGVLNAYQLAKRDIEGRQNGVIFYIPAWCTSKIDPITGFVNLFDTKKINTEFVEKFDNIRFNEKENYFEFDFDYTNISDKSCGKRKSWTICSYGERIRTFRNPHKNSEWDNETVKLTYEFKNLFDRYGIDYKNIKEEIISKSNSQFFNAVKEKDGFYGFGMLFKLLVQLRNSITGDMEDYILSPVKNKQGYFYDSRNCSDKLPKDADANGAYNIARKGLILVQRIKESTKDKIDYSIKNEDWLNFVQEKDK

SEQ ID NO: 415 - protein, 1224 aa, unidentified
  REGION 1..1224: note = Cas Enzyme sequence
MKKIDSFINQYSISKTLQFSLIPQGKTLDNFTKKNVISEDSKRSEEYKKVKKIIDRYHKDYIDRVLGTLDEFDISEYKELYFKSNKTDNDKKKIEELESKYRKLISDKLTKNPEYKILFSKELITEALPEFVEKNEEKESVSEFDKFSTYFRGFYENRKNMYTDEEKSTGIAYRCINDNLPKFLENTRIYEQIKEQIDINALNSDFECLIGRRIDDFFDYNNFCIVIQASGIDRYNEIIGGYTTSDGKKIKGINEIINAYNQKNSKSGIRLPKMKFLYKQILSDRETISFIPETFDSDDDSEVLSQIKTYYTDNISAAVTEIENIFNELDLYNPDGIFLKNGPAVTNFSNRFFGNWNVIREKWNEEYDRGKKIKDYEKYSEKRNAEWKKKDSFSFKELQRYIDICGDADYNSVNEFYKTIINECSTKISSAYSEAEFLLSNTYNKKKRLSKNDDDIAVIKNLLDAIKELESFIKPILGTGKEENRDNVFYGSFEEWFAKFHDFDKFYDKVRNYITKKPYSKNKIKLNFNNPQFLGGWDRNKESDYSSVLLKKEQCYYLAIMDYAHRDYFKLNVDPKDSNDVASKIVYKQIPSASKYFSSKQINPQNPPENIKKYLHKDFDKKTMTKEQLTELIKYVAEDFIPNYPMLRDEDGNLYFDYKFKKYSEYDSWNDFMKDIEPQSYNLKYKDISWEYVIDGVEKGDVYLFRIYNKDFSPYSKGTPNLHTLYFKMLFDKENLENVVYKLNGGAEMFYRFPSIKDEEKIVHRKNQPIINKNPNNNKKESVFEYDIIKDKRFTEPQFSLHIPIELNFNAIGNERVNSNVRSELKKCEKNYVIGIDRGERHLLYITVVNDEGEIVEQFSANRIGIDDKRFVDYHKLLDEKERERNEARQKWTTIENIKELKEGYISQIVHKICQLVVKYDAVIAMENLSSGFKNSRCKVDKQVYQKFEKMLIDKLNYYVDKNKSPNENGGLLNAYQLTEKFESFKKMGNQNGFIFYVPAWLTSKIDPQTGFVDLLKPKYHSVENSVDFISRFEKIRFNESENYFEFSFDYENFPKGTTDFRKKWTICTNKDRILTERNTEEANGNYISKKIILTDEFVKLFEKYGIDYKSDNLKKLITEQDKKEFFERFMKLLRLTLQMRNSITGTEEDYLISPVMNSEGKFYDSREYDNDSKLPANADANGAYNIARKALWAIDAFKTTEEEKLMKSKISISNKEWLEYAQK

SEQ ID NO: 416 - protein, 1224 aa, unidentified
  REGION 1..1224: note = Cas Enzyme sequence
MSKIEKFIGKYKISKTLRFRAVPVGKTQDNIEKKGILEKDKKRSEDYEKVKAYLDSLHRDFIENTLKKVKLNELNEYACLFFSGTKDDGDKKKMEKLEEKMRKTISNEFCNDEMYKKIFSEKILSENNEEDVSDIVSSYKGFFTSLNGYVNNRKNLYVSDAKPTSIAYRCINDNLPKFLRNVECYKKVVQVIPKEQIEYMSNNLNLSPYRIEDCFNIDFFEFCLSQGGIDLYNTFIGGYSKKDGTKVQGINEIVNLYNQKIKKDKEKYKLPQFTPLFKQILSDRDTKSFSIEKLENIYEVVELVKKSYSDEMFDDIETVFSNLNYYDASGIYVKNGPAITHISMNLTKDWATIRNNWNYEYDEKHSTKKNKDIEKYEDTRNTMYKKIDSFTLEYISRLVGKDIDELVKYFENEVANFVMDIKKTYSKLTPLFDRCQKENFDISEDEVNDIKGYLDNVKLLESFMKSFTINGKENNIDYVFYGKFTDDYDKLHEFDHIYNKVRNYITTSRKPYKLDKYKLYFDNPQLLGGWDINKEKDYRTVMLTKDGKYYFAIIDKGEHPFDNIPKDYFDNNGYYKKIIYRQIPNAAKYLSSKQIVPQNPPEEVKRILDKKKADSKSLTEEEKNIFIDYIKSDFLKNYKLLFDKNNNPYFNFAFRESSTYESLNEFFEDVERQAYSVRYENLPADYIDNLVNEGKIYLFEIYSKDFSEYSKGTNNLHTMYFKALFDNDNLKNTVFKLSGNAELFIRPASIKKDELVIHPKNQLLQNKNPLNPKKQSIFDYDLVKDKRFFENQYMLHISIEINKNERDAKKIKNINEMVRKELKDSDDNYIIGIDRGERNLLYVCVINSAGKIVEQMSLNEIINEYNGIKHTVDYQGLLDKCEKERNAQRQSWKSIENIKELKDGYISQVVHKLCQLVEKYDAIIAMENLNGGFKRGRTKFEKQVYQKFENKLINKMEYMADKKRKTTENGGILRGYQLTNGCINNSYQNGFIFYVPAWLTSKIDPTTGFVDLLKPKYTNVEEAHLWINKFNSITYDKKLDMFAFNINYSQFPRADIDYRKIWTFYTNGYRIETFRNSEKNNEFDWKEVHLTSVIKKLLEEYQINYISGKNIIDDLIQIKDKPFWNSFIKYIRLTLQMRNSITGRTDVDYIISPVINNEGTFYDSRKYLDEITLPQDADANGAYNIARKALWIIEKLKESPDEELNKVKLAITQREWLEYAQINI

SEQ ID NO: 417 - protein, 1224 aa, unidentified
  REGION 1..1224: note = Cas Enzyme sequence
MQLNPVGKTMDYFQAKQILENDEKFKEDYQKIKKIADRFYRNLNEDVLSKTGLDKLKDYAEIYYHCNTDADRKRLDECASELRKEIVKNFKNRDEYNKLFNKKMIEIVLPQHLKNEDEKEVVASFKNFTTYFTGFFTNRKNMYSDGEESTAIAYRCINENLPKHLDNVKAFEKAISKLSKNAVDDLDTTYSGLCGTNLYDVFTVDYFNFLLPQSGITEYNKIIGGYTTSDGTKVKGINEYINLYNQQVSKRYKIPNLKILYKQILSESEKVSFIPPKFEDDNELLSAVSEFYANDETFDGMPLKKAIDETKLLFGNLDNSSLNGIYIQNDRSVTNLSNSMFGSWSVIEDLWNKNYDSVNSNSRIKDIQKREDKRKKAYKAEKKLSLSFLQVLISNSENDEIREKSIVDYYKTSLMQLTDNLSDKYKEAAPLFNESYANEKGLKNDDKSISLIKNFLDAIKEIEKFIKPLSETNITGEKNDLFYSQFTPLLDNISRIDILYDKVRNYVTQKPFSTDKIKLNFGNSQLLNGWDRNKEKDCGAVWLCKDEKYYLAIIDKSNNSILENIDFQDCDESDCYEKIIYKLLPGPNKMLPKVFFSEKCKKLLSPSDEILKIRKNGTFKKGDKFSLDDCHKLIDFYKESFKKYPNWLIYNFKFKKTNEYNDISEFYNDVASQGYNISKMKIPTSFIDKLVDEGKIYLFQLYNKDFSPHSKGTPNLHTLYFKMLFDERNLEDVVYKLNGEAEMFYRPASIKYDKPTHPKNTPIKNKNTLNDKRASTFPYDLIKDKRYTKWQFSLHFPITMNFKAPDRAMINDDVRNLLKSCNNNFIIGIDRGERNLLYVSVIDSNGAIIYQHSLNIIGNKFKGKTYETNYREKLATREKDRTEQRRNWKAIESIKELKEGYISQAVHVICQLVVKYDAIIVMEKLTDGFKRGRTKFEKQVYQKFEKMLIDKLNYYVDKKLDPDEEGGLLHAYQLTNKLDSFDKLGMQSGFIFYVRPDFTSKIDPVTGFVNLLYPRYENIDKAKDMISRFDEIRYNACEDFFEFDIDYDKFPKTASDYRKKWTICTNGERIETFRNPANNNEWSYRTIILAEKFKELFDNNSINYRDSDDLKAEILSQTKGKFFEDFFKLLRLTLQMRNSNPETGEDRILSPVKDKNGNFYDSSKYDEKSKLPCDADANGTYNIARKGLWIVEQFKKSDNVSTVEPVIHNDKWLKFVQENDMANN

SEQ ID NO: 418 - protein, 1224 aa, unidentified
  REGION 1..1224: note = Cas Enzyme sequence
MSKIEKFIGKYKISKTLRFRAVPVGKTQDNIEKKGILEKDKKRSEDYEKVKAYLDSLHRDFIENTLKKVKLNELNEYACLFFSGTKDDGDKKKMEKLEEKMRKTISNEFCNDEMYKKIFSEKILSENNEEDVSDIVSSYKGFFTSLNGYVNNRKNLYVSDAKPTSIAYRCINENLPKFLRNVECYKKVVQVIPKEQIEYMSNNLNLSPYRIEDCFNIDFFEFCLSQGGIDLYNTFIGGYSKKDGTKVQGINEIVNLYNQKNKKDKEKYKLPQFTPLFKQILSDRDTKSFSIEKLENIYEVVELVKKSYSDEMFDDIETVFSNLNYYDASGIYVKNGPAITHISMNLTKDWATIRNNWNYEYDEKHSTKKNKNIEKYEDTRNTMYKKIDSFTLEYISRLVGKDIDELVKYFENEVANFVMDIKKTYSKLTPLFDRCQKENFDISEDEVNDIKGYLDNVKLLESFMKSFTINGKENNIDYVFYGKFTDDYDKLHEFDHIYNKVRNYITTSRKPYKLDKYKLYFDNPQLLGGWDINKEKDYRTVMLTKDGKYYFAIIDKGEHPFDNIPKDYFDNNGYYKKIIYRQIPNAAKYLSSKQIVPQNPPEEVKRILDKKKADSKSLTEEEKNIFIDYIKSDFLKNYKLLFDKNNNPYFNFAFRESSTYESLNEFFEDVERQAYSVRYENLPADYIDNLVNEGKIYLFEIYSKDFSEYSKGTNNLHTMYFKALFDNDNLKNTVFKLSGNAELFIRPASIKKDELVIHPKNQLLQNKNPLNPKKQSIFDYDLVKDKRFFENQYMLHISIEINKNERDAKKIKNINEMVRKELKDSDDNYIIGIDRGERNLLYVCVINSAGKIVEQMSLNEIINEYNGIKHTVDYQGLLDKCEKERNAQRQSWKSIENIKELKDGYISQVVHKLCQLVEKYDAIIAMENLNGGFKRGRTKFEKQVYQKFENKLINKMEYMADKKRKTTENGGILRGYQLTNGCINNSYQNGFIFYVPAWLTSKIDPTTGFVDLLKPKYTNVEEAHLWINKFNSITYDKKLDMFAFNINYSQFPRADIDYRKIWTFYTNGYRIETFRNSEKNNEFDWKEVHLTSVIKKLLEEYQINYISGKNIIDDLIQIKDKPFWNSFIKYIRLTLQMRNSITGRTDVDYIISPVINNEGTFYDSRKDLDEITLPQDADANGAYNIARKALWIIEKLKESPDEELNKVKLAITQREWLEYAQINI

SEQ ID NO: 419 - protein, 1224 aa, unidentified
  REGION 1..1224: note = Cas Enzyme sequence
MSKIEKFIGKYKISKTLRFRAVPVGKTQDNIEKKGILEKDKKRSEDYEKVKAYLDSLHRDFIENTLKKVKLNELNEYACLFFSGTKDDGDKKKMEKLEEKMRKTISNEFCNDEMYKKIFSEKILSENNEEDVSDIVSSYKGFFTSLNGYVNNRKNLYVSDAKPTSIAYRCINENLPKFLRNVECYKKVVQVIPKEQIEYMSNNLNLSPYRIEDCFNIDFFEFCLSQGGIDLYNTFIGGYSKKDGTKVQGINEIVNLYNQKIKKDKEKYKLPQFTPLFKQILSDRDTKSFSIEKLENIYEVVELVKKSYSDEMFDDIETVFSNLNYYDASGIYVKNGPAITHISMNLTKDWATIRNNWNYEYDEKHSTKKNKDIEKYEDTRNTMYKKIDSFTLEYISRLVGKDIDELVKYFENEVANFVMDIKKTYSKLTPLFDRCQKENFDISEDEVNDIKGYLDNVKLLESFMKSFTINGKENNIDYVFYGKFTDDYDKLHEFDHIYNKVRNYITTSRKPYKLDKYKLYFDNPQLLGGWDINKEKDYRTVMLTKDGKYYFAIIDKGEHPFDNIPKDYFDNNGYYKKIIYRQIPNAAKYLSSKQIVPQNPPEEVKRILDKKKADSKSLTEEEKNIFIDYIKSDFLKNYKLLFDKNNNPYFNFAFRESSTYESLNEFFEDVERQAYSVRYENLPADYIDNLVNEGKIYLFEIYSKDFSEYSKGTNNLHTMYFKALFDNDNLKNTVFKLSGNAELFIRPASIKKDELVIHPKNQLLQNKNPLNPKKQSIFDYDLVKDKRFFENQYMLHISIEINKNERDAKKIKNINEMVRKELKDSDDNYIIGIDRGERNLLYVCVINSAGKIVEQMSLNEIINEYNGIKHTVDYQGLLDKCEKERNAQRQSWKSIENIKELKDGYISQVVHKLCQLVEKYDAIIAMENLNGGFKRGRTKFEKQVYQKFENKLINKMEYMADKKRKTTENGGILRGYQLTNGCINNSYQNGFIFYVPAWLTSKIDPTTGFVDLLKPKYTNVEEAHLWINKFNSITYDKKLDMFAFNINYSQFPRADIDYRKIWTFYTNGYRIETFRNSEKNNEFDWKEVHLTSVIKKLLEEYQINYISGKNIIDDLIQIKDKPFWNSFIKYIRLTLQMRNSITGRTDVDYIISPVINNEGTFYDSRKYLDEITLPQDADANGAYNIARKALWIIEKLKESPDEELNKVKLAITQREWLEYAQINI

SEQ ID NO: 420 - protein, 1224 aa, unidentified
  REGION 1..1224: note = Cas Enzyme sequence
MKAIEQFISNSEIFSGYSVSKTISTKLIPIGRTRENIDKMNILEMDKQREEAFVRVKKYIDRIHKDFIEDCLTSQDMGLGIAIHSYEFNKLYELRVNLKTLTGKERKDVQKQIKLEENRLRVLISKYFEFNPKYKKLFNIELFKELLPAYCSEEEMKDVNLFDGYTSYFKKFNDTRELLYSSEEIHNAVAYRIINENYPVFIDNKLNLEYIISEYNELYNFSENGQKLFHEFTDLCNSSYGMSSKYIANYNSIISGTFDEEGKQITRGLNQLINEYIQKNKDARVPYFKPLYKNIMSDKKPLFSVSCFESTAEIKDAVISYNESIQKPYERFISYITKSFPADSWCVDKKNLNRLSHIICSNPFTLDNLVSAGKKFSKKKPDIYCAADFKELLSENILEDTESHFDFFKYKDYLVQFHPNDLFSKIPFDKINDLQYDKKQALELKEYLQAALDYYNMLRILQIDTEDERIISKEISYDEQYYAELSLILDAMEPIVKLYNKVRNFVTKSVKQEKKTKLNFDCSQFLGGWSESQEKVKNGLIFHDEEEDKYYLGIYNQNMKKPDIKYSSDSSFKKMVLNTIPEPYKMLPKVFFSKKGLETYKPCEEIIEGYKNELHKKSSSNFDIDFCHKLIDYYKDCIKQRKEWDCFTFDFKPTEEYQDTAGFFDDVSKGGYSLVMKGIDKENLMNAVEEGSIFLFEIYNKYLAKKGHGKDTYTQILRTALCGKESNIQFCAGAQIYYRPALLKKEATHKKGSVIVNKITREGFTINSEVYKNIYSYFNYQTPLSSEAKTLLDSGSVIYKTADRDLIKDRRYTEESFSFHCPVIINWKEKEINPFTFNKKVLEVIRNDESLNILSVNRGENNLVYAILMNRNGKVLLEKSFNLIQTGKQNVNYKNKLIEKSKDRANSRTNWQEIDGIKDLKSGYLSFVVAEITRLMIDNNAVLVLESLSSDFKSGRQFIESNIYQQFEEAILTKLACVVLKEREAGTPGSLEHPYQLVPKFESFEKIYLQFGFVFFVNPSYISKIDPASGVFNFFNFNVLTNNEKRTEFFKKFESITEENGKLVFEYCPGNFNKDFKEIDRTFRVVASGSRNVWNPKIKAFKSIDLELEGHAVYENLCYQNYKDIAKLFKEKCNESCLPHTLATERLLNVFMATIACRTFVLDDWKYVSPLGIDNEFTGKSMDYIAAYNLANKFRTILELSDDSEYLINIKTAEYINKINSANP

SEQ ID NO: 421 - protein, 1224 aa, unidentified
  REGION 1..1224: note = Cas Enzyme sequence
MQLNPVGKTMDYFQAKQILENDEKFKEDYQKIKKIADRFYRNLNEDVLSKTGLDKLKDYAEIYYHCNTDADRKRLDECASELRKEIVKNFKNRDEYNKLFNKKMIEIVLPQHLKNEDEKEVVASFKNFTTYFTGFFTNRKNMYSDGEESTAIAYRCINENLPKHLDNVKAFEKAISKLSKNAVDDLDTTYSGLCGTNLYDVFTVDYFNFLLPQSGITEYNKIIGGYTTSDGTKVKGINEYINLYNQQVSKRYKIPNLKILYKQILSESEKVSFIPPKFEDDNELLSAVSEFYANDETFDGMPLKKAIDETKLLFGNLDNSSLNGIYIQNDRSVTNLSNSMFGSWSVIEDLWNKNYDSVNSNSRIKDIQKREDKRKKAYKAEKKLSLSFLQVLISNSENDEIREKSIVDYYKTSLMQLTDNLSDKYKEAAPLFNESYANEKGLKNDDKSISLIKNFLDAIKEIEKFIKPLSETNITGEKNDLFYSQFTPLLDNISRIDILYDKVRNYVTQKPFSTDKIKLNFGNSQLLNGWDRNKEKDCGAVWLCKDEKYYLAIIDKSNNSILENIDFQDCDESDYYEKIVYKLLTKISGNLPRVFFSEKRKKLLSPSDEILKIRKNGTFKKGDKFSLDDCHKLIDFYKESFKKYPNWLIYNFKFKKTNEYNDISEFYNDVASQGYNISKMKIPTSFIDKLVDEGKIYLFQLYNKDFSPHSKGTPNLHTLYFKMLFDERNLEDVVYKLNGEAEMFYRPASIKYDKPTHPKNTPIKNKNTLNDKRASTFPYDLIKDKRYTKWQFSLHFPITMNFKAPDRAMINDDVRNLLKSCNNNFIIGIDRGERNLLYVSVIDSNGAIIYQHSLNIIGNKFKGKTYETNYREKLATREKDRTEQRRNWKAIESIKELKEGYISQAVHVICQLVVKYDAIIVMEKLTDGFKRGRTKFEKQVYQKFEKMLIDKLNYYVDKKLDPDEEGGLLHAYQLTNKLDSFDKLGMQSGFIFYVRPDFTSKIDPVTGFVNLLYPRYENIDKAKDMISRFDEIRYNACEDFFEFDIDYDKFPKTASDYRKKWTICTNGERIETFRNPANNNEWSYRTIILAEKFKELFDNNSINYRDSDDLKAEILSQTKGKFFEDFFKLLRLTLQMRNSNPETGEDRILSPVKDKNGNFYDSSKYDEKSKLPCDADANGTYNIARKGLWIVEQFKKSDNVSTVEPVIHNDKWLKFVQENDMANN

SEQ ID NO: 422 - protein, 1224 aa, unidentified
  REGION 1..1224: note = Cas Enzyme sequence
MKKIDNFVGCYPVSKTLRFKAIPIGKTQENIEKKRLVEEDEVRAKDYKAVKKLIDRYHREFIEGVLDNVKLDGLEEYYMLFNKSDREESDNKKIEIMEERFRRVISKSFKNNEEYKKIFSKKIIEEILPNYIKDEEEKELVKGFKGFYTAFVGYAQNRENMYSDEKKSTAISYRIVNENMPRFITNIKVFEKAKSILDVDKINEINEYILNNDYYVDDFFNIDFFNYVLNQKGIDIYNAIIGGIVTGDGRKIQGLNECINLYNQENKKIRLPQFKPLYKQILSESESMSFYIDEIESDDMLIDMLKESLQIDSTINNAIDDLKVLFNNIFDYDLSGIFINNGLPITTISNDVYGQWSTISDGWNERYDVLSNAKDKESEKYFEKRRKEYKKVKSFSISDLQELGGKDLSICKKINEIISEMIDDYKSKIEEIQYLFDIKELEKPLVTDLNKIELIKNSLDGLKRIERYVIPFLGTGKEQNRDEVFYGYFIKCIDAIKEIDGVYNKTRNYLTKKPYSKDKFKLYFENPQLMGGWDRNKESDYRSTLLRKNGKYYVAIIDKSSSNCMMNIEEDENDNYEKINYKLLPGPNKMLPKVFFSKKNREYFAPSKEIERIYSTGTFKKDTNFVKKDCENLITFYKDSLDRHEDWSKSFDFSFKESSAYRDISEFYRDVEKQGYRVSFDLLSSNAVNTLVEEGKLYLFQLYNKDFSEKSHGIPNLHTMYFRSLFDDNNKGNIRLNGGAEMFMRRASLNKQDVTVHKANQPIKNKNLLNPKKTTTLPYDVYKDKRFTEDQYEVHIPITMNKVPNNPYKINHMVREQLVKDDNPYVIGIDRGERNLIYVVVVDGQGHIVEQLSLNEIINENNGISIRTDYHTLLDAKERERDESRKQWKQIENIKELKEGYISQVVHKICELVEKYDAVIALEDLNSGFKNSRVKVEKQVYQKFEKMLITKLNYMVDKKKDYNKPGGVLNGYQLTTQFESFSKMGTQNGIMFYIPAWLTSKMDPTTGFVDLLKPKYKNKADAQKFFSQFDSIRYDNQEDAFVFKVNYTKFPRTDADYNKEWEIYTNGERIRVFRNPKKNNEYDYETVNVSERMKELFDSYDLLYDKGELKETICEMEESKFFEELIKLFRLTLQMRNSISGRTDVDYLISPVKNSNGYFYNSNDYKKEGAKYPKDADANGAYNIARKVLWAIEQFKMADEDKLDKTKISIKNQEWLEYAQTHCE

SEQ ID NO: 423 - protein, 1224 aa, unidentified
  REGION 1..1224: note = Cas Enzyme sequence
MQLNPVGKTMDYFQAKQILENDEKLKEDYQKIKEIADRFYRNLNEDVLSKTGLDKLKDYAEIYYHCNTDADRKRLDECASELRKEIVKNFKNRDEYNKLFNKKMIEIVLPQHLKNEDEKEVVASFKNFTTYFTGFFTNRKNMYSDGEESTAIAYRCINENLPKHLDNVKAFEKAISKLSKNAVDDLDTTYSGLCGTNLYDVFTVDYFNFLLPQSGITEYNKIIGGYTTSDGTKVKGINEYINLYNQQVSKRYKIPNLKILYKQILSESEKVSFIPPKFEDDNELLSAVSEFYANDETFDGMPLKKAIDETKLLFGNLDNSSLNGIYIQNDRSVTNLSNSMFGSWSVIEDLWNKNYDSVNSNSRIKDIQKREDKRKKAYKAEKKLSLSFLQVLISNSENDEIREKSIVDYYKTSLMQLTDNLSDKYKEAAPLFNESYANEKGLKNDDKSISLIKNFLDAIKEIEKFIKPLSETNITGEKNDLFYSQFTPLLDNISRIDILYDKVRNYVTQKPFSTDKIKLNFGNSQLLNGWDRNKEKDCGAVWLCKDEKYYLAIIDKSNNSILENIDFQDCDESDCYEKIIYKLLPGPNKMLPKVFFSEKCKKLLSPSDEILKIRKNGTFKKGDKFSLDDCHKLIDFYKESFKKYPNWLIYNFKFKKTNEYNDISEFYNDVASQGYNISKMKIPTSFIDKLVDEGKIYLFQLYNKDFSPHSKGTPNLHTLYFKMLFDERNLEDVVYKLNGEAEMFYRPASIKYDKPTHPKNTPIKNKNTLNDKRASTFPYDLIKDKRYTKWQFSLHFPITMNFKAPDRAMINDDVRNLLKSCNNNFIIGIDRGERNLLYVSVIDSNGAIIYQHSLNIIGNKFKGKTYETNYREKLATREKDRTEQRRNWKAIESIKELKEGYISQAVHVICQLVVKYDAIIVMEKLTDGFKRGRTKFEKQVYQKFEKMLIDKLNYYVDKKLDPDEEGGLLHAYQLTNKLDSFDKLGMQSGFIFYVRPDFTSKIDPVTGFVNLLYPRYENIDKAKDMISRFDEIRYNACEDFFEFDIDYDKFPKTASDYRKKWTICTNGERIETFRNPANNNEWSYRTIILAEKFKELFDNNSINYRDSDDLKAEILSQTKGKFFEDFFKLLRLTLQMRNSNPETGEDRILSPVKDKNGNFYDSSKYDEKSKLPCDADANGAYNIARKGLWIVEQFKKSDNVSTVEPVIHNDKWLKFVQENDMANN

SEQ ID NO: 424 - protein, 1224 aa, unidentified
  REGION 1..1224: note = Cas Enzyme sequence
LTEYYDNYVSKSQNEDAKKAFEENQQNLRSIIAKKLTEDKAYANLFGKNLIESYKDKTDKTKIIDSDLFKFINTAESTQLDSMSQDEAKEIVKEFWGFTTYFVGFFDNRKNMYTAEEKSTGIAYRLINENLPKFIDNMEAFKKAIARTEIQANMDELYSNFSEYLNVESIQEMFQLDYYNMLLTQKQIDVYNAIIGGKTDDEHDVKIKGINEYINLYNQQHKDDKLPKLKALFKQILSDRNAISWLPEEFNSDQEVLNAIKDCYERLSENVLGDKVLKSLLGSLADYSLDGIFIRNDLQLTDISQKIFGNWGVIQNAIMQNIKRVAPARKHKESEEDYEKRIAGIFKKADSFSISYINDCLNEADPNNAYFVENYFATFGAVNTPTMQRENLFALVQNAYTEVAALLHSDYPTVKHLAQDKANVSKIKALLDAIKSLQHFVKPLLGKGDESDKDERFYGELASLWAELDTVTPLYNMIRNYMTRKPYSQKKIKLNFENPQLLGGWDANKEKDYATIILRRNGLYYLAIMDKDSRKLLGKAMPSDGECYEKMVYKFFKDVTTMIPKCSTQLKDVQAYFKVNTDDYVLNSKAFNKPLTITKEVFDLNNVLYGKYKKFQKGYLTATGDNVGYTHAVNVWIKFCMDFLNSYDSTCIYDFSSLKPESYLSLDAFYQDANLLLYKLSFARASVSYINQLVEEGKMYLFQIYNKDFSEYSKGTPNMHTLYWKALFDERNLADVVYKLNGQAEMFYRKKSIENTHPTHPANHPILNKNKDNKKKESLFDYDLIKDRRYTVDKFMFHVPITMNFKSVGSENINQDVKAYLRHADDMHIIGIDRGERHLLYLVVIDLQGNIKEQYSLNEIVNEYNGNTYHTNYHDLLDVREEERLKARQSWQTIENIKELKEGYLSQVIHKITQLMVRYHAIVVLEDLSKGFMRSRQKVEKQVYQKFEKMLIDKLNYLVDKKTDVSTPGGLLNAYQLTCKSDSSQKLGKQSGFLFYIPAWNTSKIDPVTGFVNLLDTHSLNSKEKIKAFFSKFDAIRYNKDKKWFEFNLDYDKFGKKAEDTRTKWTLCTRGMRIDTFRNKEKNSQWDNQEVDLTTEMKSLLEHYYIDIHGNLKDAISTQTDKAFFTGLLHILKLTLQMRNSITGTETDYLVSPVADENGIFYDSRSCGDQLPENADANGAYNIARKGLMLIEQIKNAEDLNNVKFDISNKAWLNFAQQKPYKNG

SEQ ID NO: 425 - protein, 1225 aa, unidentified
  REGION 1..1225: note = Cas Enzyme sequence
MSNLYRNLHNFYSVQKTLRFELIPQGKTKENMEKEGILKADEHRAEIYSKVKKYCDEYHKLFIDKCLKNIRLNELNKYYELYSVVKKDEKQKEEFTKIQEKMRKQISESFKNDNEYKGLFQKDIINIYLITMYKDDKEKIKDISEFNKFTTYFSGYNKNRENMYSEEKPTGIAYRLINENLPTFIENFKIYNKVIKFMPEIINKIHTDLMEYIQVEDIDEIFDINYYNEVLTQQGIECYNIIISGKSKSNGEKIKGLNEYINEFNQKHNEKIPKLQELYKQILSDTDTASFKFDTIESDEELLNNIESYYTKLLPVFNKINQLFAKFNKYNLDLIFINNDGTLNTISNEIYKDWSYIRNRIGERYDIEYTGKLKKDTEQYSKQKQEYMKKQKQYSLKFLNDSLRDNYLIEYISNYIEQSKIMEKMKTDFTEVQKIESRGDTKQLIKDENSIVKIKNLLDDIKFLQEFVKILVLKDRTIEKDDEFYSELMPYYNELKDIIPLYNKTRNYLTQKPYSTEKIKLNFECPTLLNGWDLNKEEANLGVILLKNEKYYLGIINPYCKKIFKIQEKDSNSENNYKKMEYKLLPGPNKMLPKVFFSKSKIDKFMPSDELLEKYNKGCHKKGKDFDINFCHELIDFYKTSLNKHEDWKKFDFKFKSTSEYNDISEFYKDVEEQGYKIEYSEYSEKYINELVDRGELYLFQIYNKDFSEYSKGRPNLHTMYWKAVFDIENIKNPVYKLNGEAEIFYRKKSLERKITHSANEPVANKNENTIKSGKPTSLFKYDLIKDKRYTVDKFQFHVPITMNFKSEKMFNINQVVNKYLKYNDDINVIGIDRGERNLLYVCVIDKNEKIVYQKSLNEIVNEYKSIKYSTNYHALLNKKEKEREIAREDWKNIENIKELKEGYMSQVIHILVELMRKYNAIIVIEDLNKGFKNSRIKVEKQVYQKFEKMFIDKLNYLVFKDEPKESEGGVLNAYQLTNKFETFNKIGKQSGVLYYIPAWCTSKIDPTTGFINRFYIKYENLDKSKEFINKIDDISYNSSENLFEFDIDYSKFTDRLNETRNKWTLYTNGERIYTYRNDKGEWIDKKIQLTNEFKKLFEKYSINLDNIKNEILEKANIEFFKGNNETLGFIQLFKLMVQMRNSLTGKEEDNLISPVKNSNGKFFNTNEQIEGLPKDADANGAYNIARKGLMLIEQMRNTEDDKLNKIKYNITEKEWLDYVQNRGM

SEQ ID NO: 426 - protein, 1225 aa, unidentified
  REGION 1..1225: note = Cas Enzyme sequence
MKKIDSFVNYYPLSKTLRFSLIPVGKTEDNFNAKLLLEEDEKRAIEYEKVKRYIDRYHKHFIETVLANFHLDDVNEYAELYYKAGKDDKDLKYMEKLEGKMRKSISAAFTKDKKYKEIFGQEIIKNILPEFLENEDEKESVKMFQGFFTYFTGFNDNRKNMYTHEAQTTAISYRCINENLPKFLDNVQSFAKIKESISSDIMNKLDEVCMDLYGVYAQDMFCTDYFSFVLSQSGIDRYNNIIGGYVDDKGVKIQGINEYINLYNQQVDEKNKRLPLMKKLYKQILIEKESISFIPEKFESDNIVINAISDYYHNNVENLFDDFNKLFNEFSEYDDNGIFVTSGLAVTDISNAVFGSWNIISDSWNEEYKDSHPMKKTTNAEKYYEDMKKEYKKNLSFTIAELQRLGEAGCNDECKGDIKEYYKTTVAEKIENIKNAYEISKDLLASDYEKSNDKKLCKNDSAISLLKNLLDSIKDLEKTIKPLLGTGKEENKDDVFYGKFTNLYEMISEIDRLYDKVRNYVTQKPYSKDKIKLNFENPQHLGGWDKNKERDYRSVLLKKEDKYYLAIMDKSNNKAFIDFPDDGECYEKIEYKLLPGPNKMLPKVFFASSNIEYFAPSKKILEIRSRESFKKGDMFNLKDCHEFIDFFKESIKKHEDWSQFGFEFSPTEKYNDISEFYNEVKIQGYSLKYKNVSKKYIDELIECGQLYLFQIYNKDFSVYAKGNPNLHTMYFKMLFDERNLANVVYQLNGGAEMFYRKASIKDSEKIVHHANQPIKNKNADNVKKESVFEYDIIKDKRFTKRQFSIHIPITLNFKAKGQNFINNDVRMALKKADENYVIGIDRGERNLLYICVINSKGEIVEQKSLNEIIGDNGYRVDYHKLLDKKEAERDEARKSWGTIENIKELKEGYLSQIVHEISKLVIKYDAVIAIEDLNSGFKKGRFKVEKQVYQKFENMLCTKLNYLVDKNADANECGGLLKAYQLTNKEDGANRGRQNGIIFSVPAWLTSKIDPVTGFADLLRPKYKSVSESVEFISKIDNIRYNSKEDYFEFDIDYSKFPNSTASYKKKWTVCTYGERIINVRNKEKNNMWDNKTIVLTDEFKKLFADFGVDVSKNIKESVLAIDSKDFYYRFINLLANTLQLRNSEVGNVDVDYLISPVKGVDGSFYDSRLVKEKTLPENADANGAYNIARKALWAIDVLKQTKDEELKNANLSIKNAEWLEYVQK

SEQ ID NO: 427 - protein, 1226 aa, unidentified
  REGION 1..1226: note = Cas Enzyme sequence
MSNLYRNLHNFYSVQKTLRFELIPQGKTKENMEKEGILKADEHRAEIYSKVKKYCDEYHKLFIDKCLKNIRLNELNKYYELYSVVKKDEKQKEEFIKIQEKLRKQISESFRNNNEYKGLFQKDIINIYLITMYKDDKEKIKDISEFNKFTTYFSGYNKNRENMYSEEEKPTGIAYRLINENLPTFIENFKIYNKVIKFMPEIINKIHTDLMEYIQVEDIDEIFDINYYNEVLTQKGIECYNIIISGKSKSNGEKIKGLNEYINEFNQKHNEKIPKLQELYKQILSDTDTASFKFDTIESDEELLNNIESYYTKLLPVFNKINQLFAKFNKYNLDLIFINNDGTLNTISNEIYKDWSYIRNRIGERYDIEYTGKLKKDTEQYSKQKQEYMKKQKQYSLKFLNDSLRDNYLIEYISNYIEQSKIMEKMKTDFTEVQKIESRGDTKQLIKDENSIVKIKNLLDDIKFLQEFVKILVLKDRTIEKDAEFYSELMPYYNELKDIIPLYNKTRNYLTQKAYSTEKIKLNFECPTLLNGWDLNKEEANLGVILLKNEKYYLGIINPYCKKIFKIQEKDSNSENNYKKMEYKLLPGPNKMLPKVFFSKSKIDEFMPSDELLEKYNKGCHKKGKDFDINFCHELIDFYKTSLNKHKDWKKFDFKFKSTSEYNDISEFYKDVEEQGYKIEYSEYSEKYINELVDRGELYLFQIYNKDFSEYSKGRPNLHTMYWKAVFDIENIKNPVYKLNGEAEIFYRKKSLERKITHSANEPVANKNENTIKSGKPTSLFKYDLIKDKRYTVDKFQFHVPITMNFKSEKMFNINQVVNKYLKYNDDINVIGIDRGERNLLYVCVIDKNEKIVYQKSLNEIVNEYKSIKYSTNYHALLNKKEKEREIAREDWKNIENIKELKEGYMSQVIHILVGLMRKYNAIIVIEDLNKGFKNSRIKVEKQVYQKFEKMFIDKLNYLVFKDEPKESEGGVLNAYQLTNKFETFNKIGKQSGVLYYIPAWCTSKIDPTTGFINRFYIKYENLDKSKEFINKIDDIRYNSSENLFEFDIDYSKFTDRLNETRNKWTLYTNGERIYTYRNDKGEWIDKKIQLTNEFKKLFEKYSINLDNIKNEILEKANIEFFKGNNETLGFIQLFKLMVQMRNSLTGKEEDNLISPVKNSNGKFFNTNEQIEGLPKDADANGAYNIARKGLMLIEQVRNTEDDKLNKIKYNITEKEWLDHVQNRGM

SEQ ID NO: 428 - protein, 1226 aa, unidentified
  REGION 1..1226: note = Cas Enzyme sequence
MSNLYRNLHNFYSVQKTLRFELIPQGKTKENMEKEGILKADEHRAEIYSKVKKYCDEYHKLFIDKCLKNIRLNELNKYYELYSVVKKDEKQKEEFIKIQEKLRKQISESFRNNNEYKGLFQKDIINIYLITMYKDDKEKIKDISEFNKFTTYFSGYNKNRENMYSEEEKPTGIAYRLINENLPTFIENFKIYNKVIKFMPEIINKIHTDLMEYIQVEDIDEIFDINYYNEVLTQKGIECYNIIISGKSKSNGEKIKGLNEYINEFNQKHNEKIPKLQELYKQILSDTDTASFKFDTIESDEELLNNIESYYTKLLPVFNKINQLFAKFNKYNLDLIFINNDGTLNTISNEIYKDWSYIRNRIGERYDIEYTGKLKKDTEQYSKQKQEYMKKQKQYSLKFLNDSLRDNYLIEYISNYIEQSKIMEKMKTDFTEVQKIESRGDTKQLIKDENSIVKIKNLLDDIKFLQEFVKILVLKDRTIEKDDEFYSELMPYYNELKDIIPLYNKTRNYLTQKPYSTEKIKLNFECPTLLNGWDLNKEEANLGVILLKNEKYYLGIINPYCKKIFKIQEKDSNSENNYKKMEYKLLPGPNKMLPKVFFSKSKIDKFMPSDELLEKYNKGCHKKGKDFDINFCHELIDFYKTSLNKHKDWKKFDFKFKSTSEYNDISEFYKDVEEQGYKIEYSEYSEKYINELVDRGELYLFQIYNKDFSEYSKGRPNLHTMYWKAVFDIENIKNPVYKLNGEAEIFYRKKSLERKITHSANEPVANKNENTIKSGKPTSLFKYDLIKDKRYTVDKFQFHVPITMNFKSEKMFNINQVVNKYLKYNDDINVIGIDRGERNLLYVCVIDKNEKIVYQKSLNEIVNEYKSIKYSTNYHALLNKKEKEREIAREDWKNIENIKELKEGYMSQVIHILVELMRKYNAIIVIEDLNKGFKNSRIKVEKQVYQKFEKMFIDKLNYLVFKDEPKESEGGVLNAYQLTNKFETFNKIGKQSGVLYYIPAWCTSKIDPTTGFINRFYIKYENLDKSKEFINKIDDISYNSSENLFEFDIDYSKFTDRLNETRNKWTLYTNGERIYTYRNDKGEWIDKKIQLTNEFKKLFEKYSINLDNIKNEILEKANIEFFKGNNETLGFIQLFKLMVQMRNSLTGKEEDNLISPVKNSNGKFFDTNEQIEGLPKDADANGAYNIARKGLMLIEQMRNTEDDKLNKIKYNITEKEWLDYVQNRGM

SEQ ID NO: 429 - protein, 1226 aa, unidentified
  REGION 1..1226: note = Cas Enzyme sequence
MSNLYRNLHNFYSVQKTLRFELIPQGKTKENMEKEGILKADEHRAEIYSKVKKYCDEYHKLFIDKCLKNIRLNELNKYYELYSVVKKDEKQKEEFIKIQEKMRKQISESFKNDNEYKGLFQKDIINIYLITMYKDDKEKIKDISEFNKFTTYFSGYNKNRENMYSEEEKPTGIAYRLINENLPTFIENFKIYNKVIKFMPEIINKIHTDLMEYIQVEDIDEIFDINYYNEVLTQQGIECYNIIISGKSKSNGEKIKGLNEYINEFNQKHNEKIPKLQELYKQILSDTDTASFKFDTIESDEELLNNIESYYTKLLPVFNKINQLFAKFNKYNLDLIFINNDGTLNTISNEIYKDWSYIRNRIGERYDIEYTGKLKKDTEQYSKQKQEYMKKQKQYSLKFLNDSLRDNYLIEYISNYIEQSKIMEKMKTDFTEVQKIESRGDTKQLIKDENSIVKIKNLLDDIKFLQEFVKILVLKDRTIEKDDEFYSELMPYYNELKDIIPLYNKTRNYLTQKPYSTEKIKLNFECPTLLNGWDLNKEEANLGVILLKNEKYYLGIINPYCKKIFKIQEKDSNSENNYKKMEYKLLPGPNKMLPKVFFSKSKIDKFMPSDELLEKYNKGCHKKGKDFDINFCHELIDFYKTSLNKHEDWKKFDFKFKSTSEYNDISEFYKDVEEQGYKIEYSEYSEKYINELVDRGELYLFQIYNKDFSEYSKGRPNLHTMYWKAVFDIENIKNPVYKLNGEAEIFYRKKSLERKITHSANEPVANKNENTIKSGKPTSLFKYDLIKDKRYTVDKFQFHVPITMNFKSEKMFNINQVVNKYLKYNDDINVIGIDRGERNLLYVCVIDKNEKIVYQKSLNEIVNEYKSIKYSTNYHALLNKKEKEREIAREDWKNIENIKELKEGYMSQVIHILVELMRKYNAIIVIEDLNKGFKNSRIKVEKQVYQKFEKMFIDKLNYLVFKDEPKESEGGVLNAYQLTNKFETFNKIGKQSGVLYYIPAWCTSKIDPTTGFINRFYIKYENLDKSKEFINKIDDISYNSSENLFEFDIDYSKFTDRLNETRNKWTLYTNGERIYTYRNDKGEWIDKKIQLTNEFKKLFEKYSINLDNIKNEILEKANIEFFKGNNETLGFIQLFKLMVQMRNSLTGKEEDNLISPVKNSNGKFFNTNEQIEGLPKDADANGAYNIARKGLMLIEQMRNTEDDKLNKIKYNITEKEWLDYVQNRGM

SEQ ID NO: 430 - protein, 1226 aa, unidentified
  REGION 1..1226: note = Cas Enzyme sequence
MSNLYRNLHNFYSVQKTLRFELIPQGKTKENMEKEGILKADEHRAEIYSKVKKYCDEYHKLFIDKCLKNIRLNELNKYYELYSVVKKDEKQKEEFIKIQEKMRKQISESFKNDNEYKGLFQKDIINIYLITMYKDDKEKIKDISEFNKFTTYFSGYNKNRENMYSEEEKPTGIAYRLINENLPTFIENFKIYNKVIKFMPEIINKIHTDLMEYIQVEDIDEIFDINYYNEVLTQKGIECYNIIISGKSKSNGEKIKGLNEYINEFNQKHNEKIPKLQELYKQILSDTDTASFKFDTIESDEELLNNIESYYTKLLPVFNKINQLFAKFNKYNLDLIFINNDGTLNTISNEIYKDWSYIRNRIGERYDIEYTGKLKKDTEQYSKQKQEYMKKQKQYSLKFLNDSLRDNYLIEYISNYIEQSKIMEKMKTDFTEVQKIESRGDTKQLIKDENSIVKIKNLLDDIKFLQEFVKILVLKDRTIEKDAEFYSELMPYYNELKDIIPLYNKTRNYLTQKPYSTEKIKLNFECPTLLNGWDLNKEEANLGVILLKNEKYYLGIINPYCKKIFKIQEKDSNSENNYKKMEYKLLPGPNKMLPKVFFSKSKIDKFMPSDELLEKYNKGCHKKGKDFDINFCHELIDFYKTSLNKHEDWKKFDFKFKSTSEYNDISEFYKDVEEQGYKIEYSEYSEKYINELVDRGELYLFQIYNKDFSEYSKGRPNLHTMYWKAVFDIDNIKNPVYKLNGEAEIFYRKKSLERKITHSANEPVANKNENTIKSGKPTSLFKYDLIKDKRYTVDKFQFHVPITMNFKSEKMFNINQVVNKYLKYNDDINVIGIDRGERNLLYVCVIDKNEKIVYQKSLNEIVNEYKSIKYSTNYHALLNKKEKEREIAREDWKNIENIKELKEGYMSQVIHILVELMRKYNAIIVIEDLNKGFKNSRIKVEKQVYQKFEKMFIDKLNYLVFKDEPKESEGGVLNAYQLTNKFETFNKIGKQSGVLYYIPAWCTSKIDPTTGFINRFYIKYENLDKSKEFINKIDDISYNSLENLFEFDIDYSKFTDRLNETRNKWTLYTNGERIYTYRNDKGEWIDKKIQLTNEFKKLFEKYSINLDNIKNEILEKANIEFFKGNNENLGFIQLFKLMVQMRNSLTGKEEDNLISPVKNSNGKFFNTNEQIEGLPKDADANGAYNIARKGLMLIEQMRNTEDDKLNKIKYNITEKEWLDYVQNRGM

SEQ ID NO: 431 - protein, 1226 aa, unidentified
  REGION 1..1226: note = Cas Enzyme sequence
MFNLYSNLRKLYPVQKTLRFELIPQGKTKENMEKEGIIREDEHRAKIYNKVKKYCDEYHKIFIEDCLKDIKLDNLNKYYELYSIDKKDEDQKEEFTKTQEKLRKQISESFKNNNKYKGLFQKDIIDTYLINMYKEDKQKLQDINEFNKFTTYFTGYNKNRENMYLEEEKSTAIAYRLINENLPTFVDNLKIYNKLLKFIPEIIEKIHIELAEYIQVNSIDEIFDINYYNDILTQKGIECYNIIISGKTKDEGTKIKGINEYINEYNQTHTNKIPKLRELYKQILSDIDTASFKFDVIEDDIQLIDSINLYYQQIFPIISKVNELFSKINSYNLDLIYINNDGTLSNVSNEIYSDWSYIRNHISEKYDTEYTGRLKVGTEQYSKQKQEYLRKQRNYSLSFLINCMKDDKIIEYLSNNMQQTEIVEKIKMDFDNFKSIQIQEDYKCLIKSENSIAKIKKLLDDTKLLQVFMKTLIPKDKTIEKDNEFYSELISYYDVFRDIIPLYNKTRNYLTQKPYSNEKIKINFACPTLLNGWDLNKEEANLGVILLKDEKYYLGIMNPYCKKIFNVDNRDSDTNNNYKKMEYKLLPGPNKMLPKVFFSKSRINEFAPSDELLEKYNKGYHKKGKDFDINFCHELIDFYKKSLNKHEDWKNFNFKFKKTVEYNDISEFYREVEEQGYKIEYKEYSEKYINELVERGELYLFQIYNKDFSEYSKGKQNLHTMYWKAVFDPENIKDTIYKLNGNAEIFYRKKSIDEKITHPANIPVANKNENTIKAGKITSLFKYNLIKDKRYTVDKFQFHVPITMNFKSEKILNINQIVNKYLKYNDDIHVIGIDRGERNLLYVCVIDKDEKIVYQKSLNEIYNEYQGIQYSTNYHRLLNEKENKREQAREDWKNIENIKELKEGYMSQIIHILCELMRKYNAIIVIEDLNKGFKNSRIKVEKQIYQKFEQMFINKLNYVVFKDVPKLEEGGILNAYQLTNKFESFTKLGKQSGILYYIPAWCTSKIDPTTGFINRFYIKYENLEKSREFVNRMDNIRYNLDEELFEFDIDYSKFSDRLNDTKNKWTLCSYGERVYTHKNNKEIWVDDKIQLTDEFIKLFEKYKIDLNNIKNEIIEKADIEFFKGGENSLGFLQLFKLMVQMRNSITGQEEDNLISPVRNNEGIFFDTKAKIKGLPEDADANGAYNIARKGLMLIEQMKRTDDDKLNKIKYDITEKEWLNYIQNRGV

SEQ ID NO: 432 - protein, 1226 aa, unidentified
  REGION 1..1226: note = Cas Enzyme sequence
MFNLYSNLRKLYPVQKTLRFELIPQGKTKENMEKEGIIREDEHRAKIYNKVKKYCDEYHKIFIEDCLKDIKLDNLNKYYELYSIDKKDEDQKEGFTKTQEKLRKQISESFKNNNKYKGLFQKDIIDTYLINIYKEDKQKLQDINEFNKFTTYFTGYNKNRENMYLEEEKSTAIAYRLINENLPTFVDNLKIYNKLLKFIPEIIEKIHIELAEYIQVNSIDEIFDINYYNDVLTQKGIECYNIIISGKTKDEGTKIKGINEYINEYNQTHTNKIPKLRELYKQILSDIDTASFKFDVIEDDIQLLDSINLYYQQIFPIISKVNELFSKINNYNLDLIYINNDGTLSNVSNEIYSDWSYIRNHISEKYDTEYTGRLKVGTEQYSKQKQEYLRKQRNYSLRFLINCMKDDKIIEYLSNNMQQTEIVEKIKMDFDNFKSIQIQEDYKCLIKSENSIAKIKKLLDDTKLLQVFMKTLIPKDKTIEKDNEFYSELISYYDVFRDIIPLYNKTRNYLTQKPYSNEKIKINFACTTLLNGWDLNKEEANLGVILLKDEKYYLGIMNPYCKKIFNVDNRDSDTNNNYKKMEYKLLPGPNKMLPKVFFSKSRINEFAPSDELLEKYNKGYHKKGKDFDINFCHELIDFYKKSLNKHEDWKNFNFKFKNTVEYNDISEFYREVEEQGYKIEYKEYSEKYINELVERGELYLFQIYNKDFSEYSKGKQNLHTMYWKAVFDPENIKDTIYKLNGNAEIFYRKKSIDEKITHPANIPVANKNENTIKAGKITSLFKYNLIKDKRYTVDKFQFHVPITMNFKSEKILNINQIVNKYLKYNDDIHVIGIDRGERNLLYVCVIDKDEKIVYQKSLNEIYNEYQGIQYSTNYHRLLNEKENKREQAREDWKNIENIKELKEGYMSQIIHILCELMRKYNAIIVIEDLNKGFKNSRIKVEKQIYQKFEQMFINKLNYVVFKDVPKLEEGGILNAYQLTNKFESFTKLGKQSGILYYIPAWCTSKIDPTTGFINRFYIKYENLEKSREFVNRMDNIRYNLDEELFEFDIDYSKFSDRLNDTKNKWTLCSYGERVYTHKNNKEIWVDDKIQLTDEFIKLFEKYKIDLNNIKNEIIEKADIEFFKGGENSLGFLQLFKLMVQMRNSITGQEEDNLISPVRNNEGIFFDTKAKIKGLPEDADANGAYNIARKGLMLIEQMKRTDDDKLNKIKYDITEKEWLNYIQNRGV

SEQ ID NO: 433 - protein, 1226 aa, unidentified
  REGION 1..1226: note = Cas Enzyme sequence
MSNLYSNLHKLYPVQKTLRFELIPQGKTKENMEKKGIIREDEHRAKIYNKVKKYCDEYHKIFIEDCLKDIKLDNLNRYYELYSIDKKDEDQKEEFTKIQEKIRKQISESFKKDSKYKGLFQKDIIDTYLIKIYKEDKQKLQDINEFNKFTTYFTGYNKNRENMYLEEEKSTAIAYRLINENLPTFVDNLKIYNKLLKFIPEIIEKIHIELAEYIQVNSIDEIFDISYYNDVLTQKGIECYNIIISGKTKDDGTKIKGINEYINEYNQTHTNKIPKLRELYKQILSDTDTASFRFDGIEDDIQLLDSINLYYQQIFPIISKVNELFSKIDSYNLDLIYINNDGTLSNVSNEVYSDWSYIRNHISEEYDIEYTGRLKIGTEQYSKQKQEYLRKQKNYSLGFLINCLKDDKITEYLSNNMKRTEIVEKIKMDLDNFQSIQIQEDYKYLIKNENSIAKIKKLLDDTKLLQEFMKTLVPKDKTIEKDNEFYSELIAYYDVFRDIIPLYNKTRNYLTQKPYSNEKIKINFACPTLLNGWDLNKEEANLGVILLKDEKYYLGIMNPYCKKIFNVDNRDSDTNNNYKKMEYKLLPGPNKMLPKVFFSKSRISEFAPSDELLEKYNKGYHKKGKDFDVNFCHELINFYKKSLNKHEDWKNFNFKFKDTAEYNDISEFYREVEEQGYKIEYKEYSEQYINELVERGELYLFQIYNKDFSEYSKGRQNLHTMYWKAVFDPENIKDTIYKLNGNAEIFYRKKSIDEKITHPANMPVANKNENTIKAGKATSLFKYNLIKDKRYTVDKFQFHVPITMNFKNEKILNINQIVNKYLKYNDDVHVIGIDRGERNLLYVCVIDKDEKIVYQKSLNEIYNEYQGIQYSTNYHRLLNEKENEREQAREDWKNIENIKELKEGYMSQIIHILCELMRKYNAIIVIEDLNKGFKNSRIKVEKQVYQKFEQMFINKLNYMVFKDVPKLEEGGILNAYQLTNKFESFTKLGKQSGILYYIPAWCTSKIDPTTGFINRFYIKYENFEKSKEFVNRIDDIRYNPDEGLFEFDIDYSKFSDRLNETRNKWTLCSYGERVYTHKNNKEIWVDDKIQLTDEFIKLFKKYNIDLNNIKNEISGKADIEFFKGGEDSLGFLQLFKLMVQMRNSITGKEEDNLISPVRNNKGIFFDTKAKIKGLPEDADANGAYNIARKGLMLIEQMKKTDDDKLNKIKYNITEKEWLDYIQNRGV

SEQ ID NO: 434 - protein, 1226 aa, unidentified
  REGION 1..1226: note = Cas Enzyme sequence
MFNLYSNLRKLYPVQKTLRFELIPQGKTKENMEKEGIIREDEHRAKIYNKVKKYCDEYHKIFIEDCLKDIKLDNLNKYYELYSIDKKDEDQKEEFTKTQEKLRKQISESFKNNNKYKGLFQKDIIDTYLINMYKEDKQKLQDINEFNKFTTYFTGYNKNRENMYLEEEKSTAIAYRLINENLPTFVDNLKIYNKLLKFIPEIIEKIHIELAEYIQVNSIDEIFDINYYNDVLTQKGIECYNIIISGKTKDEGTKIKGINEYINEYNQTHTNKIPKLRELYKQILSDIDTASFKFDVIEDDIQLLDSINLYYQQIFPIISKVNELFSKINNYNLDLIYINNDGTLSNVSNEIYSDWSYIRNHISEKYDTEYTGRLKVGTEQYSKQKQEYLRKQRNYSLRFLINCMKDDKIIEYLSNNMQQTEIVEKIKMDFDNFKSIQIQEDYKCLIKSENSIAKIKKLLDDTKLLQVFMKTLIPKDKTIEKDNEFYSELISYYDVFRDIIPLYNKTRNYLTQKPYSNEKIKINFACPTLLNGWDLNKEEANLGVILLKDEKYYLGIMNPYCKKIFNVDNRDSDTNNNYKKMEYKLLPGPNKMLPKVFFSKSRINEFAPSDELLEKYNKGYHKKGKDFDINFCHELIDFYKKSLNKHEDWKNFNFKFKNTVEYNDISEFYREVEEQGYKIEYKEYSEKYINELVERGELYLFQIYNKDFSEYSKGKQNLHTMYWKAVFDPENIKDTIYKLNGNAEIFYRKKSIDEKITHPANIPVANKNENTIKAGKITSLFKYNLIKDKRYTVDKFQFHVPITMNFKSEKILNINQIVNKYLKYNDDIHVIGIDRGERNLLYVCVIDKDEKIVYQKSLNEIYNEYQGIQYSTNYHRLLNEKENKREQAREDWKNIENIKELKEGYMSQIIHILCELMRKYNAIIVIEDLNKGFKNSRIKVEKQIYQKFEQMFINKLNYVVFKDVPKLEEGGILNAYQLTNKFESFTKLGKQSGILYYIPAWCTSKIDPTTGFINRFYIKYENLEKSREFVNRMDNIRYNLDEELFEFDIDYSKFSDRLNDTKNKWTLCSYGERVYTHKNNKEIWVDDKIQLTDEFIKLFEKYKIDLNNIKNEIIEKADIEFFKGGENSLGFLQLFKLMVQMRNSITGQEEDNLISPVRNNEGIFFDTKAKIKGLPEDADANGAYNIARKGLMLIEQMKRTDDDKLNKIKYDITEKEWLNYIQNRGV

SEQ ID NO: 435 - protein, 1226 aa, unidentified
  REGION 1..1226: note = Cas Enzyme sequence
MFNLYNNLRKLYPVQKTLRFELIPQGKTKENMEKEGIIREDEHRAKIYNKVKKYCDEYHKIFIEDCLKDIKLDNLNKYYELYSIDKKDEDQKEGFTKTQEKLRKQISESFKNNNKYKGLFQKDIIDTYLINMYKEDKQKLQDINEFNKFTTYFTGYNKNRENMYLEEEKSTAIAYRLINENLPTFVDNLKIYNKLLKFIPEIIEKIHIELAEYIQVNSIDEIFDINYYNDVLTQKGIECYNIIISGKTKDEGTKIKGINEYINEYNQTHTNKIPKLRELYKQILSDIDTASFKFDVIEDDIQLLDSINLYYQQIFPIISKVNELFSKINNYNLDLIYINNDGTLSNVSNEIYSDWSYIRNHISEKYDTEYTGRLKVGTEQYSKQKQEYLRKQRNYSLRFLINCMKDDKIIEYLSNNMQQTEIVEKIKMDFDNFKSIQIQEDYKCLIKSENSIAKIKKLLDDTKLLQVFMKTLIPKDKTIEKDNEFYSELISYYDVFRDIIPLYNKTRNYLTQKPYSNEKIKINFACPTLLNGWDLNKEEANLGVILLKDEKYYLGIMNPYCKKIFNVDNRDSDTNNNYKKMEYKLLPGPNKMLPKVFFSKSRINEFAPSDELLEKYNKGYHKKGKDFDINFCHELIDFYKKSLNKHEDWRNFNFKFKNTVEYNDISEFYREVEEQGYKIEYKEYSEKYINELVERGELYLFQIYNKDFSEYSKGKQNLHTMYWKAVFDPENIKDTIYKLNGNAEIFYRKKSIDEKITHPANIPVANKNENTIKAGKITSLFKYNLIKDKRYTVDKFQFHVPITMNFKSEKILNINQIVNKYLKYNDDIHVIGIDRGERNLLYVCVIDKDEKIVYQKSLNEIYNEYQGIQYSTNYHRLLNEKENKREQAREDWKNIENIKELKEGYMSQIIHILCELMRKYNAIIVIEDLNKGFKNSRIKVEKQIYQKFEQMFINKLNYVVFKDVPKLEEGGILNAYQLTNKFESFTKLGKQSGILYYIPAWCTSKIDPTTGFINRFYIKYENLEKSKEFVNRMDNIRYNLDEELFEFDIDYSKFSDRLNDTKNKWTLCSYGERVYTHKNNKEIWVDDKIQLTDEFIKLFEKYKIDLNNIKNEIIEKADIEFFKGGENSLGFLQLFKLMVQMRNSITGQEEDNLISPVRNNEGIFFDTKAKIKGLPEDADANGAYNIARKGLMLIEQMKRTDDDKLNKIKYDITEKEWLNYIQNRGV

SEQ ID NO: 436 - protein, 1226 aa, unidentified
  REGION 1..1226: note = Cas Enzyme sequence
MFNLYSNLRKLYPVQKTLRFELIPQGKTKENMEKEGIIREDEHRAKIYNKVKKYCDEYHKIFIEDCLKDIKLDNLNKYYELYSIDKKDEDQKEGFTKTQEKLRKQISESFKNNNKYKGLFQKDIIDTYLINMYKEDKQKLQDINEFNKFTTYFTGYNKNRENMYLEEEKSTAIAYRLINENLPTFVDNLKIYNKLLKFIPEIIEKIHIELAEYIQVNSIDEIFDINYYNDVLTQKGIECYNIIISGKTKDEGTKIKEINEYINEYNQTHTNKIPKLRELYKQILSDIDTASFKFDVIEDDIQLLDSINLYYQQIFPIISKVNELFSKINNYNLDLIYINNDGTLSNVSNEIYSDWSYIRNHISEKYDTEYTGRLKVGTEQYSKQKQEYLRKQRNYSLRFLINCMKDDKIIEYLSNNMQQTEIVEKIKMDFDNFKSIQIQEDYKCLIKSENSIAKIKKLLDDTKLLQVFMKTLIPKDKTIEKDNEFYSELISYYDVFRDIIPLYNKTRNYLTQKPYSNEKIKINFACPTLLNGWDLNKEEANLGVILLKDEKYYLGIMNPYCKKIFNVDNRDSDTNNNYKKMEYKLLPGPNKMLPKVFFSKSRINEFAPSDELLEKYNKGYHKKGKDFDINFCHELIDFYKKSLNKHEDWRNFNFKFKNTVEYNDISEFYREVEEQGYKIEYKEYSEKYINELVERGELYLFQIYNKDFSEYSKGKQNLHTMYWKAVFDPENIKDTIYKLNGNAEIFYRKKSIDEKITHPANIPVANKNENTIKAGKITSLFKYNLIKDKRYTVDKFQFHVPITMNFKSEKILNINQIVNKYLKYNDDIHVIGIDRGERNLLYVCVIDKDEKIVYQKSLNEIYNEYQGIQYSTNYHRLLNEKENKREQAREDWKNIENIKELKEGYMSQIIHILCELMRKYNAIIVIEDLNKGFKNSRIKVEKQIYQKFEQMFINKLNYVVFKDVPKLEEGGILNAYQLTNKFESFTKLGKQSGILYYIPAWCTSKIDPTTGFINRFYIKYENLEKSKEFVNRMDNIRYNLDEELFEFDIDYSKFSDRLNDTKNKWTLCSYGERVYTHKNNKEIWVDDKIQLTDEFIKLFEKYKIDLNNIKNEIIEKADIEFFKGGENSLGFLQLFKLMVQMRNSITGQEEDNLISPVRNNEGIFFDTKAKIKGLPEDADANGAYNIARKGLMLIEQMKRTDDDKLNKIKYDITEKEWLNYIQNRGV

SEQ ID NO: 437 - protein, 1226 aa, unidentified
  REGION 1..1226: note = Cas Enzyme sequence
MFNLYSNLRKLYPVQKTLRFELIPQGKTKENMEKEGIIREDEHRAKTYNKVKKYCDEYHKIFIEDCLKDIKLDNLNKYYELYSIDKKDEDQKEGFTKTQEKLRKQISESFKNNNKYKGLFQKDIIDTYLINMYKEDKQKLQDINEFNKFTTYFTGYNKNRENMYLEEEKSTAIAYRLINENLPTFVDNLKIYNKLLKFIPEIIEKIHIELAEYIQVNSIDEIFDINYYNDVLTQKGIECYNIIISGKTKDEGTKIKGINEYINEYNQTHTNKIPKLRELYKQILSDIDTASFKFDVIEDDIQLLDSINLYYQQIFPIISKVNELFSKINNYNLDLIYINNDGTLSNVSNEIYSDWSYIRNHISEKYDTEYTGRLKVGTEQYSKQKQEYLRKQRNYSLRFLINCMKDDKIIEYLSNNMQQTEIVEKIKMDFDNFKSIQIQEDYKCLIKSENSIAKIKKLLDDTKLLQVFMKTLIPKDKTIEKDNEFYSELISYYDVFRDIIPLYNKTRNYLTQKPYSNEKIKINFACPTLLNGWDLNKEEANLGVILLKDEKYYLGIMNPYCKKIFNVDNRDSDTNNNYKKMEYKLLPGPNKMLPKVFFSKSRINEFAPSDELLEKYNKGYHKKGKDFDINFCHELIDFYKKSLNKHEDWKNFNFKFKNTVEYNDISEFYREVEEQGYKIEYKEYSEKYINELVERGELYLFQIYNKDFSEYSKGKQNLHTMYWKAVFDPENIKDTIYKLNGNAEIFYRKKSIDEKITHPANIPVANKNENTIKAGKITSLFKYNLIKDKRYTVDKFQFHVPITMNFKSEKILNINQIVNKYLKYNDDIHVIGIDRGERNLLYVCVIDKDEKIVYQKSLNEIYNEYQGIQYSTNYHRLLNEKENKREQAREDWKNIENIKELKEGYMSQIIHILCELMRKYNAIIVIEDLNKGFKNSRIKVEKQIYQKFEQMFINKLNYVVFKDVPKLEEGGILNAYQLTNKFESFTKLGKQSGILYYIPAWCTSKIDPTTGFINRFYIKYENLEKSREFVNRMDNIRYNLDEELFEFDIDYSKFSDRLNDTKNKWTLCSYGERVYTHKNNKEIWVDDKIQLTDEFIKLFEKYKIDLNNIKNEIIEKADIEFFKGGENSLGFLQLFKLMVQMRNSITGQEEDNLISPVRNNEGIFFDTKAKIKGLPEDADANGAYNIARKGLMLIEQMKRTDDDKLNKIKYDITEKEWLNYIQNRGV

SEQ ID NO: 438 - protein, 1226 aa, unidentified
  REGION 1..1226: note = Cas Enzyme sequence
MFNLYSNLRKLYPVQKTLRFELIPQGKTKKNMEKEGIIREDEHRAKIYNKVKKYCDEYHKIFIEDCLKDIKLDNLNKYYELYYIDKKDEDQKEEFTKTQEKLRKQISESFKNNNKYKGLFQKDIIDTYLINMYKEDKQKLQDINEFNKFTTYFTGYNKNRENMYLEEEKSTAIAYRLINENLPTFVDNLKIYNKLLKFIPEIIEKIHIELAEYIQVNSIDEVFDINYYNDVLTQKGIECYNIIISGKTKDEGTKIKGINEYINEYNQTHTNKIPKLRELYKQILSDIDTASFKFDVIEDDIQLIDSINLYYQQIFPIISKVNELFSKINSYNLDLIYINNDGTLSNVSNEIYSDWSYIRNHISEKYDTEYTGRLKVGTEQYSKQKQEYLRKQRNYSLSFLINCMKDDKIIEYLSNNMQQTEIVEKIKMDFDNFKSIQIQEDYKCLIKSENSIAKIKKLLDDTKLLQVFMKTLVPKDKTIEKDNEFYSELISYYDVFRDIIPLYNKTRNYLTQKPYSNEKIKINFACPTLLNGWDLNKEEANLGVILLKDEKYYLGIMNPYCKKIFNVDNRDSDTNNNYKKMEYKLLPGPNKMLPKVFFSKSRINEFAPSDELLEKYNKGYHKKGKDFDINFCHELIDFYKKSLNKHEDWKNFNFKFKETVEYNDISEFYREVEEQGYKIEYKEYSEKYINELVERGELYLFQIYNKDFSEYSKGKQNLHTMYWKAVFDPENIKDTIYKLNGNAEIFYRKKSIDEKITHPANIPVANKNENTIKAGKITSLFKYNLIKDKRYTVDKFQFHVPITMNFKSEKILNINQIVNKYLKYNDDIHVIGIDRGERNLLYVCVIDKDEKIVYQKSLNEIYNEYQGIQYSTNYHRLLNEKENKREQAREDWKNIENIKELKEGYMSQIIHILCELMRKYNAIIVIEDLNKGFKNSRIKVEKQIYQKFEQMFINKLNYVVFKDVPKLEEGGILNAYQLTNKFESFTKLGKQSGILYYIPAWCTSKIDPTTGFVNRFYIKYENLEKSREFVNRMDNIRYNLDEELFEFDIDYSKFSDRLNDTKNKWTLCSYGERVYTHKNNKEIWVDDKIQLTDEFIKLFEKYKIDLNNIKNEIIEKADIEFFKGGENSLGFLQLFKLMVQMRNSITGQEEDNLISPVRNNEGIFFDTKAKIKGLPEDADANGAYNIARKGLMLIEQMKRTDDDKLNKIKYDITEKEWLNYIQNRGV

SEQ ID NO: 439 - protein, 1226 aa, unidentified
  REGION 1..1226: note = Cas Enzyme sequence
MKEHTFNQFVKAGPITKAFNFEIIPEGKTRETIENLGLLDDDAHFRECTKAATPYIDAVVRNIADKALSKLDYDFNKLAIVKDDKKKREKEEIVLEKAIARCVKENLPTDMKSTKDIMSAAFLSTVLPAEVKKVPTLTTEEKDKAGVLFEELKGKTQLLTKFLQTRVIALNTWLPQRVIENFYRYTDNFDTINNIISEKLPVENIEELPSMLLPSYYSQFVTQEGINAYNLHISGIYTEDKVVMQGLNEIINIHNQVAKKNGKTQIAKMKPLYKQILMPSEKSFTIEALNSDKDCVDVVRRALAQVDNAESLVNHIAKARTESMVVRGSRLHGLSYIGLGSHAELPNSILEIKTEEFLAEHKKLTKKGERELNGIAAKVRSSTYSLDYIEKVAPGITASYKEEVSDTMKLLKELAVSTERVISDPSNISTSKTALKTIKDFFDTFTELRTMIGIVGRSDNKMGENDFYNRYDELNACLTVTWKAENLFRNYVTRKPVDAHAKTETVLGTALRKTSLWWKKGDLLKVPSQLMTCEDGKYYYYLPLPVSIGGRNIDPQGKDDNCMLMSQIKVQDAVKWIPAQTFTKAKKYFSENQSKDTYTIEEKVHEPVTITREVSEIYERKLHTKGALQNGEETEEEYRKNLLAVLNVIDTFARNYVLYDSFEIKTKPIEEYEDAKQYYDELNLCLTPVIEWVTGNKRLLDEGVANGSLLKFLIHSRNLYAPAEYTEARKTSYTKMLSFILSPANKGQITLNSRPVLMYRPAVISEERIVKHKKGSILVSKNTTRGEHIPDEIYNELKLYFNQNKPLSDEGAQYFNAHKNEISHHKAETTIIKDKRYTMEKFFLNMSYKKNADTIESKTLSYDLNKKMKAYAAAGCNVLSVIRSRNDLVYVSVVDQNNNVLEERSLNVIDGVDFAGRIKEAAQIKQKDKAENWKYDRKIKDLKTGFISRAISEIVSLAVKYEAVICIEYLSQNFKDKYSALDDTVYKSFETALVSRLSDLWFKNIDEGKAGSMSNPLQLATNNGNSFQDGILFYTGQKYIKKTDPETGYADLFDTRFITTITNKKSFFSKFSSIRYNAETKKIDMEFDYGNFRTFALTSKTKWKISIGGEGTIYQREQKCNVYEPQVSKILVLAMEQSGVALTSDLSDLARNGELPNNVTNALWDVFTVTRTGIVKAHNNKSAVFISPVTGKKYLASHVAALNLAKKFRIELSEGRKEEWIDYVQV

SEQ ID NO: 440 - protein, 1226 aa, unidentified
  REGION 1..1226: note = Cas Enzyme sequence
MFNLYSNLRKLYPVQKTLRFELIPQGKTKKNMEKEGIIREDEHRAKIYNKVKKYCDEYHKIFIEDCLKDIKLDNLNKYYELYYIDKKDEDQKEEFTKTQEKLRKQISESFKNNNKYKGLFQKDIIDTYLINMYKEDKQKLQDINEFNKFTTYFTGYNKNRENMYLEEEKSTAIAYRLINENLPTFVDNLKIYNKLLKFIPEIIEKIHIELAEYIQVNSIDEVFDINYYNDVLTQKGIECYNIIISGKTKDEGTKIKGINEYINEYNQTHTNKIPKLRELYKQILSDIDTASFKFDVIEDDIQLIDSINLYYQQIFPIISKVNELFSKINSYNLDLIYINNDGTLSNVSNEIYSDWSYIRNHISEKYDTEYTGRLKVGTEQYSKQKQEYLRKQRNYSLSFLINCMKDDKIIEYLSNNMQQTEIVEKIKMDFDNFKSIQIQEDYKCLIKSENSIAKIKKLLDDTKLLQVFMKTLVPKDKTIEKDNEFYSELISYYDVFRDIIPLYNKTRNYLTQKPYSNEKIKINFACPTLLNGWDLNKEEANLGVILLKDEKYYLGIMNPYCKKIFNVDNRDSDTNNNYKKMEYKLLPGPNKMLPKVFFSKSRINEFAPSDELLEKYNKGYHKKGKDFDINFCHELIDFYKKSLNKHEDWKNFNFKFKETVEYNDISEFYREVEEQGYKIEYKEYSEKYINELVERGELYLFQIYNKDFSEYSKGKQNLHTMYWKAVFDPENIKDTIYKLNGNAEIFYRKKSIDEKITHPANIPVANKNENTIKAGKITSLFKYNLIKDKRYTVDKFQFHVPITMNFKSEKILNINQIVNKYLKYNDDIHVIGIDRGERNLLYVCVIDKDEKIVYQKSLNEIYNEYQGIQYSTNYHKLLNEKENEREQAREDWKNIENIKELKEGYMSQIIHILCELMRKYNAIIVIEDLNKGFKNSRIKVEKQIYQKFEQMFINKLNYVVFKDVPKLEEGGILNAYQLTNKFESFTKLGKQSGILYYIPAWCTSKIDPTTGFINRFYIKYENLEKSREFVNRIDNIRYNLDEELFEFDIDYSKFSDRLNDTKNKWTLCSYGERVYTHKNNKEIWVDDKIQLTDEFIKLFEKYKIDLNNIKNEIIEKADIEFFKGGENSLGFLQLFKLMVQMRNSITGQEEDNLISPVRNNEGKFFDTKAKIKGLPEDADANGAYNIARKGLMLIEQMKRTDDDKLNKIKYDITEKEWLNYIQNRGV

SEQ ID NO: 441 - protein, 1226 aa, unidentified
  REGION 1..1226: note = Cas Enzyme sequence
MSNLYRNLHNFYSVQKTLRFELIPQGKTKENMEKEGILKADEHRAEIYSKVKKYCDEYHKLFIDKCLKNIRLNELNKYYELYSVVKKDEKQKEEFIKIQEKLRKQISESFRNNNEYKGLFQKDIINIYLITMYKDDKEKIKDISEFNKFTTYFSGYNKNRENMYSEEEKPTGIAYRLINENLPTFIENFKIYNKVIKFMPEIINKIHTDLMEYIQVEDIDEIFDINYYNEVLTQKGIECYNIIISGKSKSNGEKIKGLNEYINEFNQKHNEKIPKLQELYKQILSDTDTASFKFDTIESDEELLNNIESYYTKLLPVFNKINQLFAKFNKYNLDLIFINNDGTLNTISNEIYKDWSYIRNRIGERYDIEYTGKLKKDTEQYSKQKQEYMKKQKQYSLKFLNDSLRDNYLIEYISNYIEQSKIMEKMKTDFTEVQKIESRGDTKQLIKDENSIVKIKNLLDDIKFLQEFAKILVLKDRTIEKDAEFYSELMPYYNELKDIIPLYNKTRNYLTQKPYSTEKIKLNFECPTLLNGWDLNKEEANLGVILLKNEKYYLGIINPYCKKIFKIQEKDSNSENNYKKMEYKLLPGPNKMLPKVFFSKSKIDEFMPSDELLEKYNKGCHKKGKDFDINFCHELIDFYKTSLNKHKDWKKFDFKFKSTSEYNDISEFYKDVEEQGYKIEYSEYSEKYINELVDRGELYLFQIYNKDFSEYSKGRPNLHTMYWKAVFDIENIKNPVYKLNGEAEIFYRKKSLERKITHSANEPVANKNENTIKSGKPTSLFKYDLIKDKRYTVDKFQFHVPITMNFKSEKMFNINQVVNKYLKYNDDINVIGIDRGERNLLYVCVIDKNEKIVYQKSLNEIVNEYKSIKYSTNYHTLLNKKEKEREIAREDWKNIENIKELKEGYMSQVIHILVELMRKYNAIIVIEDLNKGFKNSRIKVEKQVYQKFEKMFIDKLNYLVFKDEPKESEGGVLNAYQLTNKFETFNKIGKQSGVLYYIPAWCTSKIDPTTGFINRFYIKYENLDKSKEFINKIDDISYNSSEKLFEFDIDYSKFTDRLNETRNKWTLYTNGERIYTYRNDKGEWIDKKIQLTNEFNKLFEKYSINLDNIKNEILEKANIEFFKGNNETLGFIQLFKLMVQMRNSLTGKEEDNLISPVKNSNGKFFNTNEQIEGLPKDADANGAYNIARKGLMLIEQMRNTEDDKLNKIKYNITEKEWLDYVQNRGM

SEQ ID NO: 442 - protein, 1227 aa, unidentified
  REGION 1..1227: note = Cas Enzyme sequence
MKEQFINCYPLSKTLQFSLIPVGKTDDNFNKKLLLERDKQRAENYEKVKGYIDRFHKEYIESVLVNARVEKIDEYADLYWKSNKDDSDAKAMESLENDMRKQISKQLKSNARYKRLFGKELICEDLPSFLTDKDERETVECFRSFTTYFKGFNTNRENMYSSDEKSTAIAYRCINDNLPRFLDNVKSFQKVFDNLSDETITKLNTDLYNTFGRNIEDIFSVDYFEFVLAQSGIDIYNSMIGGYTCSDGTKIQGLNECINLYNKQDAKNEKSKRLPLMKQLYKQILSEKGSVSFIPEKFNSDNEVLLSIEDYYSSHIGDFDLLTELLQSLNTYNANGIFVKSGAAVSDISNGAFNSWNVLRLAWNEKYEALHPVTSKTKLDNYIEKRDKIYKAIKSFSLFELQNLGNENGNEITDWYISSSKECNSKIKEAYLQARELLKSDYEKSYNKRLSKNGKATELVKNLLDAIKDFQHLVKSLNGTGKEENKDELFYGKLTSYYDSVADIDRLYDKVRNYITQKPYSKDKIKLNFDNPQLLGGWDKNKESDYRTVLLRKDDFYYLAVMDKSHSKAFVDAPNITSEDEDYYEKMEYKLLPGPNKMLPKVFFAAKNIDTFQPSDRILDIRKRESFKKGATFNKSECHEFIDYFKNSIEKHDDWSQFGFEFTPTENYNDISEFYREISDQGYSVSFNKISKSYVDELVDNGYIYLFQIYNKDFSKYSKGTPNLHTLYFKMLFDERNLSNVVYKLNGEAEMFYREASINDKEKITHQANQPIKNKNPDNEKKESTFEYDIIKDKRFTKRQFSLHVPITINFKAHGQEFLNYDVRKAVKYKDDNYVIGIDRGERNLIYISVIDSNGKIVEQMSLNEIISDNGHRVDYQKLLDTKEKERDKARKNWTSVENIKELKEGYISQVVHKICELVVKYDAVIAMEDLNFGFKRGRFPVEKQVYQKFENMLISKLNLLIDKKADPTEDGGLLRAYQLTNKFDGVNKGKQNGIIFYVPAWDTSKIDPVTGFVNLLKPKYTSVSEAKKLFETIDDIKYNANTDMFEFCIDYGKFPRCNSDYKKTWTVCTNSSRILTCRNKEKNDMWDNKQIVLTDEFKSLFGEFGIDYKGNLKTSILSISNADFYRRLIKLLSLTLQMRNSITGSTLPEDDYLISPVANDRGEFYGSRNYKGTNAALPCDADANGAYNIARKALWAISVLKSTPDDMLNKANLSITNAEWLEYTQK

SEQ ID NO: 443 - protein, 1227 aa, unidentified
  REGION 1..1227: note = Cas Enzyme sequence
MADQNYWADFTNLYALSKTLRFELKPVGPTLDHMKANDILMHDEQRAAAYQEIKPLFDDLHAEFITDSLSATAIDWTTYFEVYQRFRREQDKGQKRAIQKEINGIEKDLRSLVTKYFSTTADTWKLRHNSSHEKPVLLDKSFKILTENGILKVLAEKHKDEPDHLAAIKLFEGFFTYFTGFNQNRENYYSADEETTAVSHRIVNENLPIFCSNILQHQKYTAPLGFVTDASIFTLGEHNSVLVQTGIDGYNKQIGELNKTINLHNQQHPGEKRIPQFKTLHKQIGGKVSKESLFIVIDEKDYTLEQALHEFIEQSTAKNQQIVELIRTLSSKSDLSQIYLNRKALNTISNKFFSEGTWHLLADRLRDAGIFHLDKKTGDLKQPDFIPLSDIQTVLDAQTGGPSTLFKKTFEQHFRSATNSSILIKILQGEFQTNAELFKVSAAELQKLLSEKLDKNNEKHKETVKNFADRALTLLQMVRYFVVKEGKVSGTDSDFYETLKNILEDYRCSGWYDAIRNYLTQKPYSTQKMKLNFGCSTLCGGWDLNKESSNLAIMLVDPNGSHFLAIARKDANFVFDKRKNPALFATSEGTETWQKMEYKLLPGPNKMLPKVFFAKKNMISSDNPKGLFHIPDRVLDIRERESFKKGDSFDRDDLNAWIDFCKENIDRYPDWKVFDFHFLPSEQYADVSRFYNHVEKQGYRLDFVGVNKKTLSQMVTEGKVYLFQIANKDLTNTTTAEQGKKQNIHTMIWKTLFEDKTSTIKLNGEAELFFRPASLEKREPVTGQNSKQTINHAIKNKRYTEDKFLFHVPITLNFSLHDERINEKINAHINSSGNLHIIGIDRGEKHLAYYSVVDLNGHIVEQGTLNQDLLGKDYAAKLDEVAGNRTEARKNWQTIGTIKELKEGYISQVVRRIADLVLKYNALVVLEDLNIGFKRGRQKIEKSVYQKLELALAKKFNFLVQKDALSGKAGSVTRALQLTPPTNTFGDIRGKQWGIMLYTRAAYTSVTDPVTGFRKNIYLRKGAKEDMRDAILSFREIGFDPGKEAYYFSYDPADFAENKSLSRLWTMFSCVSRIRSEKDEHGIWVPREVDVTSNLNRLFTSHGIITRSPILPQIKNRAELDNKFYEELIWNINLILQLRNSNSAKGEDFIHSPVVPFFDSRVYEQEGRQPNGIDNTNMPTCGDANGAYNIARKGLMMVERIKTNMEKPDLYIPDEEWDAFSQKQTGR

SEQ ID NO: 444 - protein, 1227 aa, unidentified
  REGION 1..1227: note = Cas Enzyme sequence
MKEQFINCYPLSKTLQFSLIPVGKTDDNFNKKLLLERDKQRAENYEKVKGYIDRFHKEYIESVLVNARVEKIDEYADLYWKSNKDDSDAKAMESLENDMRKQISKQLKSNARYKRLFGKELICEDLPSFLTDKEERETVECFRSFTTYFKGFNTNRENMYSSDEKSTAIAYRCINDNLPRFLDNVKSFQKVFDNLSDETITKLNTDLYNTFGRNIEDIFSVDYFEFVLAQSGIDIYNSMIGGYTCSDGTKIQGLNECINLYNQQVAKNEKSKRLPLMKPLYKQILSEKDSVSFIPEKFNSDNEVLLSIEDYYSSHIGDIDSLTELLQSLNTYNANGIFVKSGAAVSDISNGAFNSWNVLRLAWNEKYEALHPVTSKTKLDNYIEKRDKIYKAIKSFSLFELQNLGNENGNEITDWYISSSKECNSKIKEAHLQARELLKSDYEKSYNKRLSKNGKATELVKNLLDAIKDFQHLVKSLNGTGKEENKDELFYGKLTSYYYSIADIDRLYDKVRNYITQKPYSKDKIKLNFDNPQLLGGWDKNKESDYRTVLLRKDDFYYLAVMDKSHSKAFVDAPKITSEDEDYYEKMEYKLLPGPNKMLPKVFFAAKNIDTFQPSDRILDIRKRESFKKGATFNKSECHEFIDYFKNSIEKHDDWSQFGFEFTPTENYNDISEFYREISDQGYSVSFNKISKSYVDELADNGYIYLFQIYNKDFSKYSKGTPNLHTLYFKMLFDERNLSNVVYKLNGEAEMFYREASINDKEKVTHQANQPIKNKNPDNEKKESTFEYDIIKDKRFTKRQFSLHVPITINFKAHGQEFLNYDVRKAVKYKDDNYVIGIDRGERNLIYISVIDSNGKIVEQMSLNEIISDNGHRVDYQKLLDTKEKERDKARKNWTSVENIKELKEGYISQVVHKICELVVKYDAVIAMEDLNFGFKRGRFPVEKQVYQKFENMLISKLNLLIDKKADPTEDGGLLRAYQLTNKFDGVNKGKQNGIIFYVPAWDTSKIDPVTGFVNLLKPKYTSVSEAKKLFETIDAIKYNANTDMFEFCIDYGKFPRCNSDHKKTWTVCTNSSRILTCRNKEKNNMWDNKQIVLTDEFKSLFGEFGIDYKGNLKTSILSISNADFYRRLIKLLSLTLQMRNSITGSTLPEDDYLISPVANDRGEFYDSRNYKGMNAALPCDADANGAYNIARKALWAISVLKSTPDDMLNKANLSITNAEWLEYTQK

SEQ ID NO: 445 - protein, 1227 aa, unidentified
  REGION 1..1227: note = Cas Enzyme sequence
MKEQFINCYPLSKTLQFSLIPVGKTDDNFNKKLLLERDKQRAENYEKVKGYIDRFHKEYIESVLVNARVEKIDEYADLYWKSNKDDSDAKAMESLENDMRKQISKQLKSNARYKRLFGKELICEDLPSFLTDKDERETVECFRSFTTYFKGFNTNRENMYSSDEKSTAIAYRCINDNLPRFLDNVKSFQKVFDNLSDETITKLNTDLYNTFGRNIEDIFSVDYFEFVLAQSGIDIYNSMIGGYTCSDGTKIQGLNECINLYNQQAAKNEKSKRLPLMKQLYKQILSEKDSVSFIPEKFNSDNEVLLSIEDYYTAHIGDIDSLTELLQSLNTYNANGIFVKSGAAVSDISNGAFNSWNVLRLAWNEKYEALHPVTSKTNLDNYIEKRDKIYKAIKSFSLFELQSLGNENGNEITDWYISSSKECNSKIKEAYLQARELLKSDYEKSYNKRLSKNGKATELVKNLLDAIKDFQHLVKSLNGTGKEENKDELFYGKLTSYYDSITDIDRLYDKVRNYITQKPYSKDKIKLNFDNPQLLGGWDKNKESDYRTVLLRKDDFYYLAVMDKLHSKAFVDAPNITSKDEDYYEKMEYKLLPGPNKMLPKVFFAAKNIDTFQPSDRILDIRKRESFKKGATFNKSECHEFIDYFKNSIEKHDDWSQFGFEFTPTENYNDISEFYREISDQGYSVSFNKISKSYVDELVDNGYIYLFQIYNKDFSKYSKGTPNLHTLYFKMLFDERNLSNVVYKLNGEAEMFYREASINDKEKITHQANQPIENKNPDNEKKESTFEYDIIKDKRFTKRQFSLHVPITINFKAHGQEFLNYDVRKAVKYKDDNYVIGIDRGERNLIYISVIDSNGKIVEQMSLNEIISDNGHRVDYQKLLDTKEKERDKARKNWTSVENIKELKEGYISQVVHKICELVVKYDAVIAMEDLNFGFKRGRFPVEKQVYQKFENMLISKLNLLIDKKADPTEDGGLLRAYQLTNKFDGVNKAKQNGIIFYVPAWDTSKIDPVTGFVNLLKPKYTSVSEAKKLFETIDDIKYNANTDMFEFCIDYGKFPRCNSDYKNTWTVCTNSSRILTCRNKEKNNMWDNKQIVLTDEFKSLFGEFGIDYKGNLKTSILSISNADFYRRLIKLLSLTLQMRNSITGSTLPEDDYLISPVANDRGEFYDSRNYKGMNAALPCDADANGAYNIARKALWAINVLKSTPDDMLNKANLSITNAEWLEYTQK

SEQ ID NO: 446 - protein, 1227 aa, unidentified
  REGION 1..1227: note = Cas Enzyme sequence
MKEQFINCYPLSKTLQFSLIPVGKTKDNFNKKLLLERDKQRAENYEKVKGYIDRFHKEYIESVLVNARGEKIDEYADLYWKSNKDDSDAKAMESLENDMRKQISKRLKSNARYKRLFGKELICEDLPSFLTDKEERETVECFRSFTTYFKGFNTNRENMYSSDEKSTAIAYRCINDNLPRFLDNVKSFQKVFDNLSDETITKLNTDLYNTFGRNIEDIFSVDYFEFVLAQSGIDIYNSMIGGYTCSDGTKIQGLNECINLYNQQVAKNEKSKRLPLMKPLYKQILSEKDSVSFIPEKFNSDNEVLLAIEDYYAAHIGDIDSLTELLQSLDLYNTDGIFVKSGAAVSDISNGAFNSWNVLRLAWNEKYEALHPVTSKTKLDNYIEKRDKIYKAIKSFSLFELQSLGNENGNEITDWYISSSKECNSKIKEAYLQARELLKSDYEKSYNKRLSKNGKATELVKNLLDAIKDFQHLVKSLNGTGKEENKDELFYGKLTSYYDSITDIDRLYDKVRNYITQKPYSKDKIKLNFDNPQLLGGWDKNKESDYRTVLLRKDDFYYLAVMDKLHSKAFVDAPNITSKDEDYYEKMEYKLLPGPNKMLPKVFFAAKNIDTFQPSDRILDIRKRESFKKGATFNKSECHEFIDYFKNSIEKHDDWSQFGFEFTPTENYNDISEFYREISDQGYSVSFNKISKSYVDELVDNGYIYLFQIYNKDFSKYSKGTPNLHTLYFKMLFDERNLSNVVYKLNGEAEMFYREASINDKEKITHQANQPIENKNPDNEKKESTFEYDIIKDKRFTKRQFSLHVPITINFKAHGQEFLNYDVRKAVKYKDDNYVIGIDRGERNLIYISVIDSNGKIVEQMSLNEIISDNGHRVDYQKLLDTKEKERDKARKNWTSVENIKELKEGYISQVVHKICELVVKYDAVIAMEDLNFGFKRGRFPVEKQVYQKFENMLISKLNLLIDKKADPTEDGGLLRAYQLTNKFDGVNKAKQNGIIFYVPAWDTSKIDPVTGFVNLLKPKYTSVSEAKKLFETIDDIKYNANTDMFEFCIDYGKFPRCNSDYKNTWTVCTNSSRILTCRNKEKNNMWDNKQIVLTDEFKSLFGEFGIDYKGNLKTSILSISNADFYRRLIKLLSLTLQMRNSITGSTLPEDDYLISPVANDRGEFYDSRNYKGMNAALPCDADANGAYNIARKALWAINVLKSTPDDMLNKANLSITNAEWLEYTQK

SEQ ID NO: 447 - protein, 1227 aa, unidentified
  REGION 1..1227: note = Cas Enzyme sequence
MKEQFINCYPLSKTLQFSLIPVGKTDDNFNKKLLLERDKQRAENYEKVKGYIDRFHKEYIESVLVNARVEKIDEYADLYWKSNKDDSDAKAMESLENDMRKQISKQLKSNARYKRLFGKELICEDLPSFLTDKEERETVECFRSFTTYFKGFNTNRENMYSSDEKSTAIAYRCINDNLPRFLDNVKSFQKVFDNLSDGTITKLNTDLYNTFGRNIEDVFSVDYFEFVLAQSGIDIYNSMIGGYTCSDGTKIQDLNECINLYNQQVAKNEKSKRLPLMKPLYKQILSEKDSVSFIPEKFNSDNEVLLSIEDYYSSHIGDFDLLTELLQSLNTYNANGIFVKSGAAVSDISNGAFNSWNVLRLAWNEKYEALHPVTSKTKLDNYIDKRDKIYKAIKSFSLFELQSLGNENGNEITDWYISSSKECNSKIKEAYLQARELLKSDYEKSYNKRLSKNGKATELIKNLLDAIKDFQHLVKSLNGTGKEENKDELFYGKLTSLYDSIADIDRLYDKVRNYITQKPYSKDKIKLNFDNPQLLGGWDKNKESDYRTVLLRKDDFYYLAVMDKSHSKAFVDTPDITSEDEDYYEKMEYKLLPGPNKMLPKVFFAAKNIDTFQPSDRILDIRKRESFKKGATFNKSECHEFIDYFKNSIEKHDDWSQFGFEFTPTENYNDISEFYREISDQGYSVSFNKISKSYVDELVNNGYIYLFQIYNKDFSKYSKGTPNLHTLYFKMLFDERNLSNVVYKLNGEAEMFYREASINDKEKITHQANQPIKNKNPDNEKKESTFEYDIIKDKRFTKRQFSLHVPITINFKAHGQEFLNYDVRKAVKYKDDNYVIGIDRGERNLIYISVIDSNGKIVEQMSLNEIISDNGHRVDYQQLLDTKEKERDKARKNWTSVENIKELKEGYISQVVHKICELVVKYDAVIAMEDLNFGFKRGRFPVEKQVYQKFENMLISKLNLLIDKKADPTEDGGLLRAYQLTNKFDGVNKAKQNGIIFYVPAWDTSKIDPVTGFVNLLKPKYTSVSEAKKLFETIDDIKYNANTDMFEFCIDYGKFPRCNSDYKKTWTVCTNSSRILTCRNKEKNNMWDNKQIVLTDEFKSLFVEFGIDYKGNLKTSILSISNADFYRRLIKLLSLTLQMRNSITGSTLPDDDYLISPVANDRGEFYDSRNYKGTNAELPCDADANGAYNIARKALWAISVLKSTPDDMLNKANLSITNAEWLEYTQK

SEQ ID NO: 448 - protein, 1227 aa, unidentified
  REGION 1..1227: note = Cas Enzyme sequence
MKEQLINCYSLSKTLRFSLIPVGKTEDNFNKKLLLESDKQRAENYENVKSYIDRFHKEYIKSALANARIEKINEYAALYWKSNKDDSDAKVMESLEDDIRKQISKQLTSTANFKRLFGKELICEDLPAFLTDENEKETVECFRSFTTYFNGFNTNRKNMYSSEKKSTAIAYRCVNDNLPRFLDNIKTFQKIFDNLSDENITKLNTGLYNRFGRKIEDIFSVDYFDFVLTQSGIDIYNSMIGVYTCSDGTKIQGLNEYINRYNRPVAKNEKSKRLPLMKPLRKQILSEKDSVSFIPEKFNSDNEVLLAIEEYYNNHISDIDSLTELLQSLNTYNANGIFIKSGAAVSDISNAAFNSWNVLRLAWNEKYEALHPVTSTTKIDKYIEKRDKVYKSIKSFSLFELQELGAENGNEITDWYISSINECNRKIKETYLQARELLESDYEKDYDKRLYKNEKATELVKNLLDAIKEFQQLVKPLNGTGKEENKDELFYGKFTSFYDSVADIDRLYDKVRNYITQKPYSKDKIKLNFDNPQLLGGWDKNKESDYRTVILRKNDFYYLAVMDKSHSKVFVNAPEITSEDEDYYEKMEYKLLPGPNKMLPKVFFASRNIDKFQPSDRILDIRKRESFKKGATFNKSECHEFIDYFKESIKKHDDWSKFGFEFSPTESYNDISEFYREVSDQGYYISFSKISKNYIDKLVENGYIYLFQIYNKDFSKYSKGTPNLHTLYFKMLFDERNLSNVVYKLNGEAEMFYREASINDKEKITHHANRPIKNKNPDNEKKESVFEYDIVKDKRFTKRQFSLHMSVTINFKAHGQEFLNYDVRKAVKYKDDNYVIGIDRGERNLIYIIVINSNGEIVEQMSLNEIIGDNGYSVDYQKLLDKKEKERDKARKNWTSVENIKELKEGYISQVVHKICELVVKYDAVIAMEDLNFGFKRGRFPVEKQVYQKFENMLISKLNLLIDKKAEPTENGGLLRAYQLTNKFDGVNKAKQNGIIFYVPAWDTSKIDPVTGFVDLLKPKYTSVSEAKKLFETIDDIKYNTNTDMFEFCIDYGKFPRCNSDFKKTWTVCTNSSRILSFRNEEKNNEWDNKQIVLTDEFKSLFNEFGIDYTSDLKTSILSISNADFYNRLIRLLSLTLQMRNSIIGSTLPEDDYLISPVANDRGEFYDSRNYKGSNAALPCDADANGAYNIARKALWAINVLKDTPDDMLQKAKLSITNAEWLEYTQR

SEQ ID NO: 449 - protein, 1227 aa, unidentified
  REGION 1..1227: note = Cas Enzyme sequence
MKEQFINCYPLSKTLQFSLIPVGKTEDNFNKKLLLERDKQRAENYEKVKGYIDRFHKEYIESVLVNARVEKIDEYADLYWKSNKDDSDAKAMESLENDMRKQISKQLKSNARYKRLFGKELICEDLPSFLTDKEERETVECFRSFTTYFKGFNTNRENMYSSDEKSTAIAYRCINDNLPRFLDNAKSFQKVFDNLSDETITKLNTDLYNTFGRNIEDIFSVDYFEFVLAQSGIDIYNSMIGGYTCSDGTKIQGLNECINLYNQQVAKNEKSKRLPLMKPLYKQILSEKDSVSFIPEKFNSDNEVLLAIEDYYTAHIGDIDSLTELLQSLNTYNANGIFVKSGAAVSDISNGAFNSWNVLRLAWNEKYEALHPVTSKTKLDNYIEKRDKIYKAIKSFSLFELQSLGNENGNEITDWYISSSKECNSKIKEAYLQARELLKSDYEKSYNKRLSKNGKATELVKNLLDAIKDFQQLIKPLNGTGKEENKDELFYGKLTSYYDSIADIDRLYDKVRNYITQKPYSKDKIKLNFDNPQLLGGWDKNKESDYRTVLLRKDDFYYLAVMDKSHSKAFVDAPNITSEDEDYYEKMEYKLLPGPNKMLPKVFFAAKNIDTFQPSDRILDIRKRESFKKGATFNKSECHEFIDYFKNSIEKHDDWSQFGFEFTPTENYNDISEFYREISDQGYSVSFNKISKSYVDELADNGYIYLFQIYNKDFSKYSKGTPNLHTLYFKMLFDERNLSNVVYKLNGEAEMFYREASINDKEKITHQANQPIKNKNPDNEKKESTFEYDIIKDKRFTKRQFSLHVPITINFKAHGQEFLNYDVRKAVKYKDDNYVIGIDRGERNLIYISVIDSNGKIVEQMSLNEIISDNGHRVDYQKLLDTKEKERDKARKNWTSVENIKELKEGYISQVVHKICELVVKYDAVIAMEDLNFGFKRGRFPVEKQVYQKFENMLISKLNLLIDKKADPTEDGGLLRAYQLTNKFDSVNKGKQNGIIFYVPAWDTSKIDPVTGFVNLLKPKYTSVSEAKKLFETIDDIKYNANTDMFEFCIDYGKFPRCNSDYKKTWTVCTNSSRILTCRNKEKNNMWDNKQIVLTDEFKSLLGEFGIDYKGNLKTSILSISNADFYRRLIKLLSLTLQMRNSITGSTLPEDDYLISPVANDRGEFYDSRNYKGTNAALPCDADANGAYNIARKALWAISVLKSTPDEMLNKANLSITNAEWLEYTQK

SEQ ID NO: 450 - protein, 1227 aa, unidentified
  REGION 1..1227: note = Cas Enzyme sequence
MKEQFINCYPLSKTLQFSLIPVGKTDDNFNKKLLLERDKQRAENYEKVKGYIDRFHKEYIESVLVNARVEKIDEYADLYWKSNKDDSDAKAMESLENDMRKQISKQLKSNARYKRLFGKELICEDLPSFLTDKEERETVECFRSFTTYFKGFNTNRENMYSSDEKSTAIAYRCINDNLPRFLDNVKSFQKVFDNLSDETITKLNTDLYNTFGRNIEDIFSVDYFEFVLAQSGIDIYNSMIGGYTCSDGTKIQGLNECIEPYNQQVAKNEKSKRLPLMKQLYKQILSEKSSVSFIPEKFTSDNEVLLAIEDYYTAHIGDIDSLTELLQSLDLYNTDGIFVKSGTSVTDISNAVFGSWNVLRSGWNEKYETLHPVTSKTKLDNYIEKRDKIYKAIKSFSLFELQSLGNENGNEITDWYISSINECNSKIKEAYLQARELLKSDYEKSYNKRLSKNGKATELVKNLLDAIKNFQHLVKSLNGTGKEENKDELFYGKLTSLYDSVADIDRLYDKVRNYITQKPYSKDKIKLNFDNPQLLGGWDKNKESDYRTVLLRKDDFYYLAVMDKSHSKAFVDAPNITSEDEDYYEKMEYKLLPGPNKMLPKVFFAAKNIDTFQPSDRILDIRKRESFKKGATFNKSECHEFIDYFKNSIEKHDDWSQFGFEFTPTENYNDISEFYREISDQGYSVSFNKISKSYVDELVDNGYIYLFQIYNKDFSKYSKGTPNLHTLYFKMLFDERNLSNVVYKLNGEAEMFYREASINDKEKITHQANQPIKNKNPDNEKKESVFEYDIIKDKRFTKRQFSLHVPITINFKAHGQEFLNYDVRKAVKYKDDNYVIGIDRGERNLIYISVIDSNGKIVEQMSLNEIISDNGHRVNYQKLLDTKEKERDKARKNWTSVENIKELKEGYISQVVHKICELVVKYDAVIAMEDLNFGFKRGRFPVEKQVYQKFENMLISKLNLLIDKKADPTEDGGLLRAYQLTNKFDGVNKGKQNGIIFYVPAWDTSKIDPVTGFVNLLKPKYTSVSEAKKLFETIDDIKYNVNTDMFEFCIDYGKFPRCNSDYKKTWTVCTNSSRILTCRNKEKNNMWDNKQIVLTDKFKSLFNEFGIDYKGNLKTSILSISNADFYRRLIKLLSLTLQMRNSITGSTLPEDDYLISPVANDRGEFYDSRNYKGMNAALPCDADANGAYNIARKALWAISVLKSTPDDMLNKANLSITNAEWLEYTQK

SEQ ID NO: 451 - protein, 1227 aa, unidentified
  REGION 1..1227: note = Cas Enzyme sequence
MKEQFINCYPLSKTLQFSLIPVGKTEDNFNKKLLLERDKQRAENYEKVKGYIDRFHKEYIESVLVNARVEKIDEYADLYWKSNKDDSDAKAMESLENDMRKQISKQLKSNARYKRLFGKELICEDLPSFLTDKEERETVECFRSFTTYFKGFNTNRENMYSSDEKSTAIAYRCINDNLPRFLDNVKSFQKVFDNLSDETITKLNTDLYNTFGRNIEDIFSVDYFEFVLAQSGIDIYNSMIGGYTCSDGTKIQGLNECINLYNQQAAKNEKSKRLPLMKPLYKQILSEKDSVSFIPEKFNSDNEVLLSIEDYYSSHIGDLDLLTELLQSLNTYNANGIFVKSGAAVSDISNGAFNSWNVLRLAWNEKYEALHPVTSKTNLDNYIEKRDKIYKAIKSFSLFELQSLGNENGNEITDWYISSSKECNSKIKEAYLQARELLKSDYEKSYNKRLSKNGKATELVKNLLDAIKDFQHLVKSLNGTGKEENKDELFYGKLTSYYDSIADIDKLYDKVRNYITQKPYSKDKIKLNFDNPQLLGGWDKNKESDYRTVLLRKDDFYYLAVMDKSHSKAFVDAPNKTSEDEDYYEKMEYKLLPGPNKMLPKVFFAAKNIDTFQPSDRILDIRKRESFKKGATFNKSECHEFIDYFKNSIEKHDDWSQFGFEFTPTENYNDISEFYREISDQGYSVSFNKISKSYVDKLVDNGYIYLFQIYNKDFSKYSKGTPNLHTLYFKMLFDERNLSNVVYKLNGEAEMFYREASINDKEKITHQANQPIKNKNPDNEKKESTFEYDIIKDKRFTKRQFSLHVPITINFKAHGQEFLNYDVRKAVKYKDDNYVIGIDRGERNLIYISVIDSNGKIVEQMSLNEIISDNGHRVDYQQLLDTKEKERDKARKNWTSVENIKELKEGYISQVVHKICELVVKYDAVIAMEDLNFGFKRGRFPVEKQVYQKFENMLISKLNLLIDKKADPTEDGGLLRAYQLTNKFDGVNKGKQNGIIFYVPAWDTSKIDPVTGFVNLLKPKYTSVSEAKKLFETIDDIKYNANTDMFEFCIDYGKFPRCNSDYKKTWTVCTNSSRILTCRNKEKNNMWDNKQIVLTDEFKSLFGEFGIDYKGNLKTSILSISNADFYRRLIKLLSLTLQMRNSITGRTLPEDDYLISPVANDRGEFYDSRNYKGTNAALPCDADANGAYNIARKALWAISVLKSTPEDMLNKANLSITNAEWLEYTQK

SEQ ID NO: 452 - protein, 1227 aa, unidentified
  REGION 1..1227: note = Cas Enzyme sequence
MKEQFINRYPLSKTLRFSLIPVGETENNFNKNLLLEKDKQRAENYEKVKGYIDRFHKEYIESVLSKARIEKVDEYANLYWKSNKDDPDIKAMESLESDMRKQISKQLKSNARYKRLFGKELICEDLPSFLTDKDERETVECFRSFTTYFKGFNTNRENMYSSDEKSTAIAYRCINDNLPRFLDNVKSFQKAFDNLSDETITKLNTDLYNIFGRNIEDIFSVDYFEFVLAQSGIEIYNSMIGGYTCSDGTKIQGLNEYINLYNQQVAKNEKSKRLPLMKPLYKQILSEKDSVSFIPEKFNSDNEVLLAIEDYYTGHIGDIDLLTELLQLLNIYNANGIFVKSGVAITDISNGAFNSWNVLRSAWNEKYEALHPVTSKTKIDKYIEKQDKVYKATKSFSLFELQSLGNENGNEITDWYISSINECNSKIKEAYLQAQELLKSDYEKSYDKRLYKNEKATELIKNLLDAIKDFQHLVKPLNGTGKEENKDELFYGKFTSYYDSVADIDKLYDRVRNYITKKPYSKDKIKLNFDNPQLLGGWDKNKESDYRTVLLHKDGLYYLAVMVKSHSKAFVDAPEITSDDEDYYEKMEYKLLPGPNKMLPKVFFATKNIDTFQPSDRILDIRKRESFKKGATFNKAECHEFIDYFKESIEKHDDWSQFGFEFSPTESYNDISEFYREISDQGYSVRFNKISKNYIDGLVENGYIYLFQIYNKDFSKYSKGTPNLHTLYFKMLFDERNLSNVVYKLNGEAEMFYREASIGDKEKITHYANQPIENKNPDNEKKESVFEYDIVKDKRFTKRQFSLHVPITINFKAHGQEFLNNDIRKAIKYKDDNYVIGIDRGERNLIYISVINSNGKIVEQMSLNKIISDNGYRVDYQKLLDAKEDKRDKARKNWTSVENIKELKEGYISQVVHKICELVVKYDAVIAMEDLNFGFKRGRFPVEKQVYQKFENMLISKLNLLIDKKAEPTENGGLLRAYQLTNKFDGVNKAKQNGIIFYVPAWDTSKIDPATGFVNLLKPKYTSVPEAKKLFETIDDIKYNATTDMFEFYIDYSKFPRCNSDFKKAWTVCTNSSRILTFRNKEKNNMWDNKQIVLTDEFKSLFNEFGIDYKGNLKDSILSISNVDFYKRLIKLLSLTLQMRNSITGSTLPEDDYLISPVANENGEFYDSRNYKGTNAALPCDADANGAYNIARKALWAINVLKDTPDEMLNNAKLSITNAEWLEYTQR

SEQ ID NO: 453 - protein, 1227 aa, unidentified
  REGION 1..1227: note = Cas Enzyme sequence
MKEQLINCYPLSKTLRFSLIPVGKTEDNFNKKLLLESDKQRAENYENVKSYIDRFHKEYIKSALANARIEKINEYAALYWKINKDDSDAKAMESLEDDIRKQISKQLTSTANFKRLFGKELICEDLPAFLTDENEKETVECFRSFTTYFNGFNTNRKNMYSSEKKSTAIAYRCVNDNLPRFLDNIKTFQKIFDNLSDETITKLNTNLYNRFGRKIEDIFSVDYFDFVLAQSGIDIYNYMIGGYTCSDGTKIQGLNECINLYNQQVAKNEKSKRLPLMKPLRKQILSEKDSVSFIPEKFNSDNEVLLAIEEYYNNHISDIDSLTKLLQSLNTYNANGIFIKSGAAVSDISNAAFNSWNVLRLAWNEKYEALHPVTSTTKIDKYIEKRDKVYKSIKSFSLFELQELGAENGNEITDWYISSINECNRKIKETYLQARELLKSDYEKDYDKRLYKNEKATELVKNLLDAIKEFQQLVKPLNGTGKEENKDELFYGKFTSFYDSVADIDRLYDKVRNYITQKPYSKDKIKLNFDNPQLLGGWDKNKESDYRTVILRKNDFYYLAVMDKSHSKVFVNAPEITSEDEDYYEKMEYKLLPGPNKMLPKVFFASRNIDKFQPSDRILDIRKRESFKKGATFNKSECHEFIDYFKESIKKHDDWSKFGFEFSPTESYNDISEFYREVSDQGYYISFSKISKNYIDKLVENGYIYLFQIYNKDFSKYSKGTPNLHTLYFKMLFDERNLSNVVYKLNGEAEMFYREASINDKEKITHHANQPIKNKNPDNEKKESVFEYDIVKDKRFTKRQFSLHVSVTINFKARGQEFLNYDVRKAVKYKDDNYVIGIDRGERNLIYISVINSNGKIVEQMSLNEIIGDNGYSVDYQKLLDKKEKERDKARKNWTSVENIKELKEGYISQVVHKICELVVKYDAVIAMEDLNFGFKRGRFPVEKQVYQKFENMLISKLNLLIDKKAEPTENGGLLRAYQLTNKFDGVNKAKQNGIIFYVPAWDTSKIDPVTGFVNLLKPKYTSVREAKKLFETIDDIKYNSNTDMFEFCIDYGKFPRCNSDFKKTWTVCTNSSRILSFRNEKKNNEWDNKQIVLTDEFKSLFNEFGIDYTSDLKASILSISNADFYNRLIRLLSLTLQMRNSIIGSTLPEDDYLISPVANDRGEFYDSRNYKGSNAALPCDADANGAYNIARKALWAINVLKDTPDDMLQKAKLSITNAEWLEYTQR

SEQ ID NO: 454 - protein, 1227 aa, unidentified
  REGION 1..1227: note = Cas Enzyme sequence
MKEQFINCYPLSKTLRFSLIPVGKTEDNFNKKLLLESDKQRAENYENVKSYIDRFHKEYIKSALANARIEKINEYAALYWKSNKDDSDAKAMESLEDDIRKQISKQLTSTANFKRLFGKELICEDLPAFLTDENEKETVECFRSFTTYFNGFNTNRKNMYSSEKKSTAIAYRCVNDNLPRFLDNIKTFQKIFDNLSDEAITKLNTNLYNIFGRKIEDIFSVDYFDFVLAQSGIDIYNSMIGVYTCSDGTKIQGLNKRINRYNQQVAKNEKSKRLPLMKPLRKQILSEKDSVSFIPEKFNSDNEVLLAIEEYYNNHISDIDSLTELLQSLNTYNANGIFIKSGAAVSDISNAAFNSWNVLRLAWNEKYEALHPVTSTTKIDKYIEKRDKVYKSIKSFSLFELQELGAENGNEITDWYISSINECNRKIKETYLQARELLKSDYEKDYDKRLYKNEKATELVKNLLDAIKEFQQLVKPLNGTGKEENKDELFYGKFTSFYDSVADIDRLYDKVRNYITQKPYSKDKIKLNFDNPQLLGGWDKNKESDYRTVILRKNDFYYLAVMDKSHSKVFVNAPEITSEDEDYYEKMEYKLLPGPNKMLPKVFFASRNIDKFQPSDRILDIRKRESFKKGATFNKSECHEFVNYFKESIKKHDDWSKFGFEFSPTESYNDISEFYREVSDQGYYISFSKISKNYIDKLVENGYLYLFKIYNKDFSKYSKGTPNLHTLYFKMLFDERNLSNVVYKLNGEAEMFYREASINDKEKITHHANQPIKNKNPDNEKKESTFEYDIIKDKRFTKRQFSLHMSVTINFKAHGQDFLNYDVRKAVKYKDDNYVIGIDRGERNLIYISVINSNGEIVEQMSLNEIIGDNGYSVDYQKLLDKKEKERDKARKNWTSVENIKELKEGYISQVVHKICELVVKYDAVIAMEDLNFGFKRGRFPVEKQVYQKFENMLISKLNLLIDKKAEPTENGGLLRAYQLTNKFDGVNKAKQNGIIFYVPAWDTSKIDPVTGFVDLLKPKYTSVREAKKLFETIDDIKYNTNTDMFEFCIDYGKFPRCNSDFKKTWTVCTNSSRILSFRNEEKNNEWDNKQIVLTDEFKSLFNEFGIDYTSDLKASVLSISNADFYNRLIRLLSLTLQMRNSIIGSTLPEDDYLISPVANDRGEFYDSRNYKGSNAALPCDADANGAYNIARKALWAINVLKDTPDDMLQKAKLSITNAEWLEYTQR

SEQ ID NO: 455 - protein, 1227 aa, unidentified
  REGION 1..1227: note = Cas Enzyme sequence
MKMIDQFTKLYPVSKTLRFKLIPEGKTAENFATDNILAEDEELFDNKEIVKGYMDRYHKKFISEILSNRDILDVSLVREYSDIYFKFDKTDSDRKNLKKIEIELRQQISKSFNKDERYKGLFKSEIIKNYLPSILSEEECQLTRKFESSTTYFTGFFKNRENMYSSEEKGTAIPFRCINQNLPKFLDNVKVFEKVSLALFESDIKELNKYFSKDNFELNDYFCVDAYGFFLSEKSIDEYNTVIGGYTTENCVKIKGINEYINLYNQSLKNGEKKLPKLKPLFKQILSDKESFSYVLSAINTDDELIKELNDFYSFINSEDTGLGVLCDIFLRLNQYDERRLYVSNGAMINDLSNKLTGNWNTYRIAWENEYDSIQKTKNKNSEKYVEKRNKAFKTIKNISFADVDEKLKAMSNGSTVMNYYSSAVLNSIARIKTSYLDMSDSLNNSKSNKIQNDKICVEKIKIFLDAIKELEWILKSLTGGSFEAEKDEIFYGEFIPVWETVNTVNGLYNKVRNYLTRKPYSNEKIKLNFGNTQLLVGWDLNKIRDCSGVILLRNGNYYLGIINKKSNNCFDDLNEYHGDDCYKKMELKYIPSPDKMLAKVGFADKNTKKFNPSKRVLEAYDRKGGQRTIDDERVLIDYYKYVISVYPGWERFTFNFKSTNEYNSLKDFCSDVESAAYNIQFKSVAASDIENLVEEGSLYLFRIYNKDFSKFSHGKPNLHTMYWRALFDNNNLNDVVYKLSGGAEVFYRKASLNISDTAVHKANEEIMKKSPENSGESSLFTYDIIKNKRYTVDQFQLNVPIVLNFKAKKSETDDINDKVNRALKCRDDFNVIGIDRGERNLLYISVVNSQGKILLQESLNTIINEYKGKAHKVDYHQLLDVKEKERMASRQSWTSIENIKDLKEGYLSCVIKRICDLVVEYDAVIAMEDLNSGFKNSRSKVEKSVYQKFEKMLVDKLNYLVFKDYDPFTCGGLMNAYQLTKKDGKSGAKQNGIIFYVPAWNTSKIDPVTGYIDIIKPKYKNISESIEFVNRFDCICYEHDDDMFRFDYDVRKFPKGDTFFKTHWSAYSNSDRIMTFRNPNKNNEWDCEVVNMTQYFKTLFGRYSIEYLSGDNLISEIMNIGQADFYKDFIRGMQLMFQMRNSKTGTNIDYMVSPVKNKSNKFYDSRNLMDKLPIDADANGAYNIARKCIWAIKKIKSCDNEHLNKVKLSITNKEWLEFVQRLDYDV

SEQ ID NO: 456 - protein, 1227 aa, unidentified
  REGION 1..1227: note = Cas Enzyme sequence
MKEQFINCYPLSKTLQFSLIPVGKTEDNFNKKLLLERDKQRAENYEKVKGYIDRFHKEYIESVLVNARVEKIDEYADLYWKSNKDDSDAKAMESLENDMRKQISKQLKSNARYKRLFGKELICEDLPSFLTDKEERETVECFRSFTTYFKGFNTNRENMYSSDEKSTAISYRCINDNLPRFLDNVKSFQKVFDNLSDETITKLNTDLYNTFGRNIEDIFSVDYFEFVLAQSGIDIYNSMIGGYTCSDGTKIQGLNECINLYNQQVAKNEKSKRLPLMKPLYKQILSEKDSVSFIPEKFNSDNEVLLSIEDYYSSHIGDLDLLTELLQSLNTYNANDIFVKSGADVSDISNGAFNSWNVLRLAWNEKYEALHPVTSKTKLDNYIEKRDKIYKAIKSFSLFELQSLGNENGNEITDWYISSSKECNSKIKEAYLQARELLKSDYEKSYNKRLSKNGKATESVKNLLDAIKDFQHLVKSLNGTGKEENKDELFYGKLTSYYDSIADIDRLYDKVRNYITQKPYSKDKIKLNFDNPQLLGGWDKNKESDYRTVLLRKDDFYYLAVMDKSHSKAFVDAPNITSEDEDYYEKMEYKLLPGPNKMLPKVFFAAKNIDTFQPSDRILDIRKRESFKKGATFNKSECHEFIDYFKNSIEKHDDWSQFGFEFTPTENYNDISEFYREISDQGYSVSFNKISKSYVDELVDNGYIYLFQIYNKDFSKYSKGTPNLHTLYFKMLFDERNLSNVVYKLNGEAEMFYREASINDKGKITHQANQPIKNKNPDNEKKESTFEYDIIKDKRFTKRQFSLHVPITINFKAHGQEFLNYDVRKAVKYKDDNYVIGIDRGERNLIYISVIDSNGKIVEQMSLNEIISDNGHRVDYQKLLDTKEKERDKARKNWTSVENIKELKEGYISQVVHKICELVVKYDAVIAMEDLNFGFKRGRFPVEKQVYQKFENMLISKLNLLIDKKADPTEDGGLLRAYQLTNKFDGVNKGKQNGIIFYVPAWDTSKIDPVTGFVNLLKPKYTSVSEAKKLFETIDDIKYNANTDMFEFCIDYGKFPRCNSDYKNTWTVCTNSSRILTCRNKEKNNMWDNKQIVLTDEFKSLFGEFGIDYKGNLKTSILSISNADFYRRLIKLLSLTLQMRNSITGSTLPEDDYLISPVANDRGEFYDSRNYKGMNAELPCDADANGAYNIARKALWAIDVLKSTPDDMLNKANLSITNAEWLEYTQK

SEQ ID NO: 457 - protein, 1227 aa, unidentified
  REGION 1..1227: note = Cas Enzyme sequence
MKEQFINRYPLSKTLRFSLIPVGETENNFNKNLLLEKDKQRAENYEKVKGYIDRFHKEYIESVLSKARIEKVDEYANLYWKSNKDDSDIKAMESLENDMRKQISKQLTSTEIYKRLFEKELICEDLPAFLTDKDERETVECFRSFTTYFKGFNTNRKNMYSSDEKSTAIAYRCINDNLPRFLDNVKSFQKVFDNLSDETVTKPNTDLYNIFGRNIEDIFSIDYFEFVLAQSGIEIYNSMIGGYTCSDGTKIQGLNECINLYNQQVAKNEKSKRLPLMKPLYKQILSEKDSVSFIPEKFNSDNEVLLAIEDYYNSHIGDIDLLTELLQSLNTYNANGIFVKSGVAITDISNGAFNSWNVLRSAWNEKYEALHTVTSKTKIDKYIEKRDRVYKAIKSFSLFELQSLGNENGNEITDWYISSINECNSKIKEAYLQAQELLKSDYEKNYNKRLYKNEKATELVKNLLDAIKEFQKLIKPLNGTGKEENKDELFYGEFTSHYDSVADIDRLYDKVRNYITQKPYSKDKIKLNFDNPQLLGGWDKNKESDYRTVLLHKDGLYYLAVMDKSHSKAFVDAPEIASDDEDYYEKMEYKLLPGPNKMLPKVFFASKNIDTFQPSDRILDIRKRESFKKGATFNKSECHEFIDYFKGSIEKHDDWSQFGFKFSPTESYNDISEFYREISDQGYSVSFNKISKSYVDELVDNGYIYLFQIYNKDFSKYSKGTPNLHTLYFKMLFDERNLSNVVYKLNGEAEMFYREASIGDKEKITHYANQPIENKNPDNKKKESTFEYDIVKDKRFTKRQFSLHVPITINFKAHGQEFLNYDVRKAVKYKDDNYVIGIDRGERNLIYISVINSNGKIVEQMSLNEIISDNGHKVDYQKLLDTKEKERDKARKNWTSVENIKELKEGYISQIVHKICELVVKYDAVIAMEDLNFGFKRGRFPVEKQVYQKFENMLISKLNLLIDKKADPTENGGLLRAYQLTNKFDGVNKAKQNGIIFYVPAWDTSKIDPATGFVNLLKPKYTSVPEAKNLFETIDDIKYNANTDMFEFYIDYSKFPRCNSDFKKAWTVCTNSSRILTFPNKEKNNMWDNKQIVLTDEFKSLFNEFGIDYKGNLKDSILSISNADFYGRLIKLFSLTLQMRNSITGSTLPEDDYLISPVANESGEFYDSRNYKGTNAALPCDADANGAYNIARKALWAINVLKDTPDDMLNKAKLSITNAEWLEYTQR

SEQ ID NO: 458 - protein, 1227 aa, unidentified
  REGION 1..1227: note = Cas Enzyme sequence
MKEQFINCYPLSKTLQFSLIPVGKTDDNFNKKLLLERDKQRAENYEKVKGYIDRFHKEYIESVLVNARVEKIDEYADLYWKSNKDDSDAKAMESLENDMRKQISKQLKSNARYKRLFGKELICEDLPSFLTDKEERETVECFRSFTTYFKGLNTNRENMYSSDEKSTAISYRCINDNLPRFLDNVKSFQKVFDNLSDETITKLNTDLYNTFGRNIEDVFSVDYFEFVLAQSGIDIYNSMIGGYTCSDGTKIQGLNECINLYNKQDAKNEKSKRLPLMKPLYKQILSEKDSVSFIPEKFNSDNEVLLSIEDYYSSHIGDLDLLTELLQSLNTYNANGIFVKSGAAVSDISNGAFNSWNVLRLAWNEKYEALHPVTSKTNLDNYIEKRDKIYKAIKSFSLFELQSLGNENGNEITDWYISSSKECNSKIKEAYLQARELLKSDYEKSYNKRLSKNGKATESVKNLLDAIKDFQHLVKSLNGTGKEENKDELFYGKLTSYYDSITDIDRLYDKVRNYITQKPYSKDKIKLNFDNPQLLGGWDKNKESDYRTVLLRKDDFYYLAVMDKLHSKAFVDAPNITSKDEDYYEKMEYKLLPGPNKMLPKVFFAAKNIDTFQPSDRILDIRKRESFKKGATFNKSECHEFIDYFKNSIEKHDDWSQFGFEFTPTENYNDISEFYREISDQGYSVSFNKISKSYVDELVDNGYIYLFQIYNKDFSKYSKGTPNLHTLYFKMLFDERNLSNVVYKLNGEAEMFYREASINDKEKITHQANQPIENKNPDNEKKESTFEYDIIKDKRFTKRQFSLHVPITINFKAHGQEFLNYDVRKAVKYKDDNYVIGIDRGERNLIYISVIDSNGKIVEQMSLNEIISDNGHRVDYQKLLDTKEKERDKARKNWTSVENIKELKEGYISQVVHKFCELVVKYDAVIAMEDLNFGFKRGRFPVEKQVYQKFENMLISKLNLLIDKKADPTEDGGLLRAYQLTNKFDGVNKAKQNGIIFYVPAWDTSKIDPVTGFVNLLKPKYTSVSEAKKLFETIDDIKYNANTDMFEFCIDYGKFPRCNSDYKNTWTVCTNSSRILTCRNKEKNNMWDNKQIVLTDEFKSLFGEFGIDYKGNLKTSILSISNADFYRRLIKLLSLTLQMRNSITGSTLPEDDYLISPVANDRGEFYDSRNYKGMNAALPCDADANGAYNIARKALWAINVLKSTPDDMLNKANLSITNAEWLEYTQK

SEQ ID NO: 459 - protein, 1227 aa, unidentified
  REGION 1..1227: note = Cas Enzyme sequence
MATKTINLKMVLNRSEKGKELRQALWTTHEEINKAVAKIEEILLLCRGKSYLAKDDNGKDKPIDEKEVQKKAISLARNIQKQNGKTNTNSNDEIIKTLKQLHTTVIAAGAQGARTFACPLMLKSSKGGESAKKKIVEPLPTWVEKMQNNVSGWEEESIKWIQSSEGIAVRNNFDNKSGWIKVGKPDYSNTNWQKAFVADQKIQRKNIQESGSSGVLFKLRTLGLLPLFETPIKLSKSKPKKKDEVGPWNQMVLRLTVQQMSGWEECNQRTENEYEELKEERDKQEKFVEERYNKTLIAKIHAYENARKKKTQAKYEYVIKRREIRSWEKVLKEWRKPKCNSEQDRIIALNTLQKKLKGRFGDPDVLRWIAKEGNEDIWRTDGCLTDIVKLNGLNFRLDPNNPNKKKEHAISTLSEPRIHPCWVCYAPTGANLENYILYYDDSQKKSSKLENKEWAQIKKKANGENNGKQSLFIAMSLLCKEGTNLVSVPFRIKLAASDQIKNFMVSRGEKTVVATFIHPREINENYTAKLSESAVLLDRPFMERDKDNEDKYKKNLGKLRDGDFGKKDNTLGIRFKLVCDVESMAPKEWLKNEKICIPDIGLRYSISDTTFKKKAFKQIGDIWPGLRIMSVDMGLRNFASCSIFEIVSKEPSADKTYYEAVEGKLWAVHITSFILNLPGEKKNPIPTELWQELNDVEDLLEFQRAFIKLQGKSTDKERKEYLDFLQNLDFENDESRKHNKKLLTDKIIADLNNAVSSDNWLILCQDYHKEIEKDISGRISAWRNNSSKSMRVKRLTDTLARSTYAINQKVRQNMLQTLISNKEFDFASEELSNLQNAVNLDADAWEKRVNECIDKLYKKHPSYNIGLSLSGLDYLTRVRNLIKSWSAHPRKPDDQRTNDEGFASNLLEHINLKKEDRIKKGADQIIQAARGRKYDENTNKWVPKFEPCRIILFEDLSRYNFKTDRPRKENKKLMQWSHREIINEVERQADLYGITIGTILAEFTSKYCAINGSPGIRAKQLTQEDLDNPFIKEKLEEIKTELKLKELALDMLVPWDLGEIFVTIDKQNNIVKHHADINAARNLQRRFATAYGEPCRMTVIHNVPQNCCLPETIGIRLQNALKSITNRNQFCKFIPYRNKKGEIISCSLHGINKDEFLHLGGKLKDEQTPNNKDNKSRMKKGEKLVIFRDPSRNVIHKDRWYEQSIFWNIVHKRINKALKKKYGDTTP

SEQ ID NO: 460 - protein, 1227 aa, unidentified
  REGION 1..1227: note = Cas Enzyme sequence
MKEQFINCYPLSKTLQFSLIPVGKTDDNFNKKLLLERDKQRAENYEKVKGYIDRFHKEYIESVLVNASVEKIDEYADLYWKSNKDDSDAKAMESLENDMRKQISKQLKSNARYKRLFGKELICEDLPSFLTDKEERETVECFRSFTTYFKGFNTNRENMYSSDEKSTAIAYRCINDNLPRFLDNVKSFQKVFDNLSDETITKLNTDLYNTFGRYIEDVFSVDYFEFVLAQSGIDIYNSMIGGYTCSDGTKIQGLNECINLYNQQVAKNEKSKRLPLMKPLYKQILSEKDSVSFIPEKFNSDNEVLLSIEDYYSSHIGDIDSLTELLQSLNTYNANGIFVKSGAAVSDISNGTFNSWNVLRLAWNEKYEALHPVTSKTKLDNYIEKRDKIYKAIKSFSLFELQNLGNGNGNEITDWYISSSKECNSKIKEAYLQARELLKSDYEKSYNKRLSKNGKATELVKNLLDAIKNFQHLVKSLNGTGKEENKDELFYGKLTSYYDSIADIDRLYDKVRNYITQKPYSKDKIKLNFDNPQLLGGWDKNKESDYRTVLLRKDDFYYLAVMDKSHSKAFVDAPDITSEDEDYYEKMEYKLLPGPNKMLPKVFFAAKNIDTFQPSDRILDIRKRESFKKGATFNKSECHEFIDYFKNSIEKHDDWSQFGFEFTPTENYNDISEFYREISDQGYSVSFNKISKSYVDELADNGYIYLFQIYNKDFSKYSKGTPNLHTLYFKMLFDERNLSNVVYKLNGEAEMFYREASINDKEKITHQANQPIKNKNPDNEKKESTFEYDIIKDKRFTKRQFSLHVPITINFKAHGQEFLNYDVRKAVKYKDDNYVIGIDRGERNLIYISVIDSNGKIVEQMSLNEIISDNGHRVDYQKLLDTKEKERDKARKNWTSVENIKELKEGYISQVVHKICELVVKYDAVIAMEDLNFGFKRGRFPVEKQVYQKFENMLISKLNLLIDKKADPTEDGGLLRAYQLTNKFDGVNKGKQNGIIFYVPAWDTSKIDPVTGFVNLLKPKYTSVSEAKKLFETIDDIKYNANTDMFEFCIDYGKFPRCNSDYKKTWTVCTNSSRILTCRNKEKNNMWDNKQIVLTDEFKSLFNEFGIDYKGNLKTSILSISNADFYRRLIKLLSLTLQMRNSITGSTLPEDDYLISPVANDRGEFYDSRNYKGTNAALPCDADANGAYNIARKALWAINVLKSTPDDMLNKANLSITNAEWLEYTQK

SEQ ID NO: 461 - protein, 1227 aa, unidentified
  REGION 1..1227: note = Cas Enzyme sequence
MKEQFINCYQLSKTLQFSLIPVGKTEDNFNKKLLLERDKQRAENYEKVKGYIDRFHKEYIESVLVNARVEKIDEYADLYWKSNKDDSDAKAMESLENDMRKQISKQLKSNARYKRLFGKELICEDLPSFLTDKDERETVECFRSFTTYFKGFNTNRENMYSSDEKSTAIAYRCINDNLPRFLDNVKSFQKVFDNLSDETITKLNTDLYNTFGRNIEDIFSVDYFEFVLAQSGIDIYNSMIGGYTCSDGTKIQGLNECINLYNQQAAKNEKSKRLPLMKPLYKQILSEKDSVSFIPEKFNSDNEVLLSIEDYYSSHIGDLDLLTELLQSLNTYNANGIFVKSGAAVSDISNGAFNSWNVLRLAWNEKYEALHPVTSKTNLDNYIEKRDKIYKAIKSFSLFELQSLGNENGNEITDWYVSSSKECNSKIKEAYLQARELLKSDYEKSYNKRLSKNGKATELVKNLLDAIKDFQHLVKSLNGTGKEENKDELFYGKLTSYYDSIADIDRLYDKVRNYITQKPYSKDKIKLNFDNPQLLGGWDKNKESDYRTVILRKDDFYYLAVMDKSHSKAFVDAPNITSEDEDYYEKMEYKLLPGPNKMLPKVFFAAKNIDTFQPSDRILDIRKRESFKKGATFNKSECHEFIDYFKNSIEKHDDWSQFGFEFTPTENYNDISEFYREISDQGYSVSFNKISKSYVDELVDNGYIYLFQIYNKDFSKYSKGTPNLHTLYFKMLFDERNLSNVVYKLNGEAEMFYREASINDKEKITHQANQPIENKNPDNEKKESTFEYVIIKDKRFTKRQFSLHVPITINFKAHGQEFLNYDVRKAVKYKDDNYVIGIDRGERNLIYISVIDSNGKIVEQMSLNEIISDNGHRVDYQKLLDAKEKERDKARKNWTSVENIKELKEGYISQVVHKICELVVKYDAVIAMEDLNFGFKRGRFPVEKQVYQKFENMLISKLNLLIDKKADPTEDGGLLRAYQLTNKFDGVNKAKQNGIIFYVPAWDTSKIDPVTGFVNLLKPKYTSVSEAKKLFETIDDIKYNANTDMFEFCIDYGKFPRCNSDYKNTWTVCTNSSRILTCRNKEKNNMWDNKQIVLTDEFKSLFGEFGIDYKGNLKTSILSISNADFYRRLIKLLSLTLQMRNSITGSTLPEDDYLISPVANDRGEFYDSRNYKGTNAALPCDADANGAYNIARKALWAISVLKSTPEDMLNKANLSITNAEWLEYTQK

SEQ ID NO: 462 - protein, 1227 aa, unidentified
  REGION 1..1227: note = Cas Enzyme sequence
MNSLRQFTNLYSKSKTLRFELKPVGETLENIQRSGIIERDTVRAENYRKMKKTIDEFHKSFIDRALTGAKLTKLDEFDALYRASADEKRTETWKKAFDSCKQALRREIVACFKKQEDFSDLNKKELIRNRLKAWIDQNRSDLYYTQEFHDFTTYFTGYNENRMNMYSDEEKATAVSHRLIDENLPKFLDNIAVYNKVKASPVAERFAQICADMEPWLNVTSLDDVFSVSHYNFVLTQSQIEAYNVLLGGWRDGDQKRQGLNEYINLYNQTHPDAKLPRLKMLYKQILSDRESISWLPAEFENASELLEVVQAFSESLKSPAENAGRILRELPSCDKAKVYVRGDALGKISVGIFGAYHVISDALGEEERGDYYALDMLEHALLTYAETTDHEMIPNAEVIKQDCISQYFVQGIQVLSNALNAALSKAAELLNTAHTAGYRLSQTDKAKLKEYLDAAMEILHFLKPLYLPSDSDLEKDDVFYGAFAPVYEELQPMTKLYDMVHNFATKKPFSTEKVKLNFDCSTLLDGWDVNKETQNLGVLFLRDGNYFLGIMDKRHNRILEQVEASSEESCYQKVQYKLLPGPNKMLPKVFFSKSRIAEFAPSEEVLRIYKSGSFKKGPAFSQEDCHTLIDFYKSSIQKHPEWSQFGFSFSPTETYEDISGFFREISEQGYKLSYLPISASYIDELVRDGKLYLFRIYNKDFSPSSKGRPNLHTMYWRALFSEENLRDVVYKLNGQAEIFYRKRSISDDDLVTHPANQPIAKKNPALAGQNSTFSYDIVKDRRYAVDKFQFHVPITMNFKAAGTARINEKVCAYLKNNPDVNIIGIDRGERHLLYISMIDQDGRVVRDETGKDIQYSLNTITGCYRDSAGKQIAFETPYHDLLDQKERERQSARQNWDTVETIKELKEGYMSQVVHHIARLMVKYNAVVIMEDLNSGFKRGRIKVEKQVYQNFEKALIEKLNYLIFKDTPADHPGGLYHALQLTENFESFKKLTKQSGFLFYVPAWNTSKIDPVTGFVDLLKPKYTNVAAARAFFSKFQGISFDPENGWFRFRFDYRDFTEKAGESRTEWELCTFGELRYAFNRKLNGNRGGYEQWDVTERLKALFDRYRIDWGRGDLREAITRQTEAPFFASLIKILQVLLAMRYSCAEDGKDFILSPVVSPDGTFFCSEAGMPGLPQDADANGAYNIARKGLWVLRQINRAEDIMDWTTKVQNTQWLSFVQELTP

SEQ ID NO: 463 - protein, 1228 aa, unidentified
  REGION 1..1228: note = Cas Enzyme sequence
MKEQFINRYPLSKTLRFSLIPIGETENNFNKNLLLKKDKQRAENYEKVKGYIDRFHKEYIESVLSKARIEKVNEYANLYWKSNKDDSDIKAMESLENDIRKQISKQLTSTEIYKKRLFGKELICEDLPSFLTDKDERETVECFRSFTTYFKGFNTNRENMYSSDGKSTVIAYRCINDNLPRFLDNVKSFQKVFDNLSDETITKLNTDLYNIFGRNIEDIFSVDYFEFVLAQSGIEIYNSMIGGYTCSDKTKIQGLNECINLYNQQVAKNEKSKKLPLMKPLYKQILSEKDSVSFIPEKFNSDNEVLHAIDDYYTGHIGDFDLLTELLQSLNTYNANGIFVKSGVAITDISNGAFNSWNVLRSAWNEKYEALHPITSKTKIDKYIEKQDKIYKAIKSFSLFELQSLGNGNGDEITDWYISSINECNSKIKDAYLQAQELLNSDYEKSYNKRLYKNEKATELVKNLLDAIKEFQKLIKPLNGTGKEENKDELFYGKFTSYYDSIADIDRLYDKVRNYITQKPYSKDKIKLNFDNPQLLGGWDKNKESDYRTVLLHKDGLYYLAVMDKSHSKAFVDAPEITSDDKDYYEKMEYKLLPGPNKMLPKVFFASKNIDTFQPSNRILDIRKRESFKKGATFNKSECHEFIDYFKESIEKHDDWSQFGFKFSPTESYNDISEFYREISDQGYSVRFNKISKNYIDGLVENGYIYLFQIYNKDFSKYSKGTPNLHTLYFKMLFDEKNLSNVVYKLNGEAEMFYREASIGDKEKITHYANQPLENKNPDNEKKESTFEYDIVKDKRFTKRQFSLHLPITINFKAHGQEFLNYDVRKAVKYKDDNYVIGIDRGERNLIYISVINSNGKIVEQMSLNEIISDNGHKVDYQKLLDTKEKERDKARKNWTSVENIKELKEGYISQVVHKICELVVKYDAVIAMEDLNFGFKRGRFPVEKQVYQKFENMLISKLNLLIDKKADPTENGGLLRAYQLTNKFDGVNKAKQNGIIFYVPAWDTSKIDPVTGFVNLLKPKYTSVQEAKKLFETIDDIKYNANTDMFEFYIDYSKFPRCNSDFKKSWTVCTNSSRILTFQNKEKNNMWDNKQIILTDEFKSLFNEFGIDYKGNLKDSILSISNADFYRRLIKLLSLTLQMRNSITDSTLPEDDYLISPVANESGEFYDSRNYKGTNAALPCDADANGAYNIARKALWAINVLKDTPDDMLNNAKLSITNAEWLEYTQK

SEQ ID NO: 464 - protein, 1228 aa, unidentified
  REGION 1..1228: note = Cas Enzyme sequence
MKEQFVNRYSLPKTLRSSLIPVGKTEDSFNKNLLLEKDKQRAENYEKVKGYIDRFHKEYIESVLSKARIEKVDEYANLYWKSNKDDSDIKAMESLENDMRKQISKQLKSNARYKRLFGKELICEDLPSFLTDKNERETVECFRSFTTYFKGFNTNRENMYSSDEKSTAIAYRCINDNLPRFLDNVKSFQKVFDNLSDETITKLNTDLYNIFGRNIEDIFSVDYFEFVLAQSGIDVYNSMIGGYTCSDKTKIQGLNECINLYNQQVAKDENSKRLPLIKPLYKQILSEKDSVSFIPEKFNSDNEVLLAIDDYYTGHIGYIDLLTELLQSLNTYNANGIFVKSGVAITDISNGAFNSWNVLRSAWNEKYEALHPITSKTKIDKYIEKRDKVYKAIKSFSLFELQSLGNENGNELTDWYISSINESNSKIKEAYLQAQELLKSDYEKSYNKRLYKNGKATESVKNLLDTIKDFQHLVKPLNGTGKEENKDELFYGKFTSLYDSVADIDRLYDKVRNYITQKPYSKDKIKLNFDNPQLLGGWDKNKESDYRTVLLRKDGFYYLAVMGKSHSKAFINAPEITSDDEDYYEKMEYKLLPGPNKMLPKVFFASKNIDTFQPSNRILDIRKRESFKKGATFNKAECHEFIDYFKDSIKKHDDWSQFGFKFSPTESYNDISEFYREISDQGYSVRFNKISKNYIDGLVNNGYIYLFQIYNKDFSKYSKGTPNLHTLYFKMLFDERNLSNVVYKLNGEAEMFYREASIGDKEKITHYANQPIKNKNPDNEKKESVFEYDIVKDKRFTKRQLSLHLPITINFKAHGQEFLNYDVRKAVKYKDDNYVIGIDRGERNLIYISVINSNGEIVEQMSLNEIISDNGHKVDYQKLLDTKEKERDKARKNWTSVENIKELKEGYISQVVHKICELVIKYDAVIAMEDLNFGFKRGRFPVEKQVYQKFENMLISKLNLLIDKKAEPTEDGGLLRAYQLTNKFDGVNKAKQNGIIFYVPAWDTSKIDPATGFVNLLKPKCNTSVPEAKKLFETIDDIKYNANTDMFEFYIDYSKFPRCNSDFKKSWTVCTNSSRILTFRNKEKNNKWDNKQIVLTDEFKSLFNEFGIDYKGNLKDSILSISNADFYRRLIKLLSLTLQMRNSITGSTLPEDDYLISPVANKSGEFYDSRNYKGTNAALPCDADANGAYNIARKALWAINVLKDTPDDMLNKAKLSITNAEWLEYTQK

SEQ ID NO: 465 - protein, 1228 aa, unidentified
  REGION 1..1228: note = Cas Enzyme sequence
MWEDFTKLYSLSKTLRFELVPTESTEQQLKTSGVIQADKVRHESFKLAKKVLDEIHRKFITDSLVDLQLDHKQLQVFAEYSLNPASKSDAAKQAELIKLRRSIYMAFEQRFTATQAGWKEAYDCEKFISSPKSQLALIETFKPELADKLGMPEQDLEDLQTRFNKFASYFQGYNKNRENIYTTKGHAVEISHRTIDQNLLKFYKNVQKYEKYYTDKDILGGEAAPHFKVENYTSYITQDEINAYNEAIRSFRSNINQARQGLDKKEKQSLPMFEPLFKQILGDNTKKVLFEKLEGKEEYAELTRKLQQDMPSWVTALDEHANTHIMIPANPATVWFNAKAVNAVLHKHTTSPELIKIYLPKEFTSSRRAKDEETAKQNSFVSLRQLFAALDQAQVATELSLLKNVDRADMGASEAVWLAFCEDIQVKIKDARETVGAFSKIIAFENKSEKETLKKALDSFNDLYRMYTYFELRYKNEPVTSFDTDPDFYELFEDPDDQDSLFDADKDKRFSHYYDLIRNYLTKKSYSLDKWKLNFDCSQLLTGWDVNKEPEKHGVILQNGENYHLAILNNESNKIFDRAKNKLLFQAEDNTAWQKMDYKLLPGPNKMLPKCLLPKSNRNKYGATDEVLDIYETGSFKKGDNFNLASLHKMIDFYKQAINRYEGWSMYEFTFRSTDQYQGIDQFYHDAESQGYRLGFVPINSVELQKMVDDGRIYLFRIQNKDLANPSSKTANMHTLYFRELFKSSSTIKLNGEAEIFFRPKTENLAASKTNRKTPQGTEVTELKRFRSDKIQLHLPVNLNYQTKSLINATFNQHTIERIKTNGVNAIIGIDRGEKHLAYVAIVDRSGKLLDEPISLNNITSKLPGGGKKVTPYFDLLDHREKERKENRQNWEAVRQIKDLKSGYIGHCIKQIVDLMIKHNAVVALENLNVGFKQGRSAIEKSVYNQLEQALLHKLQYVVDKSKPPQELFGAQNGVQLAPPSVVPKDTYNHMGFVFFVDPSYTSAVDPKTGYRQHFRLDDRINTKTFNTFIRDGFKDIEYKDSNLLFTFNWRQLASARNKIKKDVRAEKEAEISDKPWTITANIERLVYSKKADDGHGATVKVYPQVELLQLFESKNFDLRKNIKQQLLEHKPDAKFVGSFTYLFNIINKLRNSDAASDVDAIISPVYIDGFNSTKHKLGGYEWNGDANGAYNIARKGAILLDKLYEAKTLRDFKATVTRAEYDAYLTK

SEQ ID NO: 466 - protein, 1228 aa, unidentified
  REGION 1..1228: note = Cas Enzyme sequence
MKEQFINRYPLSKTLRFALIPVGETENNFNKNLLLERDKQRAENYEKVKGYIDRFHKKYIESVLSKARIEKVDEYANLYWKSNKDDSDAKAMESLENDMRKQISKQLTSTEIYKKRLFGKELICEDLPAFLTDENEKETVECFKNFTTYFNGFHTNRKNMYSSDGKSTAIAYRCINDNLPRFLDNVKSFQKVFDNLSDETITKLNTDLYNIFGRNIEDIFSVDYFEFVLAQSGIEIYNSMIGGYTCSDKTKIQGLNEYINLYNQQVAKNEKSKRLPLMKPLYKQILSEKDSVSFIPEKFNSDNEVLHAIGDYYNNHIGDFDLLTELLQSLNTYNANGIFVKSGVAITDISNGAFKSWNVLRSAWNEKYEALHPVTSKTKIDKYIEKQDKIYKAIKSFSLFELQSLGNENGNEITDWYISSINECNSKIKEAYLQGQELLNSDYETSYNKRLYKNEEATELVKNLLDAIKDFQKLIKPLNGTGKEENKDELFYGKFTSHYDSIADIDRLYDKVRNYITQKPYSKDKIKLNFDNPQLLGGWDKNKESDYRTVLLHKDGFYYLAVMGKSHSKVFVDAPEITSYDEDYYEKMEYKLLPGPNKMLPKVFFATKNIDTFQPSDRILDIRKRESFKKGATFNKAECHEFIDYFKESIEKHDDWSQFGFEFSPTESYNDISEFYREISDQGYSVKFNKIPKNYIDGLVENGYIYLFQIYNKDFSKYSKGTPNLHTLYFKMLFDERNLSNVVYKLDGEAEMFYREASINDKEKITHQANQPIENKNPDNEKKESVFEYDIVKDKRFTKRQFSLHLPITINFKAHGQEFLNYDVRKAVKYKDDNYVIGIDRGERNLIYISVINSNGKIVEQMSLNEIISDNGHRVDYQKLLDKKEKERDKARKNWTSVENIKELKEGYISQVVHKICELVVKYDAVIAMEDLNFGFKRGRFPVEKQVYQKFENMLISKLNLLIDKKADPTENGGLLRAYQLTNKFDGVNKAKQNGIIFYVPAWDTSKIDPVTGFVNLLKPKYTSVQEAKNLFETIDDIKYNANTDMFEFYIDYSKFPRCNSDFKKTWTVCSNSSRILTFRNKDKNNMWDNKQIVLTDAFKSLFNEFGIDYKGNLKNSILSISNVDFYKRLIKLLSLTLQMRNSITGSTLPEDDYLISPVANKSGEFYDSRNYKGTNAALPCDADANGAYNIARKALWAINVLKDTPDDMLNKAKLSITNAEWLAYTQR

SEQ ID NO: 467 - protein, 1228 aa, unidentified
  REGION 1..1228: note = Cas Enzyme sequence
  VARIANT 351..353: note = X can be any amino acid
MKEQFINRYPLSKTLRFSLIPVGETENNFNKNLLLKKDKQRAENYEKVKCYIDRFHKEYIESVLSKARIEKVNEYANLYWKSNKDDSDIKAMESLENDMRKQISKQLTSTEIYKKRLFGKELICEDLPSFLTDKDERETVECFRSFTTYFKGFNTNRENMYSSDGKSTAIAYRCINDNLPRFLDNVKSFQKVFDNLSDETITKLNTDLYNIFGRNIEDIFSVDYFEFVLTQSGIEIYNSMIGGYTCSDKTKIQGLNECINLYNQQVAKNEKSKKLPLMKPLYKQILSEKDSVSFIPEKFNSDNEVLHAIDDYYTGHIGDFDLLTELLQSLNTYNANGIFVKSGVAITDISXXXNSWNVLRSAWNEKYEALHPVTSKTKIDKYIEKQDKIYKAIKSFSLFELQSLGNENGNEITDWYISSINESNSKIKEAYLQAQKLLNSDYEKSYNKRLYKNEKATELVKNLLDAIKEFQKLIKPLNGTGKEENKDELFYGKFTSYYDSIADIDRLYDKVRNYITQKPYSKDKIKLNFDNPQLLGGWDKNKESDYRTVLLHKDGLYYLAVMDKSHSKAFVDAPEITSDDKDYYEKMEYKLLPGPNKMLPKVFFASKNIDTFQPSDRILDIRKRESFKKGATFNKAECHEFIDYFKDSIKKHDDWSQFGFKFSPTESYNDISEFYREISDQGYSVRFNKISKNYIDGLVNNGYIYLFQIYNKDFSKYSKGTPNLHTLYFKMLFDERNLSNVVYKLNGEAEMFYREASIGDKEKITHYANQPIKNKNPDNEKKESVFEYDIVKDKRFTKRQFSLHLPITINFKAHGQEFLNYDVRKAVKYKDDNYVIGIDRGERNLIYISVINSNGEIVEQMSLNEIISDNGHKVDYQKLLDTKEKERDKARKNWTSVENIKELKEGYISQVVHKICELVIKYDAVIAMEDLNFGFKRGRFPVEKQVYQKFENMLISKLNLLIDKKAEPTEDGGLLRAYQLTNKFDGVNKAKQNGIIFYVPAWDTSKIDPATGFVNLLKPKCNTSVPEAKKLFETIDDIKYNANTDMFEFYIDYSKFPRCNSDFKKSWTVCTNSSRILTFRNKEKNNKWDNKQIVLTDEFKSLFNEFGIDYKGNLKDSILSISNADFYRRLIKLLSLTLQMRNSITGSTLPEDDYLISPVANKSGEFYDSRNYKGTNAALPCDADANGAYNIARKALWAINVLKDTPDDMLNKAKLSITNAEWLEYTQK

SEQ ID NO: 468 - protein, 1228 aa, unidentified
  REGION 1..1228: note = Cas Enzyme sequence
MKEQFVNRYSLPKTLRSSLIPVGKTEDSFNKNLLLEKDKQRAENYEKVKGYIDRFHKEYIESVLSKARIEKVDEYANLYWKSNKDDSDIKAMESLENDMRKQISKQLKSNARYKRLFGKELICEDLPSFLTDKNERETVECFRSFTTYFKGFNTNRENMYSSDEKSTAIAYRCINDNLPRFLDNVKSFQKVFDNLSDETITKLNTDLYNIFGRNIEDIFSVDYFEFVLAQSGIDVYNSMIGGYTCSDKTKIQGLNECINLYNQQVAKDENSKRLPLIKPLYKQILSEKDSVSFIPEKFNSDNEVLLAIDDYYTGHIGYIDLLTELLQSLNTYNANGIFVKSGVAITDISNGAFNSWNVLRSAWNEKYEALHPITSKTKIDKYIEKRDKVYKAIKSFSLFELQSLGNENGNELTDWYISSINESNSKIKEAYLQAQELLKSDYEKSYNKRLYKNGKATESVKNLLDTIKDFQHLVKPLNGTGKEENKDELFYGKFTSLYDSVADIDRLYDKVRNYITQKPYSKDKIKLNFDNPQLLGGWDKNKESDYRTVLLRKDGFYYLAVMGKSHSKAFINAPEITSDDEDYYEKMEYKLLPGPNKMLPKVFFASKNIDTFQPSNRILDIRKRESFKKGATFNKAECHEFIDYFKDSIKKHDDWSQFGFKFSPTESYNDISEFYREISDQGYSVRFNKISKNYIDGLVNNGYIYLFQIYNKDFSKYSKGTPNLHTLYFKMLFDERNLSNVVYKLNGEAEMFYREASIGDKEKITHYANQPIKNKNPDNEKKESVFEYDIVKDKRFTKRQFSLHLPITINFKAHGQEFLNYDVRKAVKYKDDNYVIGIDRGERNLIYISVINSNGEIVEQMSLNEIISDNGHKVDYQKLLDTKEKERDKARKNWTSVENIKELKEGYISQVVHKICELVIKYDAVIAMEDLNFGFKRGRFPVEKQVYQKFENMLISKLNLLIDKKAEPTEDGGLLRAYQLTNKFDGVNKAKQNGIIFYVPAWDTSKIDPATGFVNLLKPKCNTSVPEAKKLFETIDDIKYNANTDMFEFYIDYSKFPRCNSDFKKSWTVCTNSSRILTFRNKEKNNKWDNKQIVLTDEFKSLFNEFGIDYKGNLKDSILSISNADFYRRLIKLLSLTLQMRNSITGSTLPEDDYLISPVANKSGEFYDSRNYKGTNAALPCDADANGAYNIARKALWAINVLKDTPDDMLNKAKLSITNAEWLEYTQK

SEQ ID NO: 469 - protein, 1228 aa, unidentified
  REGION 1..1228: note = Cas Enzyme sequence
MKRIADSFINQNSVIRNVNIGLIPMGKTMDYIRERELIEVDQIRNEEAKIVKDIITKCHRDFINNCLSSFEFERGDLEKYMELYNTPMKDLSSDERKKVRTEFKDLKKNMREQISEVFKNSDDYGSLFSKDLITKKLPEFVGDNAEELSVIRDFNNFTTYFKKYNEAKKRMYEKDEKHGNIAYRTIHQNLTKYINNISVFNKVYSIPEIKSRIDELANIIGCDVVAFFNVDGFNSVISQSGIDKYNTVIGGFSREDETKVQGLNEIVNLYNQQYKKKLPKFEKLFKQILSLSETSSFVYSPLASDVEVFDLVRSTYNYVLEEVIETKNCTNIVDLINNIEKYDLNGIYINKKDISNISNYLFGDYSVINHAIENDYERLHKKGRSIAKWEKTKDKYLKSIDQYSISSLNNMLEMDGKMPCITKYFKDKVSASINDIQDAYLRFSCIDIERYTVNGASLKSNDFDKRNIQVLLDSIKKLKGSVYSLSCGIEMPERDDAFYGDFSNLWDTFREINAVYNKVRNYVTGKPFETETIKLNFDCSRLLDGWSLSAEAEHSGQLYKDDNGNIYLGILCRGNKAWINNIPVATTDRVYHKFIFNNIGKIRTHLKNIYNISIKNEDPNWKDEVDRAKKVILEREAWNIYHFEFSDTSSYNYSSDFVNDVESQGFSISTVDVDVDYINERINNGDLYFFQLYNKDFSPYSKGTPDLHTCYLREMFSDRNIANPYMRIGAGEVRFRPASLSIEDTAIHKANNPIKNKNHLNPKGYSSFSYDIIRNRRYTKDHFELKLPITFNYKDKKLDKRDTKKYNNEINSAIYDADNVGVIGIDRGENNLIYITRIDSDGNIIYSKSCNIAENVDPNGVKHRVDYKHILKEKEKANKIANLGWGTKKSTKSIKESCCGRIAAEIVKEAIETNSIIVMEKLDSEFMRKHQMIDSSVYKVFEKALINKGNYYVDKHLDVEENGGIRRGYSITNEFDSSDNVWQSGMLYYINPAYTSKIDPATGFVNLFGEIKYKNISSSREFISRFDKICFDNQLGMYAFSFDYTRFTYKADNSRRNWTVYTVGNRTEYNRVNGHTVKTSIDLTTEFDKLFEEYGISKKADDMRQALISVDNAEFYKRFLKLFFLTVILRNQNSENEVDEIISPVMNSSGQFFLSGKYKNLPVDGDSNGSYCIALKGLMKLNKIKEANSREEVSSKSLAISNDDWFNFVQNRSSKFEYMEEVRNSKTA

SEQ ID NO: 470 - protein, 1228 aa, unidentified
  REGION 1..1228: note = Cas Enzyme sequence
MSNLYSNLHNLYPVQKTLRFELKPQGKTKENMEKAGILKADEHRAEVYGKVKKYCDEYHKTFIDRCLSNIELNEIDKYYELYSINNRDDKQKEELDQLETGLRKQISDAFKKSAEYKGLFQKDMITSYLVTMYKENQEKMQDIGEFNRFTTYFTGYNKNRENMYSEEDKSTAISYRLINENLPTFIDNIKIYKKIVSLMPENIEKIYKDLEEYIQVNSVDEIFNISYYNDVLTQRGIECYNILISGRTKNDGDKIKGLNEYINEFNQTHNEKIPKLQELYKQILSDAESASFKVDIIENDKELLNLIEVYYANILPTLNKIEDLFTRISNYNLELILVNNDGSLSTLSNMVFNEWSYIKGIISQKYDAEYSGKEKYGTEKYAQKKQEYLKKQKIYSLKFLNDCIGNNAICEYLKNYIIQNKNIETIKEDYNEVQNIKAEDDTKELIKDEKSIEKIKKFLDDVKSLQEFVKLVIPKDRTVEKDAKFYSELTPYYEKIKEIIPLYNKVRNYVTQKPYSTEKIKLNFECPTLLNGWDANKEEANLGVILLKEGKYYLGIMNPYCKKIFEVYEKDSNEQNNYKKMEYKLLPGPNKMLPKVFFSNSRIEEFNPSKELQEKYNKGYHKKGKDFDINFCHELIDFYKQSLNKHEDWKKFNFKFKDTSEYNDISEFYREVEEQGYKIEYTEYSEKYINELVDRGELYLFQIYNKDFSEYSKGKENLHTLYWKAVFDPDNIMNPVYKLNGNAEIFYRKKSLEMKVTHPANQPIANKNISTIEAGRSTSTFKYDLIKDKRYTMDKFQFHVPITVNFKSERLFNINQIVNKYLKYNDDIHVIGIDRGERNLLYVCVIDKNEKIVYQKSLNEIVSEYNNNRYTTDYHGLLDRKEKEREIAREDWKNIENIKELKEGYMSQIIHILVELMKKYNAIIVIEDLNKGFKNSRIKVEKQVYQKFEKMFIDKLNYLVFKDEDKMDEGGVLNAYQLTNKFESFTKLGKQSGILYYIPAWCTSKIDPTTGFINRFYLKYENFDKSKEFVNRIDDIRYNEKENLFEFDIDYSKFTDRLNDTKNKWTLCSYGERILTQKNANGEWFDRRIQLSIEFKNLFEKYVINLNNIKDSILKLDKDNIEFYKGNGENLGFIQLFKLMVQMRNSLTGKEEDNLISPVKNQHGKFFNTSERVEGLPIDADANGAYNIARKGFMLVEQMKNVEDEKLNKIKYNITEKEWLNYVQNRGM

SEQ ID NO: 471 - protein, 1229 aa, unidentified
  REGION 1..1229: note = Cas Enzyme sequence
MKEQFINRYPLSKTLRFALIPVGETENNFNKNLLLERDKQRAENYEKVKGYIDRFHKEYIESVLSKAGIEKVDEYANLYWKSNKDDSDAKAMESLENDMRKQISKQLTSTEIYKKRLFGKELICEDLPAFLTDENEKETVECFKNFTTYFNGFHTNRKNMYSSDGKSTAIAYRCINDNLPRFLDNVKSFQQVFDNLSDETITKLNSDLYNIFGRNIEDIFSVDYFEFVLAQSGIEIYNSMIGGYTCSDKTKIQGLNEYINLYNQQVAKNEKSKRLPLMKPLYKQILSEKDSVSFIPEKFNSDNEVLYAIGDYYNNHIGDFDLLTELLQSLNTYNANGIFVKSGVAITDISNGAFNSWNVLRSAWNEKYEALHPVTSKTKIDKYIEKRDKIYKAIKSFSLFDLQNLGNENGNEITDWYISSINECNSKIKEAYLQAQELLNSDYETSYNKRLYKNEKATELVKNLLDAIKEFQKLIKPLNGTGKEENKDELFYGKFTSHYDSIADIDRLYDKVRNYITQKPYSKDKIKLNFDNPQLLGGWDKNKESDYRTVLLHKDGFYYLAVMGKSHSKVFVDAPEVTSYDEDYYEKMEYKLLPGPNKMLPKVFFATKNIDTFQPSDRILDIRKRESFKKGATFNKAECHEFIDYFKESIEKHDDWSQFGFEFSPTESYNDISEFYREISDQGYSVRFNKISKNYIDGLVDNGYIYLFQIYNKDFSKYSKGTPNLHTLYFKMLFDERNLSNVVYKLNGEAEMFYREASINDKEKITHQANQPIENKNPDNEKKESVFEYDIVKDKRFTKRQFSLHLPITINFKAHGQEFLNYDVRKAVKYKDDNYVIGIDRGERNLIYISVINSNGKIVEQMSLNEIISDNGHRVDYQRLLDKKEKERDKARKNWTSVENIKELKEGYIIQVVHKICELVVKYDAVIAMEDLNFGFKRGRFPVEKQVYQKFENMLISKLNLLIDKKADPTENGGLLRAYQLTNKFDGVNKAKQNGIIFYVPAWDTSKIDPVTGFVNLLKPKCNTSVPEAKKLFETIDDIKYNVNTDMFEFYIDYSKFPRCNSDFKKTWTVCTNSSRILTFRNKDKNNMWDNKQIVLTDAFKSLFNEFGIDYKGNLKDSILSISNVDFYKRLIKLLSLTLQMRNSITGSTLPEDDYLISPVANKSGEFYDSRNYKGTNAALPCDADANGAYNIARKALWAINVLKDTPDDMLNKAKLNITNAEWLEYTQR

SEQ ID NO: 472 - protein, 1229 aa, unidentified
  REGION 1..1229: note = Cas Enzyme sequence
MKEQFINRYPLSKTLRFSLIPVGETENNFNKNLLLKKDKQRAENYEKVKCYIDRFHKEYIESVLSKARIEKVNEYANLYWKSNKDDSDIKAMESLENDMRKQISKQLTSTEIYKKRLFGKELICEDLPSFLTDKDERETVECFRSFTTYFKGFNTNRENMYSSDGKSTAIAYRCINDNLPRFLDNVKSFQKVFDNLSDETITKLNTDLYNIFGRNIEDIFSVDYFEFVLTQSGIEIYNSMIGGYTCSDKTKIQGLNECINLYNQQVAKNEKSKKLPLMKPLYKQILSEKDSVSFIPEKFNSDNEVLHAIDDYYTGHIGDFDLLTELLQSLNTYNANGIFVKSGVAITDISNGAFNSWNVLRSAWNEKYEALHPVTSKTKIDKYIEKQDKIYKAIKSFSLFELQSLGNENGNEITDWYISSINESNSKIKEAYLQAQKLLNSDYEKSYNKRLYKNEKATELVKNLLDAIKEFQKLIKPLNGTGKEENKDELFYGKFTSYYDSIADIDRLYDKVRNYITQKPYSKDKIKLNFDNPQLLGGWDKNKESDYRTVLLHKDGLYYLAVMDKSHSKAFVDAPEITSDDKDYYEKMEYKLLPGPNKMLPKVFFASKNIDTFQPSDRILDIRKRESFKKGATFNKAECHEFIDYFKDSIKKHDDWSQFGFKFSPTESYNDISEFYREISDQGYSVRFNKISKNYIDGLVNNGYIYLFQIYNKDFSKYSKGTPNLHTLYFKMLFDERNLSNVVYKLNGEAEMFYREASIGDKEKITHYANQPIKNKNPDNEKKESVFEYDIVKDKRFTKRQFSLHLPITINFKAHGQEFLNYDVRKAVKYKDDNYVIGIDRGERNLIYISVINSNGEIVEQMSLNEIISDNGHKVDYQKLLDTKEKERDKARKNWTSVENIKELKEGYISQVVHKICELVIKYDAVIAMEDLNFGFKRGRFPVEKQVYQKFENMLISKLNLLIDKKAEPTEDGGLLRAYQLTNKFDGVNKAKQNGIIFYVPAWDTSKIDPATGFVNLLKPKCNTSVPEAKKLFETIDDIKYNANTDMFEFYIDYSKFPRCNSDFKKSWTVCTNSSRILTFRNKEKNNKWDNKQIVLTDEFKSLFNEFGIDYKGNLKDSILSISNADFYRRLIKLLSLTLQMRNSITGSTLPEDDYLISPVANKSGEFYDSRNYKGTNAALPCDADANGAYNIARKALWAINVLKDTPDDMLNKAKLSITNAEWLEYTQK

SEQ ID NO: 473 - protein, 1229 aa, unidentified
  REGION 1..1229: note = Cas Enzyme sequence
MEGIGSFTGVYPVSKTLRFELRPIGRTLEYIEKEGIIGTDIHRAESYKTVKKIIDNYHKAYMEDVLSNLRLEDLDKYYNLYQKSGKSDSENKEFEDVQTSLRKQISSELKSDRRYKNIFKKELIQNDIFNMIDDEEDKKLVEEFRSFTTYFTGFHKNRENIYSDEAKSTSIAFRLIHQNLPKYLDNIKIYKLVSDSPIKESLKGLEDEIKTKYQIDSIEDYFKLEGFNKVLTQHGIDIYNTILGAFSEEKKKIQGINELINLYNQKQKDRNAKLPQMKPLFKQILSDRNSVSFIVDSLESDCDVLSVIDGFSEMLFQDIINSESKSVLSLLKSIKDYNLEKIYIKNDTSISFLSEKLFNDWSFVGECIGKEYDRNHNYSETEKYHEKKKAELKKIGFYSIAYLDMLTGGKIEDYFTDEIESVIDSIQEKYKEYLDIHDSIEDSEDKKSLLKRDAVVSVIKAYLDSIKDLQALLKLLLTNEKIADKDERFYSELDIIWNKLDAITNIYNQVRNYVTKKPYSVEKVKLNFNKSTLLDGWDKNKEKDNLGIILIKDGKYYLGIMNTKANKSFTDVPQATSGDVYKKMVYKLLPDPSKMLPKVFFSKKGKEEFNPDEVLLSKYYAGTHKKNNQNFSLEDCHNLIDFFKDAISKHDDWSKFGFVFSETSTYSDMSMFYREISEQAYKLTLQDIDAEYIDTLVENGDLYLFQIYNKDFSEYSKGKPNLHTMYWKALFSKENLDDIVYKLNGQAEVFYRKKSIPYTVTHKANVPIKNKYPNSVKSESIFEYDLIKNKRFTMDKFMFHVPITMNYKASGENKFNLKVRKYIHDVDEINIIGIDRGERNLLYICVVNQNGEILEQKSLNEILTTRLDGECHAVDYHLLLDNRENDNKLTRKSWTTVNTIKELKEGYLSQVIHVVAQMMIKYNAIVVLEDLNFGFMRGRQKFEKQVYQKFEKMLIDKLNYLVMKDYDEQQPGGLMKAFQFTDRFESFQKLGKQSGFLFYIPAWMTSKIDPTTGFVPLFNAKYESVEKARLFIKKFKGIKYNNVEGCFEFKIDYSDFTYKSEGTKLDWTICSYGTRIRHFRNKDMNNSWDTEEIDLSKEFMKLFNDYGVCISGDNIIDSITEIKSADFYKNLFSLINLMMQMRNSDEKSGIDRIVSPVRNHKGDFFNTSVHTDSDVVYPKDADANGAYNIARKGSMIIDIIKNTEPEKLEKIKLAISNKEWLRYAQENTI

SEQ ID NO: 474 - protein, 1229 aa, unidentified
  REGION 1..1229: note = Cas Enzyme sequence
  VARIANT 730..734: note = X can be any amino acid
MSNLYNSLHNFYPVQKTLKFELIPQGKTKENMEREGILKTDQHRAAVYKKVKKYCDEYHKVFIDRCLKDLQLKELERYYELYSLTNKDDEKKEELKKIQEKLRKQISDSFKNNSEFKGLFQKDIINSYLMAMYKEDEEKIKEISEFNKFTTYFSGYNKNRENMYSEEEKSSAISYRIINENLPTFIDNLRIYNKIIKLIPEIMEKIYTDLIEYIQVENINKVFNINHYNKVLTQRGIECYNIIISGKVQNEGEKIKGINEYINEFNQTHNEKIPKMQELYKQILSDTDTASFKYDVIECDRDLLDNIESYGRRILQILDGTGSLLEKINDYNLDLIFINNDGILSKVSNDIYSDWSYIRNRISDIYDEKYNGKLSKNTEKYFKQKQDYIKKQKCYSLKFLKQSLEDDRVIKYISSYIRETSLVERIRSSFIEVQNIKERSNEKNLIKDENSITKIKTLLDNIKLLQEFVKMLIPKDRTEEKEAKFYSELMTYYDELENVIPLYNKTRNYLTQKPYSTQKIKLNFECPTLLNGWDSNKEQANLGVILLKDEKYYLGIINPYCRKIFETEEQDINSENNYKKMEYKQLPGSKMLAKVFFSKSRKDEFNPSDELLKKYEKGLHKKGPNFDIQFCRELIDFYKNSLNKHEEWKKFDFKFRDTLEYNNIGEFYKEFEEQGYKIEYSEYSESYINELVNRGELYLFQIYNKDFSEYSKGNPNLHTMYWKAVFDLQXXXXXIKDPIYKLNGNAEIFYRQRSLEKRITHPANTPVNNKSEETIKAGKPQSIFKYDLIKDKRYTMDKFQFNVPITMNFKSEKLLNINGIVNKYLKYNDDIYVIGIDRGERNLLYVCVIDKNEKIVYQKSLNEIVNEYRNIKYSIDYHLLLDKKEKEREAAREDWKNIENIKELKEGYMSQVIHVLIELMRKYNAIIVIEDLNKGFKNSRIKIEKQVYQKFEKMFIEKLNYLVFKNEVEKAEGGILNAYQLTNKFESFNKIGKQSGILYYIPAWCTSKIDPVTGFINRFYIKYENLDKSKEFVNKIEDIRYNSREDLFEFDIDYGKFTDKLNDTRNKWTLCSNGERIYTHKNNTGEWIDNRIQLTKEFKKLFEEYDVDLNNIKPEILQKSNIEFFKGNNENLGFMQLFKLMVQMRNSLTGKDEDNLISPVKNRNGKFFDTKDQIEGLPKDADANGAYNIARKGLMLVKQMKDTEDENLNKIKYNITEKEWLNYLQNRGM

SEQ ID NO: 475 - protein, 1229 aa, unidentified
  REGION 1..1229: note = Cas Enzyme sequence
MKEQFVNRYPLSKTLRFALIPVGETENNFNKNLLLERDKQRAENYEKVKGYIDRFHKEYIESVLSKARIEKVDEYANLYWKSNKDDSDAKAMESLENDMRKQISKQLTSTEIYKKRLFGKELICEDLPAFLTDENEKETVECFKNFTTYFNGFHTNRKNMYSSDGKSTAIAYRCINDNLPRFLDNVKSFQKVFDNLSDETITKLNTDLYNIFGRNIEDIFSVDYFEFVLAQSGIEIYNSMIGGYTCSDKTKIQGLNEYINLYNQQVAKNEKSKRLPLMKPLYKQILSEKDSVSFIPEKFNSDNEVLHAIGDYYNNHIDDFDLLTELLQSLNTYNANGIFVKSGVAITDISNGAFNSWNVLRSAWNEKYEALHPVTSKRKIDKYIEKRDKIYKAIKSFSLFDLQSLGNENGNEITDWYVSSINECNSKIKEAYLQAQELLNSDYETSYSKRLYKNEKATELVKNLLDAIKEFQKLIKPLNGTGKEENKDELFYGKFTSHYDSIADIDRLYDKVRNYITQKPYSKDKIKLNFDNPQLLGGWDKNKESDYRTVLLHKDGFYYLAVMGKSHSKVFVDAPEITSYDEDYYEKMEYKLLPGPNKMLPKVFFATKNIDIFQPSDRILDIRKRESFKKGATFNKAECHEFIDYFKESIEKHDDWSQFGFEFSPTESYNDISEFYREISDQGYSVRFNKISKNYIDGLVENGYIYLFQIYNKDFSKYSKGIPNLHTLYFKMLFDDRNLSNVVYKLNGEAEMFYREASINDKEKITHQANQPIENKNPDNEKKESVFEYDIVKDKRFTKRQFSLHLPITINFKAHGQEFLNYDVRKAVKYKDDNYVIGIDRGERNLIYISVINSNGKIVEQMSLNEIISDNGHRVDYQKLLDKKEKERDKARKNWTSVENIKELKEGYISQVVHKICELVVKYDAVIAMEDLNFGFKRGRFPVEKQVYQKFENMLISKLNLLIDKKADPTENGGLLRAYQLTNKFDGVNKAKQNGIIFYVPAWDTSKIDPVTGFVNLLKPKCNTSVPEAKKLFETIDDIKYNVNTDMFEFYIDYSKFPRCNSDFKKTWTVCTNSSRILTFRNKEKNNMWDNKQIVLTDAFKSLFNEFGIDYKGNLKDSILSISNVDFYKRLIKLLSLTLQMRNSITGSTLPGDDYLISPVANENGEFYDSRNYKGTNAALPCDADANGAYNIARKALWAINVLKDTPDDMLNNAKLSITNAEWLAYTQR

SEQ ID NO: 476 - protein, 1229 aa, unidentified
  REGION 1..1229: note = Cas Enzyme sequence
MKEQFINRYPLSKTLRFALIPVGETENNFNKNLLLERDKQRAENYEKVKGYIDRFHKEYIESVLSKAGIEKVDEYANLYWKSNKDDSDAKAMESLENDMRKQISKQLTSTEIYKKRLFGKELICEDLPAFLTDENEKETVECFKNFTTYFNGFHTNRKNMYSSDGKSTAIAYRCINDNLPRFLDNVKSFQQVFDNLSDETITKLNSDLYNIFGRNIEDIFSVDYFEFVLAQSGIEIYNSMIGGYTCSDKTKIQGLNEYINLYNQQVAKNEKSKRLPLMKPLYKQILSEKDSVSFIPEKFNSDNEVLYAIGDYYNNHIGDFDLLTELLQSLNTYNANGIFVKSGVAITDISNGAFNSWNVLRSAWNEKYEALHPVTSKTKIDKYIEKRDKIYKAIKSFSLFDLQNLGNENGNEITDWYISSINECNSKIKEAYLQAQELLNSDYETSYNKRLYKNEKATELVKNLLDAIKEFQKLIKPLNGTGKEENKDELFYGKFTSHYDSIADIDRLYDKVRNYITQKPYSKDKIKLNFDNPQLLGGWDKNKESDYRTVLLHKDGFYYLAVMGKSHSKVFVDAPEVTSYDEDYYEKMEYKLLPGPNKMLPKVFFATKNIDTFQPSDRILDIRKRESFKKGATFNKAECHEFIDYFKESIEKHDDWSQFGFEFSPTESYNDISEFYREISDQGYSVRFNKISKNYIDGLVDNGYIYLFQIYNKDFSKYSKGTPNLHTLYFKMLFDERNLSNVVYKLNGEAEMFYREASINDKEKITHQANQPIENKNPDNEKKESVFEYDIVKDKRFTKRQFSLHLPITINFKAHGQEFLNYDVRKAVKYKDDNYVIGIDRGERNLIYISVINSNGKIVEQMSLNEIISDNGHRVDYQRLLDKKEKERDKARKNWTSVENIKELKEGYISQVVHKICELVVKYDAVIAMEDLNFGFKRGRFPVEKQVYQKFENMLISKLNLLIDKKADPTENGGLLRAYQLTNKFDGVNKAKQNGIIFYVPAWDTSKIDPVTGFVNLLKPKCNTSVPEAKKLFETIDDIKYNVNTDMFEFYIDYSKFPRCNSDFKKTWTVCTNSSRILTFRNKDKNNMWDNKQIVLTDAFKSLFNEFGIDYKGNLKDSILSISNVDFYKRLIKLLSLTLQMRNSITGSTLPEDDYLISPVANKSGEFYDSRNYKGTNAALPCDADANGAYNIARKALWAINVLKDTPDDMLNKAKLNITNAEWLEYTQR

SEQ ID NO: 477 - protein, 1229 aa, unidentified
  REGION 1..1229: note = Cas Enzyme sequence
MKEQFINRYPLSKTLRFALIPVGETENNFNKNLLLERDKQRAENYEKVKGYIDRFHKEYIESVLSKAGIEKVDEYANLYWKSNKDDSDAKAMESLENDMRKQISKQLTSTEIYKKRLFGKELICEDLPAFLTDENEKETVECFKNFTTYFNGFHTNRKNMYSSDGKSTAIAYRCINDNLPRFLDNVKSFQQVFDNLSDETITKLNSDLYNIFGRNIEDIFSVDYFEFVLAQSGIEIYNSMIGGYTCSDKTKIQGLNEYINLYNQQVAKNEKSKRLPLMKPLYKQILSEKDSVSFIPEKFNSDNEVLYAIGDYYNNHIGDFDLLTELLQSLNTYNANGIFVKSGVAITDISNGAFNSWNVLRSAWNEKYEALHPVTSKTKIDKYIEKRDKIYKAIKSFSLFDLQNLGNENGNEITDWYISSINECNSKIKEAYLQAQELLNSDYETSYNKRLYKNEKATELVKNLLDAIKEFQKLIKPLNGTGKEENKDELFYGKFTSHYDSIADIDRLYDKVRNYITQKPYSKDKIKLNFDNPQLLGGWDKNKESDYRTVLLHKDGVYYLAVMGKSHSKVFVDAPEITSYDEDYYEKMEYKLLPGPNKMLPKVFFATKNIDTFQPSDRILDIRKRESFKKGATFNKAECHEFIDYFKESIEKHDDWSQFGFEFSPTESYNDISEFYREISDQGYSVRFNKISKNYIDGLVDNGYIYLFQIYNKDFSKYSKGTPNLHTLYFKMLFDERNLSNVVYKLNGEAEMFYREASINDKEKITHQANQPIENKNPDNEKKESVFEYDIVKDKRFTKRQFSLHLPITINFKAHGQEFLNYDVRKAVKYKDDNYVIGIDRGERNLIYISVINSNGKIVEQMSLNEIISDNGHRVDYQRLLDKKEKERDKARKNWTSVENIKELKEGYISQVVHKICELVVKYDAVIAMEDLNFGFKRGRFPVEKQVYQKFENMLISKLNLLIDKKADPTENGGLLRAYQLTNKFDGVNKAKQNGIIFYVSAWDTSKIDPVTGFVNLLKPKCNTSVPEAKKLFETIDDIKYNVNTDMFEFYIDYSKFPRCNSDFKKTWTVCTNSSRILTFRNKDKNNMWDNKQIVLTDAFKSLFNEFGIDYKGNLKDSILSISNVDFYKRLIKLLSLTLQMRNSITGSTLPEDDYLISPVANKSGEFYDSRNYKGTNAALPCDADANGAYNIARKALWAIKVLKDTPDDMLNKAKLSITNAEWLEYTQR

SEQ ID NO: 478 - protein, 1229 aa, unidentified
  REGION 1..1229: note = Cas Enzyme sequence
IRKDAVWVNRSKAFDNAVKSIPYFSREEIWDLLHRFFVSQKKYLAPLDSPTEDKPDTTKKNSSKRLIKSARNWLSNRFGTGKGADFERSAAVYEAISRWASEAKPNKTNVLIDDLAKALQKFGVKTRDIKGISNVLKKSGRKSKTRSLLLQLSAKPNIEDKDLQRLKDTAEKDSKKERSKIGVKGHRDYASEILKAVEAACGFTYLQEGDRAKHREFAVMLDHAARRVSSLHTWIKQAEAERRRFEIDTKKKDQLPASVKQWLDTYCQKRSEETGAVEPYRIRRGAIEGWKEIVEAWSKPAITTSEERIQEARRLQDNPEIDKFGDVKLFEDLAREDALPVWHANGDPDKPPDPQLLIDYVEASEAEFKKRAYKVPAYCHPDPFLHPVFCDYGCSRWNISFTIHKEKAPDDPHGLSLDVWDGRAIRSVALRWQSKRFVRDLALNPKRSSDKPKVTRADRFGRALAECPSSDEVCIRGLFEDEDWNGRLQAPRPELTALAKHVAKYGWDEKANKLRNRLNWFITFSAKLRPSGPWEEYTKYAGGKHASPNKRGTMAKLRLSRLPELRVLSVDLGHRYAAACAVWETLSKAAFEQEIRERQILRGGTGPNDLFCHTRHVTDGQAKVTIYRRIGADTLPDGTLHPAPWARLDRQFLIKLPGEEREARKASPTELAQVEKLEKGLGRKTPDNRVKRIDDLMSDTLRTVRLALQRHNRRAQIAFKLTTTKRHLPGGRVESLGEQDRVTLLCETLKMWHSLFMGDDWTDDWAKTLWDEHIVPLLPPFDNQKADDLKWLKPAAEELASNPTKTQELHILWASRWQEDEQLWKERLRWLRHWILPRGIQTSAQKASIRHVGGLSLTRLATIKTLYQVLKAYHMRPEPDNPRKNIPAEGDEALQNFGQKILDDLEHMREQRVKQLASRIVEAALGLGRMKRATNKRDPKRPRERVDQSCHAVVIEDLTHYRPEERQTRRENRQLMNWSANRVKKYLGEGCELHGLHLIKVPASYTSRQDSRTGAPGIRCQEVPLIDFLKEPFWCKKVKCAKQRLSVGKANACDRYLCQLYERWENTPVTKAQTAIRLQIPLKGGELFVSADQNSPASKGIQADLNAAANIGLRAITDPDWSGAWWYVPCEANTFKPVKNKVAGSAAIDPNVPLKKDSPNSEKPASGQKHLVQRSRASKSIINLWCDISSKSISERDQWQESVPYWEDVAVRVIKILQASLVCSTTNSQ

SEQ ID NO: 479 - protein, 1229 aa, unidentified
  REGION 1..1229: note = Cas Enzyme sequence
MKKIDSFINRYPLSKTLRFSLVPMGKTEENFNNRLLLEEDEKRAEAYEKVKKYMDRYHKAYIESVLSGFFLDGVAGYAQLYYKNNKSDKDTKEMEKAEAAMRKSIAKALQGTDTYKLIFAKEMVREVLPEFLTEKEEQETVAMFHNFFTYFSGFNENRRNMYVADEKKTAISYRCVNENLPKFLDNIADFKKVKSGLSVEDMKQLNADCYNSYGLNVTDIFTFDYFSFVLSQSGIDKYNGIIGGYTCSDGTKVKGLNEYINLHNQKVAKVDKSKRLPLMKPLYKQILSERETISFIPEKFLSDNAVIGAVRQYYAGITDTLSQMKELFSAFASYDLNSIYITAGTAVTDISNAVFGKWNAVVDAWNDEYASAKPLKKGKDVEKYNEERTKEYKKNKSFSVSELQRLGSQCASEDCRGDIAHYFEESVTEKISDIQNTYEKAKELLTSDYGENNDKKLCNNEKAIELIKNLLDAVKELERFIKPLLGTGKEEVKDGAFYGRFTVLYDALSAIDHLYDKVRNYMTQKPYSKDKIKLNFENPQFLGGWDKNKERDYRTVLLRKDGIYYLAIMDKENSKLFVEPPASDGCDCYEKVEYKLLPGPNKMLPKVFFASSNLDIFTPSEEILGIRKKESFKKGENFRIGDCHKFIDFFKQSIEKHEDWSQFGFEFSPTESYEDISEFYNEVKEQGYFINFRNIPVSYINSLVENGQLYLFQIYNKDFSPHSKGRPNLHTQYFRMLFDERNLADVVYQLNGGAEMFYRKASIGEKEQIVHYANQPIDNKNPNNKGKKSLFVYDIIKDKRFTKRQFSLHLPITLNFKAEGQEFINNSVRSAIKTSDDNYVIGIDRGERNLLYISVINSKGEIVEQRSLNKIIGGNSDTVDYHRLLGDKEVGRDKARKDWKTVENIKELKEGYLSQVIHEICELVVRYDAVIAMEDLNSGFKNSRFKVEKQVYQKFENMLISKLNYLVDKKKENPCENGGLLRAYQLTNKVNGVNKGRQNGIIFYVPAWMTSKIDPTTGFVDLLKPKYTSVSDSIDFIKKFDAIRYNETDDLFEFDLDYSKFPKGSLMHKKCWTLCSNGERIRTLRNPDKNNQWDNETIILTKEFKSLFDKYSVDYNNDIKSQVIAVEERGFHYEFIRLISLMLQMRNSETGNVDVDYLISPARNSMGGFYDSRTCAGSGLPENADANGAYNIARKALWAISVIKDTDEDELKNVNLSIKNAEWLEFAQK

SEQ ID NO: 480 - protein, 1230 aa, unidentified
  REGION 1..1230: note = Cas Enzyme sequence
SKEKDLLDSAKRIKEYISKYLADESDKCLSQPIKLKHLDEYYELYITKDRDEQKFKSAEEKLRKELADFLKEILKRLNKKILNDYLPEYLEDDEKALEDIAKLSSFSTYFNSYYDNCKNMYTDKEQSTAIPYRCINDNLPKFIDNMKAYEKALEELKPSDLEELRNNFKGVYDTTVDDMFTLDYFNCVLSQSGIDTYNAIIGNDKVKGINEYINLHNQTAQQGHKVPNLKRLYKQIGSQKKTISFLPGKFENDNELLKAVYDFYNTGNAEKNFTALKETITEFQNIFDNLSEYNLDGVFVRNDISLTNLSQNMFNDWSVFRNLWNDRYDKVNNPEKAKDIDKYNDKRRNVYKKSESFSINQLQDLIETSLEEDINSKKITDYFSCDFHRCTSKVENKYQLVKELLSTDYPENKSLKTSEKDVALIKDFLDSVKSLESFVKILTGTGKESGKDELFYGSFTKWFEQSRYIDKLYDKVRNYITEKPYSLDKIKLSFDNPQFLGGWQHSKETDYSAQLFMKDGLYYLGVMDKETKREFKTQYNAPENDSDTMVKIEYNQIPNPGRVIQNLMLVDGKIVKKNGRKNADGVNVVLEELKNQYLPENINRIRKTESYKTTSDNFNKDNLKEYLEYYIARTKEYYCKYNFVFKSADEYGSFNEFVDDVNNQAYQITKVKVSEKQLLSLVEQGKLYLFKIHNKDFSEYSKGKKNLHTMYFQMLFDDRNLENLVYKLQGGAEMFYRPASIKKNSEFQHDANVEIIKRTCEDKVKDKDNPTDDEKAKYYSKFNYDIVKNKRFTKPQFSLHLTLAMNCNQPDHYWLNNSVRELLKKSNKNNIIGIDRGERNLIYVTIINSDGVIVDQINFNIIENSYNGKKYKTDYQKKLNIREKERQEARKTWKTIETIKELKDGYISQVVHQICKLIVQYDAIVVMENLNGGFKRGRTKVEKQVYQKFETMLINKLNYYVDKGTDYKECGGLLKAYQLTNKFETFEKIGKQSGIIFYVDPYLTSKIDPVTGFANLLYPKYETIPKTHNFISNIDDIRYNRSEDYFEFDVDYDKFSQGSYNYRKKWTICSYGNRIQYYKDSRNKPASRVVNITEKFKETFNNAGIDFVNDNIKEKLLLVNSKELLKSFMDTLKLTVQLRNSEINSDVDYIISPVKDRNGNFYYSENYKKSNEEVPTQPQDGDANGAYNIARKGLMIINKLKNTDDVTNNELLKISKKEWLEFAQKGDLGE

SEQ ID NO: 481 - protein, 1230 aa, unidentified
  REGION 1..1230: note = Cas Enzyme sequence
MKEQFINCYPLSKTLRFSLIPVGKTEDNFNKKLLLENDKQRAENYENVKSYIDRFHKEYIKSALANARIEKINEYAALYWKSNKDDSDAKAMESLEDDIRKQISKQLTSTANFKRLFGKELICEDLPAFLTDENEKETVECFRSFTTYFNGFNTNRKNMYSSEKKSTAIAYRCVNDNLPRFLDNIKTFQKIFDNLSDETITKLNTDLYNRFGRKIEDIFSVDYFDFVLAQSGIKIYNSMIGGYTCSDGTKIQGFQGLNECIDRYNQQVAKNEKSKRLPLMKPLRKQILSEKDSVSFIPEKFNSDNEVLLAIEEYYNNHISDIDSLTELLQSLNTYNANGIFIKSGAAVSDISNAVFNSWNVLRLAWNEKYEALHPVTSTTKIDKYIEKRDKVYKSIKSFSLFELQELGAENGNEITDWYISSINECNRKIKETYLPARELLKSDYEKDYDKRLYKNEKATELVKKLLDAIKEFQQLVKPLNGTGKEENKDELFYGKFTSFYDSVADIDRLYDKVRNYITQKPYSKDKIKLNFDNPQLLGGWDKNKESDYRTVILRKNDFYYLAVMDKSHSKVFVNAPEITSEDEDYYEKMEYKLLPGPNKMLPKVFFASRNIDKFQPSDRILDIRKRESFKKGATFNKSECHEFIDYFKESIKKHDDWSKFGFEFSPTESYNDISEFYREVSDQGYYISFSKISKNYIDKLVENGYIYLFQIYNKDFSKYSKGTPNLHTLYFKMLFDERNLSNVVYKLNGEAEMFYREASINDKEKITHHANQPIKNKNPDNEKKESVFEYDIVKDKRFTKRQFSLHVSVTINFKAHGQEFLNYDVRKAVKYKDDNYVIGIDRGERNLIYISVINSNGEIVEQMSLNEIIGDNGYSVDYQKLLDKKEKERDKARKNWTSVENIKELKEGYISQVVHKICELVIKYDAVIAMEDLNFGFKRGRFPVEKQVYQKFENMLISKLNLLIDKKAEPTENGGLLRAYQLTNKFDGVNKAKQNGIIFYVPAWDTSKIDPVTGFVDLLKPKYTSVREAKKLFETIDDIKYNTNTDMFEFCIDYGKFPRCNSDFKKTWTVCTNSSRILSFRNEKKNNEWDNKQIVLTDEFKSLFNVFGIDYTSDLKASILSISNADFYNRLIRLLSLTLQMRNSIIGSTLPEDDYLISPVANDRGEFYDSRNYKGSNAALPCDADANGAYNIARKALWAINVLKDTPDDMLQKAKLSITNAEWLEYTQR

SEQ ID NO: 482 - protein, 1230 aa, unidentified
  REGION 1..1230: note = Cas Enzyme sequence
MSLEKFTNLYQLQKTLRFALIPQGKTLEHIEANGLLSQDKQRAEEYKIAKKIIDRYHKRFIEESLSGFSFSDGLLNEYERLAQITNKDDKQKKEFENTQSKLRKEIVARFDTKRLFGKELIQEDLPEFVTAKEEKDIIEHFYKWTTYFIGFNENRKNMYSDEEKSTAISYRLINDNLPKFIGNISVFEKIRDILQDNFSALKNELGLAEDICEYFRLDNYNRFITQKGIELFNHVIGGKTLEDKTKIKGLNEYINLYNQKQNNKSDMLPKFTPLFKMILSDRTALSWLPEQFETDSAVLEAIRSFYFSINEKRENCQSVLEQLNYVLREMGANSYDLNKIYLRNDTSLTGISQKHLGHWDEIQKAIETRYEKENPKSKGKTQEKYDKEKKKYFERFGSISLGFINECTGNNIENYFAKFGEETDCDGKIIKENCLKNVSEQYNEIEYLLNTDYPSDKKLSQDNENITKIKALLDALMDVFHFVKPLCGKGDETNKDEKFYGEFWGLFEELKKITKLYDMVRNYVTKKPYSIEKIKLNFGNSTLCNGWDKNKELDNTAILLRKKGNYYLAIMNNDSKTKFDNAEIAKSGETFYEKVDYKLLPGPNKMLPKVFLSEKGKAEFNSSVRILEIYEKGSHKKGDTFDKNEMHELIDFFKYSIAKHKDWKHFGFEFSKTSSYESIDKFYNEVLEQGYKITFRNISEKYINNLVNDGRLYLFQIYNKDFSERSKGIGTPNLHTIYWKELFSEENIKNVVYKLNGEAEIFYRKGTLKYDADILQNGHHYKELKDKFNYPIIKDRRFTVDKFQFHCPITLNFKAQGKEYINDDVNNFIKQNGIKHIIGIDRGERHLLYVSVIDLNGTIVKQFSLNEIVNEYNDKKYKTDYHALLSSKEKERTEQRREWKTIESIKELKEGYLSQVVHKISELIEEYCAVVILEDLNIGFIRGRQKVEKSVYLQFEKKLIDKLNYLVFKNKNKNETGGVLKALQLTNKFESFKKMGKQSGFLFYVPAWNTSKMCPVTGFVSLFDCRYESVDGAKKFFDKFADIRYNKDKEYFEFEVKNYTAFSGKAEGTRQNWIICTNDVRIRTFRNEAKKNGWDNEEIVLTKEFKDLFEKYNIEDFHNSLKTKIIEQAEKAFFERLLYLFKLTVQMRNSVTNSDVDYMISPVTDENGVFFDSRRNADSLPQNADANGAYNIARKGLWALKQILKADNIKNINLAISNKEWLQFAQGKAK

SEQ ID NO: 483 - protein, 1230 aa, unidentified
  REGION 1..1230: note = Cas Enzyme sequence
MDKTPKILNKQKKRFLGADLKRAEAFIVAKKVIDRRHRAFIDDVLQNLKASEDIRKLLTNKDDLRKKIAEAFTDDFQFNLLFGKDLFEKGSVLYSYAKNKEERDALDTLKNFSVFFSGYNENRKNMYANKKQNTAISYRIADVNLPKFTKNIECFDKIAKTPLFNQLPRDRKLRKLLHGQSLEDVFTLDYYVNVFTQFDIEQYNDIIGYLNEQIKLYNDHLKKEEQVLPKMIKLYKQILGEKSDEDDWLFKGFENNTELLMAVKDFYDVYEAEISAPLRTLLERLGTYELGMVYIRQNALSRISSSLCSSKDTIPLIMRPPKDGEDADDYVDKLRKEKKSFSINTINKKTQLNLCEYFAKHLSMYPVEDEYVEKDIFVAIEQAYSEAKDLFKALGGQSQELAGTGKEQKLKKLLDSLKELQHFIQPLLGKGDEKNKDWRFYNEFTNLWEKLSPINLIFDKVRNYMTKKPFSTEKIKVIFDVKKNFLLGWPDNQTKSDNGTQYGGYLLRTKNAIGEYDYYLGISNNFWLFRHKEGAEGAFERFDYYQLKSKVFYRYYYEDSNGEKGTDKFPKDKERLINAIMSVLERVNDPKLLETVSKGETPMALMKSIKEYSIDSNKDIYGQLIKDEEFSKINNEVTSNLKRSLLSLKFPKVREYKDKTFSVFTEVQNVIEDVCRQERIFNYFTVSDDEIKKAQKDKDKPLLLFKISNKDLSFADTYSAGKRTLRGKENLHTMYFKVLMEGGQQTFDIGSGQIFFRKKSIPQKVTHQAGVPIPNKNPNVIEKRPTRTLDYNLIKDKHYTDDKYLFHLSVKINYQQKELPTGNGLKDFIAEFNKKTLTYLREHKQDVNIIGIDRGERHLIYVSLIDSRGACVLSKDGKPIEPRSYNLIGNFDYQRKLKEVAKNRAEARKNWTTIERISDIKKGYLSQVVHEIATLAVEYHAIIVMENLTKGFKKGRFPIEHQVYQLFENMLIQKLSYLAYKSDSPSKEYGGITNGLQLAVPATNLEEYKKYGLRQNGWIFYIPAQYTSKVDPLTGFAPIINVKEAKKDIRKFFRAFDSIRFEDDLLHFIFNYDSEDIKCVATSPQREWHLTSYGHRVNSKEKEVDLTYEFKQLINKAGLLLEEVSKDTICGLSDELLSEFFYLFSMMLQMRNSNKDKDYIISPVVSAHPFIADEENSRGIKDADANGAYNIALKGLYWLNNNFPVDENGNLQYITNEEWFRFLQFQNPFL

SEQ ID NO: 484 - protein, 1230 aa, unidentified
  REGION 1..1230: note = Cas Enzyme sequence
MEDIFKDFTKVYSVAKTLRFSLIPQWETEKYIQKVGILQQDEDRAKKYQLAKQVLDTYHREFIEEKLSEFEYDWNELYQAFEQYEISRSDKDRKELEKVQKKAQTAIYEHLKKGLDELTPKKLIDDAISENPRIPITEDDREAMEFFKGFATYFQGYQTVRKNIYKAEGAASIAERIVRENFPKYYWNCKLFYNLPETFAAEAESAIAAEEDTNNFQKRFSPEGFKTVLTQNGINKYNQILGGKTENETSKIKGLNEYCNLAFQKGDLMRRVRFAPLLKQILSDRTSVSFIPTPYMEDSEVKAAVYDLCSHLKEYDLQKLYTVFDSSELDTNLIYVDKKQIPELSRLLFDNQWRELYACIRQKAEQEFGTGKNANTKIEQFCNRKIYTVNELQGIVGAADKKILPAIKEQIKRLYDIFLELFEKNQAELQSPNKIQSFDPIKKLLDAVQEMEKTMKIVAAPAEVQQEALFYSVFGEVYDLYRSSISVYNKVRNYATKKPYSVQKYKLNFFNPQFAGGWDKNKEQDYKTLLFRKNGIYYLGVMNADDKPSFRYHDDPMDSDFEKMVYKFLPGPNKMLPKVFITSDSGKKNFQPSEAILNGYSGKKHTKGNNFDLSFCHDLIEFFKESIAKHPDWSQFGFRFSDTSSYNDISDFYREIEKQSYFVRFTYISQEELHKAVSDGQLYLFQIYNKDFSTKSTGTPNLHTLYWRELFSPQNLKKPVLKLNGGAELFYRPASIENPFIHEQGSTLIKKRKQNGTPVEQRQYEEALRDAQSGMSIEELTEKYPALEFRKAPHDIVKDRRYSKASYSFHVPITLNFAASQKNSKINQKVLEVLKGNQEVNIIGIDRGERNLLYICCIDQKGNILEQRSMNIVNGTDYHTKLDAIEKRRDEERKAWKRIDQIKEMKEGYLSAAVHEVTEMMLRYNAIVVLEDLNSGFKRGRFRIEKQVYQKFEKMLIDKLNYLADKKRTYEPGGIANAYQLTEKFESFQNLGKQSGFLFYVSAAYTSKIDPATGFVSLFPSEQLRYSSVDKARKFFQTFHAICFDQETQSFRFSFRYSDFKLYMKDYTDRWTVYTTGDERINTVRQSDGRFKTERINVTERLMHLFRDYNIDPYCEDLQAQILEQDQKAFFSDLLNLFRLTVTLRHTDNMDDYILSPVRTEDGFFDSRKYRSQENSPFPKDADANGAYHIALKGLRVLKECIEDGKIKPDKKGMQTYHWLRFVQEKEFAE

SEQ ID NO: 485 - protein, 1231 aa, unidentified
  REGION 1..1231: note = Cas Enzyme sequence
MSVFSKYRNFFPVKKSISLGAIPTPVTVSNMKKDRILENDIIREERASRMEDVYDEEYKKLIEKILSSMDNKKELKELISAYEKRKEDRNGYADAENDFVESISKALSESEEYKNLCNAEYFSKELPKKVSSEIADLISKLNFGSFETHRKTRTTLFGVKDGSVAKRIGHDNFLIYMDNCAKLENALSILGKETLEKYVAEMGDASDITEELIYGYAEKENYISLFSQKAIDDYNLLINGYTVGKRTKIKGINELINEHNQQEKEKEMKLAFLSKLQKLPLFDATSYSVIPESFSSDSELIESIDMLYNKDIGERKSLKSVIENAAKIFLGFSEVYDLSHIYINPKKNNAFSKNFLGKWNILERLFKEDFAKKNESPKLKGKKLDKLVEDAYKNKVFSFTDVEKIADMCDGFEEFSIEKAYIRDILDKALAVSNAYNEYKAYMEEREKMENAPAIKRDNRAAAVIRELCLAVKECERSLIYILHGEELIEVGAEGDAVFYEKFNSLAETIKDSDRLYNKIRNFVSQTKVSEDKTRLMFNNDEFLKGWSDSSKKGGAIIRDGKEYYLICIMKGFKGIENIQSDGNDLDLMEYNFTGDVSKCLGKNLMYTGMKNKSGAGSKYVYNENSKIVADYGLTEDVFNAYQNGIHTKGYADQGYTEEEHKDALRKIIRYFNKALPLAYSGFDAEGLRDDYETFNEYCNELNKRNFTLGFRKASRTKIDEYEKAGYIYKFRIWCRDFSEKAYGIKQNYALIFNALFNEKNEYYSKIRLCGSAKLIFVKASIKDEDKVVHKAGQPIRNKNPKSGKPTSTYSYDIIKDRRKLKDHYIIQLPYEINRQALGNPVNLNAVVLDDIRNGNLKSIVSIKTGQDNLLWVCVTDMEGNIKKQYPLNVIDNNDYREKISARQNEMKSGNKEWRPGADIKSLKEGYLTLAIRKIVDAVFENDAILLLESSNGNKKEKTFGVDTRLYDRLADMLQVKLHYCFSKRKPFLEEGGLLNAYQLCGALPTGDKKKKVFQNGIVFFTNTAYTKNTDPITGFVPPVIGEYLNLKSAISIISNIKEIGYEKGQYYLLIDKKMYKNNYEGKTDWKCYIAGERIVAIRDDSLARGRRYEKADIGKIFADFLKENGIDANKNIKEQILERDDKPFFASLLEILNNVFRMNNGHGDENFFVSPVKNDKGLFFDSRISKEIPCTDANAAYNMARKMVISIEKIKNEETKTIPTTAEYLERIQK

SEQ ID NO: 486 - protein, 1231 aa, unidentified
  REGION 1..1231: note = Cas Enzyme sequence
MSVFSKYRSFFPVKKSISLGAIPTPVTVSNMKKDRILENDIIREERASRMEDVYDEEYKKLIEKILSSMDNKKELKELISAYEKRKEDRNGYADAENGFIESISKVLSESEEYKNLCNAEYFSKELPKKVSSEIADLISKLNFGSFETHRKTRTTLFGVKDGSVAKRIGHDNFLIYMDNCTKLENALSILGKETLEKYVAEMGDASDITEELIYGYAEKENYISLFSQKAIDDYNLLINGYTVGKRTKIKGINELINEHNQQEKEKEMKLAFLSKLQKLPLFDATSYSVIPESFSSDSELIESIDMLYNKDIGERKSLKSVIENAAKIFLGFSEVYDLSHIYINPKKNNAFSKNFLGKWNILERLFKEDFAKKNENPKLKGKKLDKLVEDAYKNKVFSFTDVEKIADMCDGFEEFSVEKAYIRDILDKAIAVSNAYNEYKAYMEEREKMENAPAIKRDNRAAAVIRELCLAVKECERSLIYILHGEELIEVGAEGDAVFYEKFNSLAETIKDSDRLYNKIRNFVSQTKVSEDKTRLMFNNDEFLKGWSDSSKKGGAIIRDGKEYYLICIMKGFKGIENIQSDGNDLDLMEYNFTGDVSKCLGKNLMYTGMKNKSGAGSKYVYNENSKIVADYGLTEDVFNAYQNGIHTKGYADQGYTEEEHKDALRKIIRYFNKALPLAYSGFDAEGLRDDYETFNEYCNELNKRNFTLGFRKASRAKIDEYEKAGYIYKFHIWCRDFSEKAYGIKQNYALIFNALFNEKNEYYSKIRLCGSAKLIFVKASIKDEDKVVHKAGQPIRNKNPKSGKPTSTYSYDIIKDRRKLKDHYIIQLPYEINRQALGNPVNLNAVVLDDIRNGNLKSIVSIKTGQDNLLWVCVTDMEGNVKKQYPLNVIDNNDYREKISARQNEMKSGNKEWRPGADIKSLKEGYLTLAIRKIVDAVFENDAILLLESSNGNKKEKTFGVDTRLYDRLADMLQVKLHYCFSKRKPFLEEGGLLNAYQLCGTLPTGDKKKKVFQNGIVFFTNTAYTKNTDPVTGFVPPVIGEYLNLKSAISLISNIKEIGYEKGQYYLLIDKKMYKNNYEGKTDWKCYIAGERIVAIRDDSLARGRRYEKADIGKIFADFLKENGIDANKNIKEQILERDDKPFFASLHEILNNVFRMNNGHGDENFFVSPVKNDKGLFFDSRISKEIPCTDANAAYNMARKMVISIEKIKNGETKTIPTTAEYLERIQK

SEQ ID NO: 487 - protein, 1231 aa, unidentified
  REGION 1..1231: note = Cas Enzyme sequence
MENKSIDSFINRYQLSKTLRFKLKPIGETETNFIKKGLLEEDKQRAQDYIEIKRIIDDYHKVFIDKVLSDPKIVDANEYAVLYYKSTKNDKEIKEIKDIEARIRKQISSALTKDSLFGKLFKKELFTDILPEFIKTYEDYEEKSRLINSFNGFVTYFSGFFENRKNMYSEEEKSTAIAYRCINENLPKFLDNCKVFQTIKDKLPKEDLEELNANISALCGVELQDMFEIDYYGFVMSQKGIDSYNQVIGGYSNSDKTKTQGINEIINLYNQTNKDDRLPKLKPLYKQILSDKETLSFIPESFNDDNEVINAVNMGYNMIADCMKEQELNEHISELDTYDLSGIYVKSECVSSISQQLTKDWSAITEQWNKEYDSTKINPAKPPKDMEKYNNDRKNAFKKKNFSLSELQVLIGRINNSLSIVDYYKDLFSDLIGLIHKNYDAAKQLLTEEYNCSKKLSQNDHAVEKIKVLLDSIKDLEAVIKQFMVTDAQANKDERFYGDIQPVYDKLRDFDRLYDKVRNYVTKKPYTNDKIKLNFQNPQFLNGWDRNKEKDYHSVLLKNGEKYYLAIMDKSDSKAFEKFPSENSNDWIKINYKLLPGPNKMLPKVFFAKSNIDFFAPSNEIMRIRNEETFKKGDKFNKSDCGKLIDFYKHSLSKHEEWREYGFVFKDTKDYNDIGEFYNDVRKQGYKLTYENINEEYLMDKVKQGKVYLFQIYNKDFSEYSKGTPNMHTLYFKMLFDERNLKDVVYQLNGGAEMFYRFPSLKIEETTVHKAGEAIRNKNKLSGKESSTFNYDIIKNKRYTKPQFSLHVPITLNFKSQGKEQSNLDVRKALKNSTDNYVIGIDRGERHLLYICVIDSRGKIVEQYSLNSIINEYNGKQYETNYHDMLDKKEAERDRSRKNWTTIESIKELKEGYISQAVHKICELVVKYDAVIAMEDLNFGFKKGRFKVEKQVYQKFEKMLIDKLNYLVINKNADPEQNGGLLKAYQLTEKFTSFKKMGKQNGYIFYVPAWLTSKIDPVTGFVDLLRPKYTSVDSTKDMISKFDFVRFNAAEDLFEIGLDYAKIDGGKTSYRSKWTVCTNGERIRSFRNKDKNSEWDSETIKLTDSFKALFDKYGISYPDGEDIRAKVNEQTSTDFFKSFIKLLSLTLQMRNSISNSDTDYLVSPIRGKNGDFYRSGEKSELPANADANGAYNIARKALWCIEQIKATDDDELKNVKLAISNKQWLEYVQKE

SEQ ID NO: 488 - protein, 1232 aa, unidentified
  REGION 1..1232: note = Cas Enzyme sequence
MNNNFYQFTNRYSLSKTLRFELKPIGKTRENIKAANPDFIHDQNIENAYQMLKPVFDILHEEFISRSLENSEAKKISFTDYFSVYKDLRNEKDKTKKLKLIKRLEDQEKKLRGFFTEIYKTEGENFKNQVGNDKKGKPILKGDSFKVLTEVGILKYLKENTDEFAKLELKTRDGKPIIKEDLEKALGKVGCKGLIEGFFTYFRGFNENRENYYSTEDKSTSVASRIIGDNLPKFCDNVLEFENQEEKYLKAHEFLKGKGIALTAKNQDGSETELHEISAKYFKMDYFVNCLSQEEIERYNLEIGNANNLINRYNQQQTDKSNKLKIFKTLYKQIGCGKKGDFIPVIKNDHELKERLDETIKRSERFFEDTQKLINMILNLEKFDGIYWSGSSLDRVSNMYFDNWHTLKEKLFDFNKKKDNYTIPQAIELSDVFEALDNTDIQFKNNKNTEGKDKILSSKDNNSIKLLKMIFEDIDKNNKIFENGKNEISQITEYRKDENSQIIKNWLDSILQSNQILKYFKVRENKISGNKLDTDIYEQLNKILFEENPTNNYDVIRNYLTQKPTERLKKLKLNFNNGQILGGWSDGEEKNKGAVLLRKDSKYFVGILNKRNIFDTSKGNNSIYNENGNAERLILRILKFQTLAGKGYLGEFGISYGEESKSDPKSAVKHLQKIIKERYVDKYPLLKKFVNNNWEDKKIFDAEIQKTLKDCYICEFKKISWNKVEEFINSGDMFVFEVCCKGKALQNLYWQEVFKENSTAQLLGGAEIFYRPTSTEIKKKTKEGYENKKDKRTGKEYILENKRFLSEKFLFHCPIKLNYKEKSYRKPQYAITEINLNINNELTKKENVDNVCFIGIDRGEKHLVYYSVINQEGEILEQGSLNVINGQDYADKLEKKASNRDEARKNWKTIGTIKDLKNGYISQVIHHIVKLALKHKAYIVLESLNTGFKRSRQKIEKSVYQKLELALAKKLNFLTDKKAKTGEISSVCKALQLTPPVNNFSDIEKVKQFGIILYVRANYTSQTDPVTGWHKTVRFTKTKQQDLKNEIYEKFNEIGFDGKDYYFVCKKDEKNTKEWILWSGKDGKSLDRYRGKRTIAGNWEIEKQDIVKLPDEVFKGFDKTKSLKDQLNQKLDLSKIGTLKYSIDLIQQIRNTGKDEKDNDFILSPVRDGDGINGNHFDSRQSNKIPNGDANGAYNIARKGLLAFIKKDGIKQNPENPELYITDEDWDNFASK

SEQ ID NO: 489 - protein, 1232 aa, unidentified
  REGION 1..1232: note = Cas Enzyme sequence
MNNNFYQFTNRYSLSKTLRFELKPIGKTRENIKAANPDFIHDQNIENAYQMLKPVFDILHEEFISRSLENSEAKKISFTDYFSVYKDLRNEKDKTKKLKLIKRLEDQEKKLRGFFTEIYKTEGENFKNQVGNDKKGKPILKGDSFKVLTEVGILKYLKENTDEFAKLELKTRDGKPIIKEDLEKALGKVGCKGLIEGFFTYFRGFNENRENYYSTEDKSTSVASRIIGDNLPKFCDNVLEFENQEEKYLKAHEFLKGKGIALTAKNQDGSETELHEISAKYFKMDYFVNCLSQEEIERYNLEIGNANNLINRYNQQQTDKSNKLKIFKTLYKQIGCGKKGDFIPVIKNDHELKERLDETIKRSERFFEDTQKLINMILNLEKFDGIYWSGSSLDRVSNMYFDNWHTLKEKLFDFNKKKDNYTIPQAIELSDVFEALDNTDIQFKNNKNTEGKDKILSSKDNNSIKLLKMIFEDIDKNNKIFENGKNEISQITEYRKDENSQIIKNWLDSILQSNQILKYFKVRENKISGNKLDTDIYEQLNKILFEENPTNNYDVIRNYLTQKPTERLKKLKLNFNNGQILGGWSDGEEKNKGAVLLRKDSKYFVGILNKRNIFDTSKGNNSIYNENGNAERLILRILKFQTLAGKGYLGEFGISYGEESKSDPKSAVKHLQKIIKERYVDKYPLLKKFVNNNWEDKKIFDAEIQKTLKDCYICEFKKISWNKVEEFINSGDMFVFEVCCKGKALQNLYWQEVFKENSTAQLLGGAEIFYRPTSTEIKKKTKEGYENKKDKRTGKEYILENKRFLSEKFLFHCPIKLNYKEKSYRKPQYAITEINLNINNELTKKENVDNVCFIGIDRGEKHLVYYSVINQEGEILEQGSLNVINGQDYADKLEKKASNRDEARKNWKTIGTIKDLKNGYISQVIHHIVKLALKHKAYIVLESLNTGFKRSRQKIEKSVYQKLELALAKKLNFLTDKKAKTGEISSVCKALQLTPPVNNFSDIEKVKQFGIILYVRANYTSQTDPVTGWHKTVRFTKTKQQDLKNEIYEKFNEIGFDGKDYYFVCKKDEKNTKEWILWSGKDGKSLDRYRGKRTIAGNWEIEKQDIVKLLDEVFKGFDKTKSLKDQLNQKLDLSKIGTLKYSIDLIQQIRNTGKDEKDNDFILSPVRDGDGINGNHFDSRQSNKIPNGDANGAYNIARKGLLAFIKKDGIKQNPENPELYITDEDWDNFASK

SEQ ID NO: 490 - protein, 1232 aa, unidentified
  REGION 1..1232: note = Cas Enzyme sequence
MQQFTNLYPVSKTLRFELIPDERTRAMLEHSDLIAQDEHRAASYKLVKKIIDRYHMAYIDSVLEALILPSGYLKGMCDLYLKSQKSDADKKALEQLQDKLRKMIAGALTKDNRFKRIDKKELIREDIMSVITPEERALIDEFRDFTTYFTGFHKNRQNMYSAEAQSTAIAYRLIHENLPKFIDNMATFARIAASPVAEKFPQLYQEMSEYLNVREIGDLFKLDYYTELLTQRQIDVYNAVIGGRTQDDGDKKIQGINEYVNLYNQQQATKETRIPKLKPLFKQILSDREAVSWLPEEFASDKDMLEAVRDCCNSLNSHVFGMLRELLTNLSGYRLDGIYIPNDLSISDISQAMFKDWAVIKKGIVEDLKRNYPPKRSEKADNYEERIRKLIKRENSFSIGYLNSCINKDICDYFASLGAIDDGENQAVNLFMRIQNAYTEVQSLLENGYPEDCNLAQDKDNVAKLKTLLDAIKALQHFVKPLLGNGDEPDKDERFYGELAVLWEELDRVTPLYNKVRNRMTRKPYSIEKFKLNFENSTLLDGWDVNKERDNTCVILRREGKYYLGIMRKQFNDIFVNVPNAQGEDNFEKMEYKLLPGANKMLPKVFFSKSRIKEFNPSPTLLEHYHQGTHKKGDNFSLQDCHELIDFFKVSLAKHEDWGKFDFHFSPTESYEDMSGFYREVEQMGYKISYKLIPFSYIDQMVEEGKLFLFQIYNKDFSRFSKGTPNLHTLYWKMVFDERNLADVVYKLNGQAEVFYRKKSLAYKRPTHPAYQAIKNKNSEGKKAESTFDYDIVKDRRFTTDKFQFHVPITINFKATGTGNINVRVNQFIHDHDDLHFIGIDRGERHLLYVTVIDSKGRIKEQFSLNEIVNEYQGTKYKTNYRSLLDKREEERQRERQSWNTIEGIKELKQGYLSQVIHKIVTLMVKYRAVVVLEDLNMGFKRGRQKVESSVYQQFEKALIDKLNLLIDKRIDATAPGGLLHAYQLTNKFTSFREMRRQNGFMFYIPSWNTSKIDPVTGFVDLLHPRYESVEKSRVFFSKFKSIRYNQDNGWYEFSLDYKDFTSKADGSRTEWTLCTHGTRVVTYRNPKKNSSWDSREINLTEEFNALFEAYGIQAQGNLKQAIAEQSEKDFFDKLTHLLSLTLQLRNSITGTEVDYMISPVADEYGHFFDSRTCGKDLPQNADANGAYNIARKGLWVARQIQASAVDEKVDIIMSNKEWLVFAQEKPYLADD

SEQ ID NO: 491 - protein, 1232 aa, unidentified
  REGION 1..1232: note = Cas Enzyme sequence
SKTLRFELRPVGRTQEWIEKNHVLEHDGKRAEDYPRVKELIDAYHKICISESLKGVALDWCPLRDAIERNRQEKSDESKTALEEEQAKMRKKICEKLSKFEHYQELVKADTPSKLINGILPHEEALDTFNKFAVYFEGFQENRRNIYSSEAISTGVAYRLVHDNFPKFLANIEVFENIKEICPEVIQQVATEMAPFLEGVMIEDVFTVSYYNAVLTQNGIDYYNQILGGVAKDDQKYRGINEFVNLYRQAHPELAAKKKSLTMVPLFKQILSDRETLSDIARPIESEKQLIEVINNFYQRITNFDINGKNVNVVKELIDLALSLDTYNPEGIFISAKSITDVSHSLYGQWNRINEKLYDKAVEAIGGVQTAKNKKKVEAYLKKDAYSLSEISFGDDVSITQYFSALTNSADSINSLYLQFQNWCKSAEKPQFVHNEVGTEYVKMLLDVIMLVLHKCGALLVSLENELDGDFYNKFLPLYAELENVILVYTRVRNFLTKKLSDTGKIKLKFDTPSLGAGWGINKERKNKAILLFKDGLSYLGIMNVKGTLDFNCKIEAGEPTFKKMVCRNYSKPYMDLPNSFFSQNGIKKFHPSERIQKIYFAFKQDSKSVDIKKVHELIDYYKDAISRHEDWGSFGFKYSPTESYETINDFYTEVAAQSYKLSFIDIPKKQVDEWVENGQLYLFQLYNKDYAEGAHGRKNLHTMYWESLFSEENLSNLFIKLGGQAELFYRPQSIKKPVSHKVGTKMLNRRNKDGKPIPDAIYRSLYQYFNGKKTEAELTTEEKAYISQVIVKDVHHEIIKDRRYTKKFFYQFHVPIVFNANAPKRPKINEKVLEYIKGNPDVNIIGIDRGERHLVYLTLINQHGEILKQKTFNVVGDYDYHEKLKQRENERDQARKSWQSVGKIKDLKEGFLSAVVHEIAKMMIEYNAIVVLEDLNWGFKRGRFKVERQVYQKFEKMLIDKLNYLSFKDVDTANEGGILRGYQLTEPVANYTDIGKQTGFLFYIPAAYTSKIDPATGFVNHFNFNDITNAEKRKEFFMKMERIEMKNGNVEFEFDYRKFKTYQTDFQNVWTVNTSGKRIVFDTEKREHKAVYPTQEIVQAFGNKGITLEEGMDIKAFIGGIEADVKNAPFFSSLFYAFQKSLQMRNSNADTREDYILSPVVRDGKQFCTTDEVNKGKDADGNWISKLPVDADANGAYHIALKGLYLLMNPQTKKIENEKWLQFMVEKSYKE

SEQ ID NO: 492 - protein, 1233 aa, unidentified
  REGION 1..1233: note = Cas Enzyme sequence
MDNMYNEFTGIYPVSKTLKFELIPQGRTQEYIDSRGYISEDEHRAESYKKVKKIIDRYHVDYIERALEGFKLEGLDKYYELYIKTNKSENELEQFADLTISFRKQIAKRLTANKDYNRMFKKELINSDLLEYVGNNLEERDAIIEFKGYSTYFQGFFENRKNLYSDEEKSTAIAYRLVNQNLPKFIDDIMIFSSIVKTSFTPQIIQIEENMNQILNNKKLEDVFIPDYFNNLLKQSGIEFFNSVIGGISCNSGEHIKGLNSYINEFNAKKKANDRIGKMKPLFKQILSDREKLSFIPESYSCDQEVLDTIASFHLQTMEAFEKLQSMIENISNYNTKGIFVMNDTSIQALSASVFGEWNYLKIKIERAYDNNYSGKREKNTEIYQKEKNKYLKSKLSFSIYELNQMTEDRRLISDYFEQNAAGYFEKVNSSYEGMAELLEKSYPENRRLSLDTESVKGLKSYLDNVKKLQSFIGILRGKGNEPDKDQSFYGDYDSLLESIDIIGIVYDKTRNYLTKKPYSNEKIKLNFSRPTFLDGWDVNKERANLTVLLRREGKYYLGIMDKASNKIFEDVACSETRGEFYEKMEYKQLPGPNKMLPKVFFSNSRIEEFDSSPEIMSIYSNKTYIKGPEFNIDDCHKLIDFYKASINKHEDWSKFGFQFSDTSSYKDISEFYREVESQGYMIRFIKIPVPTIDAYVNSGQLYLFQIYNKDFSSFSKGKKNLHTLYWNMLFDDCNLKDPIYKLNGQAEMFYRKKSITDDCTVIHKAGEPISLKYDVEGKSYVSVFKYDIIKDKRYTIDKYHLHVPVTMNFGKYGKDNINSMVRIAIRNSEDIHIIGIDRGERNLLYISVIDEYGSVVEQFSLNNIVSEYNGVQHNVNYHYLLSKREKERMTERREWQTIENINELKEGYLSQAVHKITQLMVKYNAIVVLEDLNFGFKRGRQKVEKQVYQKFEKMLIDKLNYYVDKSIEPELPGGILKAYQLTSRFESFNKLGKQCGFLFYTQPWNTSNIDPCTGFTNLFYSNDLKYESIDSTRNFWSKFDDIKYNAKEDYFEFSFDYSNFNGRADGTQTSWTVCTNGSRIVNFRDSEKKGQWNNLEINVNEEVKNLLKSQGIDIKAESLLMAICEVEDKEFQKRLLSLFKMTLQMRNSIIGTDEDYILSPVMGNNNAFFDSRKSSIDLPENADANGAYNIARKGLIMVHRIKSKGDDIEKISLAISNKDWLSFVQEMGKQNG

SEQ ID NO: 493 - protein, 1233 aa, unidentified
  REGION 1..1233: note = Cas Enzyme sequence
MTGYSDFIGLYPLQKTLRFELKPVGRTLENLKESGYFDDDFRRNDCYETVKELMNDYHRIFIDDCLSRSTIDWKPLETKILERKQSNNEATRKALRECLIAYKKEIEKLFTSDDRFKDMTKAELLKKYIWPEVKERGNEDELEAMAAYDRFAVYFQGYHENRANIYSAMKPKVSVPSRIVDDNFLKFVDNCQKYKYIKKEKPELIEQLAKNLELDNVDRFFDVSYYNDFLRQKGIDEYNYVLDGRVDETDHIQGLNVLLNLAHQKDPGFKRVLMSQLYKQILGNSQSRSFIPKQFESDDELKETVLGFCNGLIDTGITNRAQALFNNLLDYDIKNIFVSKTDLPKLSVKMFGSWDRIDGLLYDYYFRISGNDNTPKTRKTVEKRLKEDYFSLFDIVEAAKENGDFDITSFSDAIDAPCNSINNNRDLINDLKAGNIRDGSEDELDSSIRTLRSILDPIMDLRHITTLFSYDEGSEKDDEFYSELESLNKALAPVIPIFNKTRNYCTRKRYDVSKIKIKLGLPTLADGWDMNKEKDNGAVILRKNGQFYLAVMNPKNKVKFEMIGEDSHDNYEKMEYKYLPSPMKMFPKVFFSKKWMSEHPPSQHIVDGYEKKKMNAGNNFDLHFCHDLIDYYKDCMKKYGEWDVFNFQLSPTKNYNNMQDFYREIERQNYILSFRNISTSKVYDLVNENRLYLFQIRNKDFSEHSKGMPNMHTLYWLAAFSKENLENVRIKLNGEAELFFRNASISKPTVHKTGSTLIAKRDKENNPIPTHIYHELFKYKTGQISVLSEEAKQYEDSLVIGTAKYDIVKDRRYTQDKMFMHVPLTFNLRAEDQTNKINGKVIDKIRTDVNFSIIGLDRGERNLVYYSLIDREGRIKDQGSFNIIDGTDYERLLDQRQRGNIDARKNWNKAENIKEMKSGYISYIIRKLAQMIIDNNAIVVMEDLNYGFKHGRFKIEKQIYQKFETALITKLNYLAFKDKSDFESEGHVLSGYQLTSPITDVKNIGRQTGILFYVPASYTSKIDPTTGFANLFNMSAITTVESKKDFISKMKSITYDKDEDMFCFSFDYRDYQTNIEDSVNTWDVWTAGERFIYRKNDRDYERVVPTEIMKNCLNKAGIRLDGELKNKILVAESTVIKDVFYAFDLSTRMRVQNRDLDYIISPVRGPDGKFFRTGMKPEYPIDADANGAYNIALKGEMLMRAICSGKPDDKSLPVTTAADWFRFLEAELKIWKN

SEQ ID NO: 494 - protein, 1233 aa, unidentified
  REGION 1..1233: note = Cas Enzyme sequence
LFRNSHNFQTGSVYLENKNSIETIAKGIKYSWLANISNRHPEKTIQNRLDEAVKKIKKWIRQNPNKISSFLDKNQYKDKELFDKNEYEKHLKNIKEINHTNESVAFERTNIQTQIGLLFKHFPSRFTAILMCILWNKFNQGDTDPEQLQKDKNKYDDLDSKFLVEGKDPIEYCRGDRGYVFPAFTALPKWGDSDLGEPQWKEFDIVAFKEALTVIHQIDEKTKEREKEKQKKEEKINRMEQQSQQSKNKKTDDDSETEELPFIGHFEWNKELEDKGEKKGDPRVKRLRELLEKELAQEYFGEDEGTDKIPYGLRRRTLRGFREIQKKWQNILKNNQEFSEELKQKKLEEELNNYQKKNKYSIGSAPLFKELLKVKEKNWIIWQEPTKKIKKQYNEQGFAENPLDALCDWYELKEDIEKLGKPIQFTPADPEHSRRLFRFGDVASGFNSTGGQYGHNKDSLSFRVPVIVETEGKLEQKNIKIYYSAPRLFRDSLRKKPKESGEKEEELERMPWLQPMVSALGFSKPLEQSFSKCNVQLMPDKTRSRKWRFLLNFPITLKVKKLQDQIGQNFNVDWQQNCRGADNRYLKWPKNSNWNGDKKMDKVDWFEKTDPFSCLSVDLGQRSAGAFALIKASIKKEQKARFIGSSAKDKDWYAVVKAMGLLRLPGEDMKFYQKGVLKTEPYGYKGRKASAEELEETKNIISSLIGEEAVAELLGEKEEQEKLSFPELNDKLLVAIRRSQGKLSQYYRWAWMLGENSRKEKALKEIEEQEDETEWSELAKEGKAQKLQTLVKGKIPSFQGKIEKKLLILANRILPLRGRKWEWIEHPKKSDCRLLKQTNYGTVATNKKNQGQRGLSMKRIEQIEELRCRFQSLNQSQRKKPGDQPPSWSEMRNHPVPDPCPDLLKKLEELKKQRVNQTAHLILAEALGVKLKAPAKPETERNQKDIHGEYEKARDPVNFIVIEDLSRYLTKQDRSPSENSRLMKWSHRAVTNKLKELCEPYGIPVLEVPAAYSSKFCSRTGIPGFRAEEVTLKDKNRYPYKQWLEKDEKEDNEEKIRREFLEQLFKTLENHKGQSKNGQLKTALVPKPGGPIFVPIKDYTSGKKQGALRSAVIQADINAAINVGLRAIASPLVGEIHHRIRSEIKETSGSKKIIVSKTRSLEKRRFKTETTIKMSNVEGVEKINRKSNFFIDVAGIADFEKACIEGIKYASGKAIWKEVNNQQWKRCKELNEK

SEQ ID NO: 495 - protein, 1234 aa, unidentified
  REGION 1..1234: note = Cas Enzyme sequence
MSEKLINEKFVGLYPVSKTLRFELKPIGRTKEYIEMDGIIDTDTTLSENYTLVKGIIDRYHKSFIEESLRDVKLKGLQEFYELYNKSNRDTADQKRFERIQDDLRKQISQTFKKSGSYATLFKKELIKNELPLFVKGNAEEERLIASFSDFTTYFTGFNQNRANMYSNEAKSTAIAYRLIHQNLPKFMDNMKVFKMLMETEIKKQISGLSNKLSQRYQAMPAINTYFELDGFNNVLTQQGIDVYNTIIGGFTTKEGLKTQGLNEYINLYMQKSKVKMPKFKPLFKQILSDRNSLSFIPENFANDEEVLASIETAFEGIRTDVLETEEVSIGALFDNLVSYDLDRIFVDNDASLTTISQKMYGDWSVFRTAINERYDNTYTGKKKKPEKYEEEKNKILKNIKSYSINDLDSLASDMKMTPGVANYFSEGVKNHIENIYAGNEEFQKIKQKGFVDGNYLKKSDKDIARIKKFLDSIKELQWFIKPLTGSRNINDKDEVFYVELLRLYDALDVITPLYNKVRNYVTSKPYSTEKIKLNFGKSTLLGGWDKNKERDNLGVIFLKDNDYFLGIMNRNNTKILEHAPVATSNMVYKKMNYKFIPGPNKMLPKVFFSKSREVEFAPSEEVLRIRKQETFKKGDNFNIEDCHTLIDFFKDSIKKHEEWSQFGFMFTETEKYKDISGFYREVENQGYKITFNNIDESYINRLVDEGALYLFQIYNKDFSPYSKGTPNLHTLYWRALFSPDNLKDVIYKLNGEAEIFYRKASIRQNDLIIHPANEPINNKDPQNNKKTSLFKYDIVKDRRYACDKFQFHVPITMNFKAPGENQMNTKVNMAIRDSDEMHIIGIDRGERNLLYLSVIDLDGKIVEQFTLNELLTFDKNNHEHIRDYHELLDKREKENIAARQNWTTINTIKELKEGYLSQVIHVICRLIIKYNAIVVLEDLNFGFKRGRQKFEKAVYQKFEKMLIDKLNYLVDKNLQLEENGSLLKAYQLTGKFESFQKMGKQTGILYYVPAWNTSKIDPTTGFVNLFYTKYESIEKTRLFITKFENIWYDQETSSYAFKFNYSDFTYKADGTRTKWILYSHGKRVDHFRNKEKNNEWDVKYVDLTEEFTDLFERYNVNVNSAEFQNNLIAVDNSDFYKRFMKLFALMVQMRNSDEVKGLDQTISPVKNRKRTFYISGTSEELPLDADANGAYNIAKKGLLLVRKIKKSDKEDIKKIKLAISNKEWLSFAQENLL

SEQ ID NO: 496 - protein, 1234 aa, unidentified
  REGION 1..1234: note = Cas Enzyme sequence
MSEKLINEKFVGLYPVSKTLRFELKPIGRTKEYIEMDGIIDTDTTLSENYTLVKGIIDRYHKSFIEESLRDVKLKGLQEFYELYNKSNRDTADQKRFERIQDDLRKQISQTFKKSGSYATLFKKELIKNELPLFVKGNAEEERLIASFSDFTTYFTGFNQNRANMYSNEAKSTAIAYRLIHQNLPKFMDNMKVFKMLMETEIKNQISGLSNKLSQRYQAMPAINTYFELDGFNNVLTQQGIDVYNTIIGGFTTKEGLKTQGLNEYINLYMQKSKVKMPKFKPLFKQILSDRNSLSFIPENFANDEEVLASIETAFEGIRTDVLETEEVSIGALFDNLVSYDLDRIFVDNDASLTTIAQKMYGDWSVFRTAINERYDNTYTGKKKKPEKYEEEKNKILKNIKSYSINDLDSLASDMKMTPGVANYFSEGVKNHIENIYAGNEEFQKIKQKGFVDGNYLRKSDKDIARIKKFLDSIKELQWFIKPLTGSRNINDKDEVFYVELLRLYDALDVITPLYNRVRNYVTSKPYSTEKIKLNFGKSTLLGGWDKNKERDNLGVIFLKDNDYFLGIMNRNNTKILEHAPVATSNMVYKKMNYKLLPGPNKMLPKVFFSKSREVEFAPSEEVLRIRKQETFKKGDNFNIEDCHTLIDFFKDSIKKHEEWSQFGFMFTETEKYKDISGFYREVENQGYKITFNNIDESYINRLVDEEALYLFQIYNKDFSPYSKGTPNLHTLYWRALFSPDNLKDVIYKLNGEAEIFYRKASIRQNDLIIHPANEPINNKDPQNNKKTSLFKYDIVKDRRYACDKFQFHVPITMNFKAPGENQMNTKVNMAIRDSDEMHIIGIDRGERNLLYLSVIDLDGKIVEQFTLNELLTFDKNNHEHIRDYHELLDKREKENIAARQNWTTINTIKELKEGYLSQVIHVICRLIIKYNAIVVLEDLNFGFKRGRQKFEKAVYQKFEKMLIDKLNYLVDKNLQPEENGSLLKAYQLTGKFESFQKMGKQTGILYYVPAWNTSKIDPTTGFVNLFYTKYESIEKTRLFITKFENIWYDQETSSYAFKFNYSDFTYKADGTRTKWILYSHGKRVDHFRNKEKNNEWDVKYVDLTEEFTDLFERYNVNVNSAEFQNNLIAVDNSDFYKRFMKLFALMVQMRNSDEVKGLDQTISPVKNRKRTFYISGTSEELPLDADANGAYNIAKKGLLLVRKIKKSDKEDIKNIKLAISNKEWLIFAQENLL

SEQ ID NO: 497 - protein, 1234 aa, unidentified
  REGION 1..1234: note = Cas Enzyme sequence
MSNFYSTFINLRPVSKTLRFSLIPIGKTRENIRSAEIISQDEKKSQDYVILKDVFDTYHKAYIDQHLCRIQGDWSELAKALEERQSSQSAETLNRVQTAYRKEIAKLLISEKATKLGKNDHLFLADDGVTFLQKNDLAKLIKLTVDEKRAAERENRRPEYLIPELGEHIKAVEQFDRFAGYFLAYQQARNNIYTDEGSTSVAHRVVNENFPKFMANIHTYRRLPESLKQEFEHSLEDLLYGVPLETVFSTDYFNAVLAQTGIERYNTLLGGKTEEGGVKIQGLNELCNLAFQQGILPKKVVFVPLYKQILSDRDRASFLPEKFKSAVEMLTALGHFMTELNEMIAAEHESVADNIKSGICDSDRVYIGKSQLASLSMLCFDNWNKLRDAVRPKEVYSLSELQLVSEKDILGIVREQFLAKLGKITEASTSLPPVLKKETLREEDYSKIKTYLDAVIDAQHLLKIFDADDDADKDSVFYGTSDALNETLRKGIPLYDKVRNFATGKPYSEEKFMLTFDAPTLLNGWDKNKERDNCCMLFRRDGLYYLGILNAKDKPTLTEEAEIDGPSYEKMVYKYLPTPSKMLPKVFNKSGRWIAAHGLDDEIRDGYEKGLHKVGPDFDPVFMHKLVDYYKVCISQYEDWATFRFRFSDTETYRTMADFYGEISAQSYNVSFTKVSERQINDAVDAGQMYLFQIYNKDFSEFSHGAPNLHTIYWRELFSAENLKNPLVKLNGEAEIFYRHPSVKNPFRHQKGDVLINKVDAEGVTVPDARYRTAASDAASSMPLEILRASYPELIFKIADREIVKDNRYTKESFAFHVPLTLNYGCDAGIRLNQTVCEKLQSDEPYYIMGIDRGERNLIYISVIDRHGRIVEQRSLNVVGQNKVDYQAKLDTLERERQDARKNWRAITAIKELKEGYLSFAIHEITELMMRYPCILVMEDLNFGFKRGRFHVEKQVYQKFEKMLIDKLGFCMLKDRTPEEEGSVRHAYQLTEPFESFQKLGKQSGVIFYVPAAYTSKIDPLTGFVNLFTSAQLNYTSVEAARTFFGTMREIGYDAQRDCYRFAFRYGDYDLNKKDYTDAWTVYTAGEDRIAHSVKNGRHEYETVDVTKRMKALFARFGIDPYASDLRAAIAAVDKKEFFSELLRLFRTTVQLRYEDQTQDFILSPVEKDGRFFDSRTAERDLPQDGDANGAYHIALQGLRLVWERIENGKVKTDGKGEQSYNWFRFVQKKEYRK

SEQ ID NO: 498 - protein, 1234 aa, unidentified
  REGION 1..1234: note = Cas Enzyme sequence
MSDYNQFTNLFSLSKTLRFELKPVGKTLKYIEGLINQDEKRASDYQRAKKIIDNYHKAFIEKALHHCATKIKYNSEGKDNSLEDYVYYYMGEGKNDQSRNVHLKKIQDSLRAEIVKGFNETDGFKDLSGKELFKEHLLNFVDNEEDRRIVEGFNNFTTYFTGFYKNRENIYTAEEKSTAIAYRLINENLPRFLDNYLTISILSESPVADKFSEIYDNYSEYMNVLELVELFNPGYYRETLTQSQIELYNAIIGGRTLEDGTKIQGINEYVNLFNQQNSKKERLPKLKPLYKQILSDRDHLSWLPEKFDSDKSLFEAIEKFYQDIAPILQDNDDLSIVNMFSDFGKYNLNGVFIKNDVAITEISQGIYGDWQVIKNSILEIIKAQNPKKKKETEEKYQERISKAYKSIPSFSIAHINESTKAEQKIEKYLSERVNGPEGLVVKIRNSYEDIKSILKAYPEDKKLIQDSSSIEKIKAFLDSVKNLQLEIKPLLGDGEEVGKDEIFYADFDKIWSIIDSITPLYNKARNYLTQKPYSIEKFKLNFENSTLLNGWDLNKETANTSIILKKGQYYYLGIMNKRFNKEFVDLDEAESSDVYYKMEYKLLPGPNKMLPKVLLSKKGIETYNPSTELLDLYERGTFKKGPDFNINDLHQLIDFYKSSIERHEDWKKFEFKFLPTEEYKDISAFYRDVAEQGYMIRFKAIDADYIDNLVNSGKLYLFQIYNKDFSEYSKGTPNLHTMYWKMLFDEKNLSNVVYKLNGEAEVFYRRKSIDAYPTHVANVPIKNKNGLNEKKESVFSYDLYKDKRFTADKFQFHVPITMNFKANGSDYINDKVNDYIKDAKDLHIIGIDRGERNLLYVSVIDLEGNIVEQYSLNEIISSGKGFATDYHQLLDAKEKERDAARKSWKTIENIKELKEGYLSQVVHKISELMVKYHAIVVLEDLNVGFMRGRQKVEKQVYQKFEKMLIDKLNYLVDKHRPADELGGLLHALQLTGKVESMKTLGKQCGFLFYVPAWNTSKLDPATGFVNLFSSSDLKYESIEKTSAFFDKFDRISYNSVKDLFEFEFDYSRFTSKAEGSREHWTIYSYSDRIVNFRNTEKNSMWDAKVVSLTPEFKKLFSEYDIPLGPDMKSDIVAKKDKGFLEKMLGLFRLILQMRNSMINSEIDYIISPVVARDGKFYDSRECRPELPENADANGAYNIARKGLILVDKIKNAEDTSAIKLGITNKEWLMYAQRQ

SEQ ID NO: 499 - protein, 1235 aa, unidentified
  REGION 1..1235: note = Cas Enzyme sequence
MNCGGGNTMSNNLYSNLHKLYPVQKTLRFELKPVGKTVENIEKNEILKTDEEKLGLAKLLKKEMDEFYKIKIDEILETLFLEGLERYYEELSDKEKSEENTTYLKQQIINKFNEKIKFIKNNKLDKDEIEDKGKESIIKILTSESLFTLMKDYYKSDVDKLNLINEFKGYSVYFSGFWKNRNFMFGGSKVEDAKKGSIPYRLIDENLPLFIQNINVYNNILIKGNEELKSKINSILTENNFFDNINKFNSALTQKSIEKYNLLITGYSKKDGTKVQGLNEIANLYNQEHHLRGAEKIPAFTILFKQILSEKSTESFVIDIIENDEEVFSIIDDFIDNIEFNTILFDEISNKEQVYILNKLNITQLSKDLLGNWNEITNKLYEWYFNNINNKNSSKKYEENRKKYFNKIKEYNIKFIETIANKDLLEHFKKTNQSLIDNINKYKNEYKNLPKVSIDNLKKDNKSIEAIKDLLDSIKALQDFLYQFNIVNPSLEKDIAFYDEFNKYYTNLKEIIPIYNKIRNYISKKAFLTDKIKLNFNNASLMTGWSRSKEYEKSGIMLKKYNEKRNEYDYFVGIINIDNRGDLKGNEDYSPFDVFINNEAKENFYEKMELNLFPGASKMLPKCFVSAKQYQETLDKTFLDNYKAGKHTKSNLDKDYLCDYINYMKQKLAENYSHFNFEFSNTENYNSIDEFYKEVDEQGYHVSFSKIEESKINELIENNNLYLFQIWSKDFSEYSKGLPNNQTIYLQQLFSKENLENTTIKLSGNSEVFFRKKSIPYEETHKANEELKNKNEKNNKKTSKFNYPLIKDKRYTENKFSFHFPIVINFKNEKYSPKDLNTLINTNIDSFNHIIGIDRGERNLVYVVIIDKNGQIQEQISLNEIINEHRGNTYETDYHNLLVEKERKRDVAKKAWTTIENIKELKEGYISQVVNKVKEFALKYNAIIILENLNPGFKNSRIKIDSQVYQRLEIGIIKKLNYIINKKDPTTYLKGIQLTNPITTLDKIGNQSGIVYYIPAWNTSKIDPTTGFINLMFGLKYENTEKTQELIRKIKDIRYNNIENYYEFDIDFKDFNPKYHNTKTFWTICTYGSRITNFRDETIENHYNSKVISNLTNEWKNLFEKYNISENYLQKSIEQTAKDFFEQFISLLKLTLQMRNSIIGGKTDYMISPVKNKNGKFFDSRECIENLPKDADANGAYNIARKGLILVNRIKQNPVKVDYKITNEEWLKFVQKQDV

SEQ ID NO: 500 - protein, 1235 aa, unidentified
  REGION 1..1235: note = Cas Enzyme sequence
MKQLNELTGLYSLSKTLRFELKPIGKTLEHIESKGLIAQDEQRAEEYKKVKDIIDRYHKAFITMCLRDFNFDQNSLETYVALAEDSNRDEKDFDEIKKALRKQIVEAFKKGGSYSDLFKKELIQKHLPEFVKDEEEKKMVENFSKFTTYFSGFNENRKNMYSDEDKSTAIAYRLIHENLPMFIDNMKSFGKIAVSDVSQHFSEIESSFSEYLNVEHLADMFQLDYFSETLTQEQIAVYNHIVGGRTLEDGTKLQGVNEYVNLYNQQHKDNRLPLLKPLYKMILSDRVALSWLPEEFASDEEMINAINETYNTLKDVLMGNGDNSLRNLLLNIDKYDVEHIYIGNDLGLTDISQQLFGQYDVYTSAIKQELRNSVSPTAKERREPELYAERINKLFKSAKSFSILYLNSLVDSEHTIQSYYKQLGAYDRGGEQRINLFSQIEMAYVAAKDILSGKHGNISQSDADTAIIKNLLDAYKSLQRFIKPLLGDGEEADKDNEFDAKLREAWDALDIVTPLYNKVRNWLTRKPYSTEKIKLNFENAQLLGGWDVNKEPDCTSVLLRKNGFYYLAIMNKKYNHAFDIDNLPHNGKCYEKIDYKLLPGANKMLPKVFFSNSRIKEFAPSDAIVSAYRKGTHKKGSNFNISDCRRLIDFFKASIMKHEDWKKFPFSFSPTETYEDISGFYREVEQQGYMLGFRNVSESFINQLIDEGKLYLFQIWNKDFSEFSKGTPNMHTLYWKMLFDERNLANVVYKLNGQAEVFYRKRSLDVANTTIHKAHQPIVNKNQENKKLQSTFEYDIIKNRRYTVDKFQFHVPISINFKAIGRDNVNDNVLDIIRNGGIKHIIGVDRGERHLLYLSLIDLNGNIVKQMTLNDIVNEYNGNTYATNYRDLLAEREGNRTEARKNWKEIENIKDIKQGYLSQVVHIISKMMVEYDAIVVLEDLNMGFMRGRQKIERSVYEQFEKMLIDKLNYYVDKQKSVNEAGGLLHALQMTSKFESFKKLGKQSGCLFYIPAWNTSKIDPVTGFVNLFDTRYTNADQARRFFSQFDVIRYNADKDWFEFAFDYNNFTAKAEGTRTKWTLCSYGTRIRTFRNPAKLNQWDNEEVVLTDEFKKAFANAGIDIHGNLKEAISSLQDKKYLEPLMHLMKLLLQMRNSITNSEVDYLLSPVADENGKFYDSRTCSDSLPKDADANGAYNIARKGLWAIRQIQETPAGERPNLAIKNKEWLNFAQQKPYKDE

SEQ ID NO: 501 - protein, 1236 aa, unidentified
  REGION 1..1236: note = Cas Enzyme sequence
MKKISNMIEIFKVQKTLRFGAKPEGKTGEYITQNGILERDRKRSKDYKVLKFYLDECHRDFIDKALNNIELEELREYAELFFQSPKDNKNKMKQLEDKMRKQICEHFKESGKKKLLSKSVLTEVLPEYFAEKGVEIPDEVNNFKGFFTSRRGLCLNRENMYASEPKHTAVAYRCINENLPKFLRNIECFDKIKKVIAKEELDEISNKINFEPYRIEDCFSVDFYNLCLSQKGIDMYNTFMGGYSKEDGTKIQGLNEIVNLYNQKIKNNREKHKLPQITPLYKQILSDSVSKSFSLDKYDCAADVIKAVRESYMGDTLERIGKIFNEFDEYDTSGIYIKNGIAITTISNAISDNWMLFRDNWNSEYDSKKKRSKIKDIEKYEENRNKTYKKIDSFSIDEIAGLLNKNVEDLIKYYQCNINELFKSITESYTIFKSVFDSKEVDEDDYEFSEKEIEEIKTYLDGVKKLESLLKQFMLNGKENNIDYVFYGDFIPAFDRICEIDSIYNKVRNYITSTRKPYKSDKYRLYFDNPQMLEGWDINKENARKTSMLLKDGQYYFAIINDKKSPFDNIPDEYVEDRDYYKKMIYKQIPNAAKYISGKNIKNPPLEILEILKKRKKDSKSLTEDEKNRFIDYVKTDFLVNYEPIIDKNGNRYFDFKFKNAEEYPTLEDFFEDVNRQAYSIRFEKISTRYINELVENGQIYLFRIYSKDFSEYSKGNKNLHTMYFEALFDEDNLENQIMKLNGGAEFFIRPASISKDKLIVHNKGQRLDNKNPLNSKKQSVFNYDLIKDKRFTEDQYMLHVSIDINKNAMEAENVQTINERVRKELKECDDNYIIGIDRGERNLIYICVINGNGEIVEQMSLNNIINEYNSVQHTTDYHKLLSKCEAERDKQRKSWKSIENIKELKDGYLSQVVHKICQLVEKYDAIIAMEDLNRGFVRNRLKFEKQVYQKFEKKLIDKLNYMVDKNKQEMENGGILKGYQLANSFNKDSSFQNGFVFYVPAWLTSKIDPTTGFVDFLKPKYVSVNESCEWISRFDSIKYDKSIDMFGFDIDYSNFTRADIDYRKKWTFYSNGDRIEEFRNSNTNNKNDYKVIKLSEEIKKLLESYNISYIGGDDIIPAIKCISDKGFWVNFIRYIKLTLQMRNNITGKTDVDYIISPVMNNMGNFYDSRQYDNEDSSLLPQNADANGAYNIARKALWAIDRIKEAEDDELKNVKIAISNKEWIEYAQTHFIKKEC

SEQ ID NO: 502 - protein, 1236 aa, unidentified
  REGION 1..1236: note = Cas Enzyme sequence
MKKISNMIEIFKVQKTLRFGAKPEGKTGEYIIQNGILERDRKRSKDYKVLKFYLDECHRDFIDKALNNIELEELREYAELFFQSPKDNKNKMKQLEDKMRKQICEHFKESGKKKLLSKSVLTEVLPEYFAEKGVEIPDEVNNFKGFFTSRRGFCLNRENMYASEPKHTAVAYRCINENLPKFLRNIECFDKIKKVIAKEELDEISNKINFEPYRIEDCFSVDFYNLCLSQKGIDMYNTFMGGYSKEDGTKIQGLNEIVNLYNQKIKNNREKHKLPQITPLYKQILSDSVSKSFSLDKYDCAADVIKAVRESYMGDTLERIGKIFNELDEYDTSGIYIKNGTAITTISNAISDNWMLFRDNWNSEYDSKKKRSKIKDIEKYEENRNKTYKKIDSFSIDEIAGLLNKNVEDLIKYYQCNINELFKSITESYTIFKSVFDSKEVDEDDYEFSEKEIEEIKTYLDGVKKLESLLKQFMLNGKENNIDYVFYGDFIPAFDRICEIDSIYNKVRNYITSTRKPYKSDKYRLYFDNPQMLEGWDINKENARKTSMLLKDGQYYFAIINDKKSPFDNIPDEYVEDRDYYKKMIYKQIPNAAKYISGKNIKNPPLEILEILKKRKKDSKSLTEDEKNRFIDYVKTDFLVNYEPIIDKNGNRYFDFKFKNAEEYPTLEDFFEDVNRQAYSIRFEKISTRYINELVENGQIYLFRIYSKDFSEYSKGNKNLHTMYFEALFDEDNLENQIMKLNGGAEFFIRQASISKDKLIVHNKGQKLDNKNPLNSKKQSVFNYDLIKDKRFTEDQYMLHVSIDINKNAMKAENVQTINERVRKELKECDDNYIIGIDRGERNLIYICVINGNGEIVEQMSLNNIINEYNSVQHTTDYHKLLSKCEAERDKQRKSWKSIENIKELKDGYLSQVVHKICQLVEKYDAIIAMEDLNRGFVRNRLKFEKQVYQKFEKKLIDKLNYMVDKNKQEMENGGILKGYQLTNSFNKDSSFQNGFVFYVPAWLTSKIDPTTGFVDFLKPKYVSVNESCEWISRFDSIKYDKSIDMFGFDIDYSNFTRADIDYRKKWTFYSNGDRIEEFRNSNTNNKNDYKVIKLSEEIKKLLESYNISYIGGDDIIPAIKCISDKGFWVNFIRYIKLTLQMRNNITGKTDVDYIISPVMNNMGNFYDSRQYDNEDSSLLPQNADANGAYNIARKALWAIDRIKEAEDDELKNVKIAISNKEWIEYAQTHFIKKEC

SEQ ID NO: 503 - protein, 1236 aa, unidentified
  REGION 1..1236: note = Cas Enzyme sequence
MKKISNMIEIFKVQKTLRFGAKPEGKTGEYIIQNGILERDRKRSKDYKVLKFYLDECHRDFIDKALNNIELEELREYAELFFQSPKDNKNKMKQLEDKMRKQICEHFKESGKKKLLSKSVLTEVLPEYFAEKGVEIPDEINNFKGFFTSRRGFCLNRENMYASEPKHTAVAYRCINENLPKFLRNIECFDKIKKVIAKEELDEISNKINFEPYRIEDCFSVDFYNLCLSQKGIDMYNTFMGGYSKEDGTKIQGLNEIVNLYNQKIKNNREKHKLPQITPLYKQILSDSVSKSFSLDKYDCAADVIKAVRESYMGDTLERLGKIFNEFDEYDTSGIYIKNGTAITTISNAISDNWMLFRDNWNSEYDSKKKRSKIKDIEKYEENRNKTYKKIDSFSIDEIAGLLNKNVEDLIKYYQCNINELFKSITESYTIFKSVFDSKEVDEDDYEFSEKEIEEIKTYLDGVKKLESLLKQFMLNGKENNIDYVFYGDFIPAFDRICEIDSIYNKVRNYITSTRKPYKSDKYRLYFDNPQMLEGWDINKENARKTSMLLKDGQYYFAIINDKKSPFDNIPDEYVEDRDYYKKMIYKQIPNAAKYISGKNIKNPPLEILEILKKRKKDSKSLTEDEKKRFIDYVKTDFLVNYEPIIDKNGNRYFDFKFKNAEEYPALEDFFEDVNRQAYSIRFEKISTRYINELVENGQIYLFRIYSKDFSEYSKGNKNLHTMYFEALFDEDNLENQIMKLNGGAEFFIRPASISKDKLIVHNKGQKLDNKNPLNSKKQSVFNYDLIKDKRFTEDQYMLHVSIDINKNAMEAENVQTINERVRKELKECDDNYIIGIDRGERNLIYICVINGNGEIVEQMSLNNIINEYNSVQHTTDYHKLLSKCEAERDKQRKSWKSIENIKELKDGYLSQVVHKICQLVEKYDAIIAMEDLNRGFVRNRLKFEKQVYQKFEKKLIDKLNYMVDKNKQEMENGGILKGYQLANSFNKDSSFQNGFVFYVPAWLTSKIDPTTGFVDFLKPKYVSVNESCEWISRFDSIKYDKSIDMFGFDIDYSNFTRADIDYRKKWTFYSNGDRIEEFRNSNTNNKNDYKVIKLSEEIKKLLESYNISYIGGDDIIPAIKCISDKGFWVNFIRYIKLTLQMRNNITGKTDVDYIISPVMNNMGNFYDSRQYDNEDSSLLPQNADANGAYNIARKALWAIDRIKEAEDDELKNVKIAISNKEWIEYAQTHFIKKEC

SEQ ID NO: 504 - protein, 1236 aa, unidentified
  REGION 1..1236: note = Cas Enzyme sequence
MKQLSELTGLYSLSKTLRFELKPIGKTLEHIESKGLIAQDEQRAEEYKKVKDIIDRYHKKFITMCLSDFKFEQNSLETYVALAEDTNRDEKAFDEIKKTLRKQIVETFKKGGSYSDLFKKELIQKHLPEFVSDEEEKKMIANFSKFTTYFNGFNENRKNMYSDEDKSTAIAYRLIHENLPMFVNNMKSFSRIADSDVHQHFTEIESSFSEYIGVEHLEEMFQLDFFSETLTQEQIAVYNHIIGGRALEDGTKLKGINEYVNLYNQQHKDSRLPLLKPLYKIILSDRVALPWFPSEEFASDEEMIRAINETYNTLKEVLSIDGDSSLRSLLLNISSYDIKHIYIANDLGLTDISQQMFGQYDVYTSAIKQELREKNAPTAKERRNPELYDERINKLFKSAKSFSIEHLNSLVDSEHTIQNYYKHLGAYDRNGEQRVNLFTQIEMAYVAAKEILSGKHGNISQSDAETAIIKGLLDAFKSLQRFIKPLLGNGEEADKDNEFDAKLREAWNTLDIVTPLYNKVRNWLTRKPYSTEKIKLNFENAQLLGGWDVNKEPDCTSILLRKNGLYYLAIMNKKYNHAFDIDNLPNDGICYEKIDYKLLPGANKMLPKVFFSKSRIKEFAPSEIIVNAYKKGSHKKGANFSISDCRRLIDFFKASISKHEDWKNFPFSFSSTETYEDISGFYREVEQQGYMLGFRNVSESFIKQLVDEGKLYLFQIWNKDFSDFSKGTPNMHTLYWKMLFDEHNLANVVYKLNGQAEVFYRKSSLDVANTTIHKAHQPIMNKNQENKKRQSTFDYDIIKNRRYTVDKFQFHVPISINFKATGRDNVNDNVLDIIRNGGIKHIIGIDRGERHLLYISLIDLKGNIVKQMTLNDIVNEYNGNTYATNYKNLLAEREGNRTEARKNWKKIENIKDIKKGYLSQVVHIISKMMVEYNAIVVLEDLNMGFMRGRQKIERSVYEQFEKMLIDKLNYYVDKQKNSDEAGGLLHALQLTSKFENFKKLGKQSGCLFYIPAWNTSKIDPVTGFVNLFDTRYTNADQARKFFSQFDSIRYNADKDWFEFAFDYNKFTTKAKDTRTKWTLCTYGTRIRTFRNPARLNQWDNEEVVLTDEFKKAFANADINIHVNLKEAICSLQDKKYLEPLMHLMKLLLQMRNSITNSEVDYLLSPVADENGTFYDSRVCSASLPKDADANGAYNIARKGLWAIHQIQETPAGDRPNLAIKNKDWLNFAQQKPYMNE

SEQ ID NO: 505 - protein, 1236 aa, unidentified
  REGION 1..1236: note = Cas Enzyme sequence
MKKISNMIEIFKVQKTLRFGAKPEGKTGEYIIQNGILERDRKRSKDYKVLKFYLDECHRDFIDKALNNIELEELREYAELFFQSPKDNKNKMKQLEDKMRKQICEHFKESGKKKLLSKSVLTEVLPEYFAEKGVEIPDEVNNFKGFFTSRRGFCLNRENMYASEPKHTAVAYRCINENLPKFLRNIECFDKIKKVIAKEELDEISNKINFEPYRIEDCFSVDFYNLCLSQKGIDMYNTFMGGYSKEDGTKIQGLNEIVNLYNQKIKNNREKHKLPQITPLYKQILSDSVSKSFSLDKYDCAADVIKAVRESYMGDTLERIGKIFNEFDEYDTSGIYIKNGTAITTISNAISDNWMLFRDNWNSEYDSKKKRSKIKDIEKYEENRNKTYKKIDSFSIDEIAGLLNKNVEDLIKYYQCNINELFKSITESYTIFKSVFDSKEVDEDDYEFSEKEIEEIKTYLDGVKKLESLLKQFMLNGKENNIDYVFYGDFIPAFDRICEIDSIYNKVRNYITSTRKPYKSDKYRLYFDNPQMLEGWDINKENARKTSMLLKDGQYYFAIINDKKSPFDNIPDEYVEDRDYYKKMIYKQIPNAAKYISGKNIKNPPLEILEILKKRKKDSKSLTEDEKKRFIDYVKTDFLVNYEPIIDKNGNRYFDFKFKNAEEYPTLEDFFEDVNRQAYSIRFEKISTRYINELVENGQIYLFRIYSKDFSEYSKGNKNLHTMYFEALFDEDNLENQIMKLNGGAEFFIRQASISKDKLIVHNKGQKLDNKNPLNSKKQSVFNYDLIKDKRFTEDQYMLHVSIDINKNAMKAENVQTINERVRKELKECDDNYIIGIDRGERNLIYICVINGNGEIVEQMSLNNIINEYNSVQHTTDYHKLLSKCEAERDKQRKSWKSIENIKELKDGYLSQVVHKICQLVEKYDAIIAMEDLNRGFVRNRLKFEKQVYQKFEKKLIDKLNYMVDKNKQEMENGGILKGYQLTNSFNKDSSFQNGFVFYVPAWLTSKIDPTTGFVDFLKPKYVSVNESCEWISRFDSIKYDKSIDMFGFDIDYSNFTRADIDYRKKWTFYSNGDRIEEFRNSNTNNKNDYKVIKLSEEIKKLLESYNISYIGGDDIIPAIKCISDKGFWVNFIRYIKLTLQMRNNITGKTDVDYIISPVMNNMGIFYDSRQYDNEDSSLLPQNADANGAYNIARKALWAIDRIKEAEDDELKNVKIAISNKEWIEYAQTHFIKKEC

SEQ ID NO: 506 - protein, 1236 aa, unidentified
  REGION 1..1236: note = Cas Enzyme sequence
LYPLSKTLRFRLIPVGETLKHFIDSGILEEDQHRAESYVKVKAIIDDYHRAYIENSLSGFELPLESTGKFNSLEEYYLYHNIRNKTEEIQNLSSKVRTNLRKQVVVQLTKNEIFKRIDKKELIQSDLIDFVKNEPDANEKIALISEFRNFTVYFKGFHENRRNMYSDEEKSTSIAFRLIHENLPKFIDNMEVFAKIQNTSISENFDAIQKELCPELVTLCEMFKLGYFNKTLSQKQIDAYNTVIGGKTTSEGKKIKGLNEYINLYNQQHKQEKLPKMKLLFKQILSDRESASWLPEKFENDSQVVGAMVNFWNTIHDTVLAEGGLKTIIASLGSYGLEGIFLKNDLQLTDISQKATGSWSKISSEIKQKIEVMNPQKKKESYESYQERIDKLFKSYKSFSLAFINECLRGEYKIEDYFLKLGAVNSSSLQKENHFSHILNAYTDVKEAIGFYSESTDTKLIQDNDSIQKIKQFLDAVKDLQAYVKPLLGNGDETGKDERFYGDLIEYWSLLDLITPLYNMVRNYVTQKPYSVDKIKINFQNPTLLNGWDLNKETDNTSVILRRDGKYYLAIMNNKSRKVFLKYPSGTDGNCYEKMEYKLLPGANKMLPKVFFSKSRINEFMPNERLLSNYEKGTHKKSGICFSLDDCHTLIDFFKKSLDKHEDWKNFGFKFSDTSTYEDMSGFYKEVENQGYKLSFKPIDATYVDQLVDEGKIFLFQIYNKDFSEHSKGTPNMHTLYWKMLFDETNLGDVVYKLNGEAEVFFRKASINVSHPTHPANIPIKKKNLKHKDEERILKYDLIKDKRYTVDQFQFHVPITMNFKADGNGNINQKAIDYLCSASDTHIIGIDRGERNLLYLVVIDGNGKICEQFSLNEIEVEYNGEKYSTNYHDLLNVKENERKQARQSWQSIANIKDLKEGYLSQVIHKISELMVKYNAIVVLEDLNAGFMRGRQKVEKQVYQKFEKKLIEKLNYLVFKKQSSDLPGGLMHAYQLANKFESFNALGKQSGFLFYIPAWNTSKMDPVTGFVNLFDVKYESVDKAKSFFSKFDSMRYNVERDMFEWKFNYGEFTKKAEGTKTDWTVCSYGNRIITFRNPDKNSQWDNKEINLTENIKLLFERFGIDLSSNLKDEIMQRTEKEFFIELISLFKLVLQMRNSWTGTDIDYLVSPVCNENGEFFDSRNVDETLPQNADANGAYNIARKGMILLDKIKKSNGEKKLALSITNREWLSFAQGCCKNG

SEQ ID NO: 507 - protein, 1236 aa, unidentified
  REGION 1..1236: note = Cas Enzyme sequence
MNTDQETTSKVMWEDFTKLYSLSKTLRFKLVPTESTEQQLKTSGVIQADKVRHESFKLAKKVLDEIHRKFIADSLVDLQLDHKQLQVFAEYSLNPALKSDVAKQAELMKLRRSIYVSFEQRFNATQAGWKETYGCEKFISSPKSQLALIESFKPELARKLDMPEQDLEDLQVRFNKFASYFQGYNENRENVYTTKGHATEISYRTIDQNLLKFYKNVQKYEKYYTDKDILGGEAAPHFKIENYTSYITQDEINVYNEAIRSFRSNINQARQGLDKKEKQSLPMFEPLFKQILGDGTKRMLFEKLESEEEYAELAQKLKQDMPGWVTALDEHVSTQLLIPVNPAAVWLNTKAVNTLLHKHTTSPELTKIYLPEEFTSSRRAKDEEAAKQNSFVSLRQLFAALDQAQAVTELSLLKNADRADMVASKAVWLAFCEDIQAKIKDAWETVGAFSKIIAFENKSEKETLKKALDSFNDLYRMYTYFELRYKNEPVTSFDTDPDFYELFDDSDDQDSLFDTDKDKRFSYYYDLIRNYLTKKPYSLDKWKLNFNCAQLLGGWDVNKEPEKHGVLLTNDGRYFLAVLDNSSKKAFEKSKNPALFKTTSSDWRKMEYKLLPGPNKMLPKCFFSRKYREQHEIPSNIDELYKKGEFKKGDNFNIDKLHRLIDFYKEAIKTYEGWTMYSFVFRDTKSYQSIDQFYHDVEEHGYKLGFVNINGNELRRLTDTGATYLFEISNKDLANSNSKTQNMHTLYFCGLFDENSNIKLNGGAEIFFRPKSMEKTEAKDRKTPQGSPIIESRRFTENKIFLHVPITINYKIKSLNNYTFNQHTIERIKTNRVDAVIGIDRGEKHLAYVAIVDKNGRLLEEPISLNNISTKLPNGSSKTTPYFDLLSSREAQRRDNRQNWDAVRQIKDLKAGYIGHCVKQIIDLMIKHNAVVVLENLNVGFKQGRSAIEKSVYSKLEQALLHKLQYVVDKSAQGLFDAQNGVQLVPPDITPGHTHNHMGFVFFVDPSYTSAVDPVTGYRQNFRLDERINTKTFSEFIKNGFSDIEYIDDNLLFTFSWRKLAAARNKIGKDNRTIEKEADISDKQWIVTADVLRRVHQKDKNDKWETIERNPQTELIKLLVDSNITLESNIKKQLIALNPTAKFIKSFIWLFNLTNQIRNSDTASSKDEIISPVYPNGFDSTHDLLDGYGWNGDANGAYNIARKGAILLDKLYVAKTPKDFKVTVSRREYDDYITKQ

SEQ ID NO: 508 - protein, 1236 aa, unidentified
  REGION 1..1236: note = Cas Enzyme sequence
MVNSYKDFTNLYSVSKTLRFELRPQGKTMENLDKAGFLEKDEERAKSYIIMKRIIDDYHKQFIDECLSKIDIDWRPLSLAIDNHKKIKDDKTKKLLEIEQKKKRDEIISLFKNDERFVKMFSEKLISDLITPNVINCGNLDDIKALNDFKKFSVYFLGLHENRKNMYSNEAKHTSIAYRIVNENFSKHFENCYKYALICENIPEVILNAKNELSGKLDLDLDKAFSIEYFNNIVRQRDITAYNTAIGGIADENSKIRGINELLNLNSQISDEKRIKLTPLFKQILSDRNSYSYIPQVFNNDDEVLSSVDEFYKNMEIENIFSRIVYLLNHYNEYDLSKVYVDGKEIPLLSIEIFNTWDILGGLMQELKAEEFGDSKLEKNRKKIDKWLSSSEFPLDVILNAIARSGTDKDFTQYINNVAETISCVIEKRKLISLNPGVNLSSEESNVQELRLFLDSIMHLLHMIKPFFAEEDADRDIGFYSEFDEIYSSLSTIIPLYNKVRNYATKKKFNESKIKLNFSIPTLADGWDQNKEPNNKAVIFLRDRKYYLGIIDPKKMIKFDKINTCVSTECYQKMVYKLLPSPNKMLPKVFFSKKGLKIYNPSEKLLEAYNQGKHKKGDNFDIKFCHELIDFFKSSIIKNPDWKCFNFKFSPTESYEDISQFYKEVEKQGYNISFVCIPTEVIDEYVDSGRLYLFQLYTKDFSDKSTGTKNMHTLYWDAAFSDENLKDVVIQINGQAELFFRKKSDMKIITHRAGEILVNRMDSNRNPIPDKIYYELLRFKNGIITKLSDEAKNYKTCINSKEAKYDIVKDRRYTEDRMFFHIPLTLNFKSDNKNNINKMVLDYALSNRDLHIIGIDRGERNLIYVSVINRQGKIIEQRSFNVLDNIDYHEKLDQREKERAESRKSWNSIEKIRDLKEGYLSKVVYKISQMIVEYNAIVILEDLNFGFKRGRFKVEKQVYQKFESALISKLNYLVFKEGSQSLPGGVLNAYQLTDKMDTFAKIGKQTGVLFYVNAAYTSKIDPATGFVDIFNTSSVKNNETRKEFVRRFESIVYDAVEDMFAITFDYRDYVTSKTDFKNRWTVYTNGIRLKYSPKYRKHYSVDPTNDIKESLKRSGIEYLNGENIKDMIFSNNKDCADLINTVYYSFQDTLRMRNSDQTSDYIISPVKNSNGVFFNTSNGNPEYPVDADANGAYHIALKGELMLRLLEQNYDSDVKQIKIPLIDSSSWFKFVQTRRI

SEQ ID NO: 509 - protein, 1237 aa, unidentified
  REGION 1..1237: note = Cas Enzyme sequence
LSKTLRFELRPIGRTLENIQANGLLEQDNHRAESYKLVKAIIDRYHKVFIDEALSHCVLPVENSGNKNSLSEVYQYLTTKDHSEKETDDFNKTQDNLRKMIVSALKKDTHFGRIFKKELIREDLLNNDLQGFDLNEEEYDLIKEFRDFTTYFVGFNENRANMYSEEAKSTAIGYRLIHENLPKFIDNMVIFQKVKVSPVSEYFANIETEMEDMLQGIKVEDIFDLNFFNQVLVQRFIDLYNAVIGGQVASEEDHRKGLNQYINEYNQVQKDKKDRLPKFKPLFKQILSDRIHASWQIDNFESDNEVLKAIENAYETLDEEVISRKDSNLPLLFASISDFDLSGIYVSAKAITDFSQQIFKDWNAIDSALEAACRRSNQPKKKETEEKYAERIKKQRSHIDSYSVGEIIESLVAFQPNPEKSILDYLGGMGRREDKPSIIESIKSAYRDVEELLKTEYPANKNLALDKDNISKVKALLDAIKELQFFIKPLLGTGKESGKDERFYGEFVDYWQTLDIITPLYNKVRNYATRKPYSTAKFKLNFENSTLLNGWDVNKEPDNTSVLLRKDGLYYLAIMKKSCNRVFAVDQYDTVGDCYEKIDYKLLPGANKMLPKVFFAKSRIDEFAPSREVLDIYKRGSFKKGEEFCKADLHTIIDFYKASITKHEDWKKFGFEFSPTSSYDDISGFYREVEQQGYQIRFRKVSCTYIDSLVDQGQIYLFQIYNKDFSPFSKGTPNMHTLYWKMIFDERNLKDVVYKLNGQAEIFFRKSSLPVETPTHPANQPIANKNPLNRKKESLFTYDIVKNRRYRYDKFQFHVPITMNFKSIGSEYINDQVQDYIRQSKDLHFIGIDRGERHLLYLTVIDSKGIIEEQFSLNVINNEYNGTTYSTNYHDLLEERGDDRTKARREWLAIESIKELKEGYLSQVVKKITDLMIKYNAIVVLEDLNMGFKRGRQKVESSAYQQFEHKLIDKLNYLAGKTAPIDKVGGLLKAYQLTTPYQNEMGFQNGFVFYIPAWNTSKIDPVTGFTNLFDLHIETMEQAKKFFSKFDYIRWNAANNWFEFAFDYKNFTEKADGSRTQWTLCTQGTRIRTFRNPEKNSEWDNVEVDLTDQFLSLFKSKNIDIKSDLKTQILAQNEKDFFMSLLLCLKLTLQMRNSISNSEVDYLISPVADANGDFFDSRKVDSSLPANADANGAYNIARKGLWMARRIKKSRPEDKVSLKITNKEWLNFAQNKPYLTD

SEQ ID NO: 510 - protein, 1238 aa, unidentified
  REGION 1..1238: note = Cas Enzyme sequence
MYKKMNIVYDIMKKKDKEFQMKKIDNFINQYSLNKTLRFRLIPEGNTLNNLYNNLIIDSDEKRAEDYQKMKKIIDQYHKDFIEKSLSDLSFDNLEEYYSLYWKNDKNNNEVEEFNKKTSNYFAKVKEVFEKQEQYPLIFKEDFIKKILIEYVEEKDKDIVKSFANFNTYFQGFYENRKNIYSVEQKSTEVGYRIIIQNMPKFFTNVKNYKKIIECLKNVDFKKLIDGLNCDIVTIDDIFEIDYFNKCLTQSGIKQYNELIGGYSLESGEKIKGINEYINEYNQLNGTKIPLLAILYKQILSDKLSTSFIPNYFDNDESLLSSIYQYINNTDDEKSVLENIIEIENSIKSISTEKENNIYISSNYLSTISNDIFKDWSIISELYNQKYENEVENKCKSYEKYIEKRNEYFKNKKYYSFKDVEDTIEKYNGSKISIKDFLFNQVKVYKDKIIISIGEFDKLNTDYKTNNKKLLQNENDIYVIKSLLDNIKDYLYVVKQMLVDDSVEQDSYVYGIINSNYEKLNIVSLLYNKCRNYLTKKPYSLEKIKINFNNSQFMNGWDSNKIEDYLSTILLKDGKYYLCIIDKNNKKVFKNSLTEETESSYKIMKYRLLPGANKMLPKVAFAKSNQDLFKPSNEIMKIYKEGSFKSGNNFSIKDCHKMIDFYKECINKYPSWQEFDYKFTKTEKYNNIAEFFREVESGGYKILFNYLESDYVDSLVESGQVYLFQIYSKDFSSYSKGNKNLHTMYFEALFDEDNLKNIVYQLNGGAEMFFRKKSIIVDKPTHEKGVPIKNKTSEYKKDNQKEQSVFDYDLIKDKRFTLDEFFLHLPIKMNFNSNNKENIKNEVRTLIKNQKNNYIIGIDRGERNLLYISVIDENKNIIEQFSTNILDTGINGEYKVDYHKMLSDRENERDKARKSWSSIESISKLKDGYLSFVVKKICDLVVKYDAIVVLEDLNSGFKRTRTKFEKQIYQKFEKALIEKMDYLVDKNKDKNENGGLYKAYQLCNKLDNFNQIGSQTGFLFYVPAWNTSKIDPTTGFTKLIDLKYKNIETTKKFISSFTSIEYLNSDNMFKFDLNYDNFDKNTQDYKKEWSLYSFGTRINKYKTQYGWETEEIDITNMFKKVFDKYGVKYRGVNIINEIINYENKNFYIELHKALQLLMQLRNSDDNNDYIISPVKNSSGTFFDSRLNDSKYPLDADANGAYHIALKGLWIIKKIKEASDVSSVKTAISNKEWLEFVQK

SEQ ID NO: 511 - protein, 1238 aa, unidentified
  REGION 1..1238: note = Cas Enzyme sequence
MKDFYQFTNLYALSKTLRFSLIPTPATKQMLEDAKVFEKDETIQKKYEATKPYFDRLHREFALEALQDQKLDFKNYLELYRKYKADKKASGKLLINIEKDLRKEVVKLFDKQGEKWAKQYPGLKNKNIGVLFKEAVFTVILKERYGNEKETQILDESSGQLVSIFDSWKGFIGYFKKFHETRKNFYKDDGTSTALATRIIDQNLKRFCDNILIFESTKEKVDFSEVEISFGKPLSEVFTLEFYNTCFLQNGIDFYTKILGGETLQNGEKVKGLNECINLHKQKTGEKLPFFKSLDKQILSEKDKFFIDEISNETQLLEVLKSFVASAESKTDTIKTLVDDFVKDQDKYDLNYIYFSNDGLNTITRKWTTETQVFEEALYTALKAAKVVSSSAKKNEGGYSFPDFIPFAHLKTALESIKIDGTIWRDNFNAIENFEEKSIWAQFLAIYNFELSNLFETEIKNPEIGNCPTIGYNVYKQDFEELLKSFVYDPNAKVTIKNFADNVLSIYQMAKYFAVEKKRGWNTDYELDVFYTDPQNGYLQYYENAYEEIVQVYNKLRNYLTKKPYSEEKWKLNFDSGTPIKYTTRAIIFNNTTNERYYLGLLKKGVAKPREFEPINNNIISSGEFRRMIIQQLKFQTLAGKGYVRDFGVKYSEDKDGVKHLQQLIKKQYLSKYPCLKKIADGVYNDKKAFDADIKDVLLETYNLDFQPISEEFILNKNRLGEIYLFEIHNKDWNLKDGKNKSGSKNLHTMYFESLFVDKTTFKLNNEGAEVFYRPATNEGKLGTKKDRNGKIIINHKRYATDKILFHCPIGLNKDAGKSYTFNAKINNMLANNPDINIIGVDRGEKHLAYYSVITQKGKILDRGSLNKVEGGDKQEIDYAKKLEETAKNREQARKDWQAVEGIKDLKRGYISQVVRKLADLAIEHNAIIVFEDLNMRFKQIRGGIEKSVYQQLEKALIDKLSFLVMKGEADPEKAGHLLKAYQLVAPFESFQSMGKQTGIIFYTQANYTSKIDPITGWRPNLYLKYTSAEKAKADILKFSKIEFVNNRFELTYDIKNFVLDKKVVLSNKTKWTVCSSVERFRWNRRLESNQGNYEHYENLTENLSSLFKDFGFEIEQNIIRQVEQLATKGNEQFFRSFIFYVNLIFQIRNTDAKAKDQNKEDFILSPVEPFFDSRTPEKFGENLPENGDDNGAFNIARKGIIMLNKISAYKQEVGNVDKIIWKDLFISAAEWDNFTQE

SEQ ID NO: 512 - protein, 1238 aa, unidentified
  REGION 1..1238: note = Cas Enzyme sequence
MTVFDSLTGFFPLTKTLPVKLTPIGNTLHNMQVNEVIEADEQLLQKFTRLKQMADDYHREFIAKVLENFTLKLHSDGHDDSLEEYAEMFDSDRRNNEGNRFRFNIVKSCLRLAISKAFESEPEFRKLDKKELVSDILRSRVTGEDKDVVESFSKFTSYLVPYYQTRKLYGYDEKANTIAYRCIDDNLPVFYNNLKAFEKVRKTLPQEVFDKLNEDLRSYLDGNNIGEVFKLEYFNKCLTQKGIEKYNTVLGGYNTSETHIKGLKEYIYLYNMDQKEKKNMLPTLSDLKKQILSDREVISWQDMKYEDSRKMYKDLIAFHQVYRKLVASPLRQLMTEISQYDSKGIFISNKDCISQISLALCGKWSAIREVIYLEFSRNIKRKKKESTEKYDKRVYQAIDGRESYSIAEIDSCLLEFDKKLADYYMKMGAVDNKVLQRENYFATIENAWTELQPMAVRFANAENSHQPKEDEVVKIKVYLDAVLQLYHFVLPLKGEGNELGRDAAFYEVLDNCMLELQNIVGLYNRIRSFVTRKPFTTNKIKLNFGSPQLLSGWSSDNEAVHRSLLLQKDGRLFLVVLEKGQHNLFTDESDILKEGEDFYEKVEYNYFGDASKQLPKRCFAACNIDLFRPSEEILQIRKRGSYLAGNNFNIDDLHKLIDYYKGCVMKMQKWCEVNFNWKDTSEYKSISEFVKSFTAAGYYINYQKVREQTVERLVNEGKIYLFRLDKKDYSPYSKGRKSLYTMYMDMLFHPANLEKVVYKLSGGAEMFYRKASVKSNRPTHPAGLPIANKNPEVAVHKPESVFAYDLIKDKRYTKDMMMVHLPVTVNYFAADSKGMPVTMQVRRLIREGQFKHIIGIHRGERNLIYVSVLDMNGKIVEQKPLNIIESTCGGQPYSKDYNALLQRKEEERLQSRKDWKTIDKIKDIKQGYLSQAISTITDMVLEYEALIVMEAINKQFKRSRQKIEKNIYAKFEQQLIDKLNFLVKKNRDMNEPGGLLNALQLTDKVEPGLDLFQNGIIFYTPAAYTANVCPVTGFVSLFNLKNGKKEEVKAFFSKFDSIRFNKKTGLFDFTFDYNNFTDKAENARTCWTVSTFGQRCGCIESAGQKKRALVDLTKEFKNLFTRHGVDYTGNLKEAIATVDKRSFYDGLVELFNLMMQMRNIMGDNIDYLISPASDENGRYFLSSPENKEWPIDTDANTAYNVARKGLLMVQSILRTTEKEKVNLGITNERWMKYIQCIS

SEQ ID NO: 513 - protein, 1238 aa, unidentified
  REGION 1..1238: note = Cas Enzyme sequence
MKTFNDFQRLCSRSITLRFELKPQGKTLQHFKESGLLDQDEHRAESYKAVKKLIDEYHMRFITRALTGFSLKLESTDEKDSLAEYYELYNNANSREVLDIVKKNLRTQIFKTFGFKDNKDYNLKFGSNLIKKYLHNEQLMRPLTSDEKALVEEFKKFTTYFTGFFENRKNMYSAEAKSTAIAYRLIHDNLPKFIDNIKTFEKLMQTELVDKLADLSKSLDAQLKGTDIHDLFTLGYYSSVLTQEQIDDYNTMLGGKTQEDGNPIQGLNVLVNIYNQQHPEQKLPLFKLLFKQILSDRTSASWLPEEFKSDNDTLKAIKEYYGESSNVLSNSSELKNLLQTLSSYDLSKIYIANDKSLTEISQKMFGDWSTINRAIMANLKLSVKPKRKEDESDYEARLRKLLSKNDQYSIQYINDCIAAANIENKSTVEDYFAKLGEVDTADEQQANLFSQIELAYTDVKDLLSNEYPAKANLVQDDSATDKIKKLLDAIKTLQYFIKPLFGKGEQADKDELFYSSLTQLWELLDEVTPLYDKVRNYMTRKPYSQEKIKLNFENPTLMKGWDLNKESNNTTVILRKDGMYYLGIMNKAAKKVFDIANLSDDGDCYEKMEYKSLKSRDMIHKFFAAKHVKRFAPSDEIKAIKERESYKESNKANFSLSDCHAYIDFFKSSLKITDEWSMYKFNFSDTSSYGNINDFYNEFERQTYKLSFRNVSVKYIDKLVEEGKLYLFQIYNKDFSPHSKGTPNLHTLYWKMLFDERNLANVIYRLEGEAEVFFRRKSTINNNTIHHANVEIDRKNPRNKDARSKFPYDIVKDRRYTVNKFQFHVPIMLNFTNSGVGNINTLVWDYLKNTDDVYVLGIDRGERNLLYYSLIDKNGNIVEQDSLNVIGDYDYLSKLNEVEGSRKEARKNWKEIEGIKELKEGYLSQVIHKIAQLMVKYHAVVVLEDLNLGFKRSRQKFEKQVYQNFENALIDKLNYIVDKKVDANAPGGLLNAYQLANNPKKVNKQDKQCGFLFYVQASYTSKIDPTTGFVNKLKTRYETIDKARTFFNKFKSIRYNSQDDLFEFAFDYNDFSKELDGTKTEWVVCTNGERIERFRNRDNANHWDTRTLVLTDAFKEFFAQNDIDFNGNIKAQIIERTDKKFFEKLLHMLNLTLQMRNSDATQDRIISPVRNSSGEFFDSNNPGNMPKDADANGAYNIALKGLLTVRRIKQSTDVKKSVSAIKTVDWLKFIQEKPYLTE

SEQ ID NO: 514 - protein, 1238 aa, unidentified
  REGION 1..1238: note = Cas Enzyme sequence
MNNLYNNFTNLYPVSKTLRFELIPQGKTLERMKEKNIIESEEHRNESYKKAKNMIDTFHKKFIDDCLINFSFDKNLLSKYYELSNKKDRNQDEFEEVKFKLREEISKCFTQNPEYKKIFGKEIITEILPTFYSEKEDLAVLDEFSKFTTYFNGFSENRKNMYVSDEKSTSIAYRMINENLPIFISNINMFTKLKKVFDDETFKEIYNNLEEILQVNKLDEMFELDYFNDVLTQKGIDIYNQVIGGYSKSDGVKIKGINEYINEFKQNNPKNNTIFKLDMLYKQILSERDTASFVIEKTEDDQSLLNEIKDLSIKLNKKVFEKKHSLKELLINISNYDLGKIYIRNDLSITEISQFLYSDWSVIFGGIKNAYDCKFGAPVNAKQEENKKKYLKSQRFISLDYINNCTKGVDGFVEVEKYFSENCVLKENGEKVDIFDNITNKYNEINELINNRYPLEKNLKEDRQNIALIKEYLDALKQLQLLVKKLITVRYEADYEKDGKFYESLSEFWDEMNEITHVYNKARNYLTGKTYSTNKIKLNFNNPTLLNGWDVNKEQDNKCVILRKNGLFYLAIMDKDFKGVLETNDEETGNCYEKMNYKLLPGANKMLPKVFFADKNADIFKPSYELLMKYGEGRHKKGANFDLRFCHELIDYFKECINKHPDWKNFKFKFSETNSYKDISEFYKEVEQQGYKITYSKISEDDINELVEDGNLYLFQIYNKDFSKYSHGKPNLHTLYWKMLFSENNLKDVVYKLNGEAEIFYRRASIQKNITHPKNEKINNKNRNNPNKQSIFEYDLIKDKRFTEDKFLFHVPITLNFKSIGISNINEEVNKAIKNSNENYIIGIDRGERHLLYLVLINKNGEIVEQYSLNSIINENQNVRYETNYHELLDYKEKEREKARESWQSIENIKNLKEGYLSQVINKITDLMIKYNAIVVLEDLNFGFMRGRQKFEKQVYQKFEKMLIDKLNYLAKKDIDENKQGGLLKAYQLTNKFDSFKKLGKQSGVLYYIPAWNTSKMDPATGFVNLFYLRYENVEKSKDFVRKIDDIRYNDQKGYFEFDIDYKKFTAKADGTRTKWTLCSYGSRIYSYRNRDKNSQWDSKEVDITNEFKTLFEKNNINFKCKKDIKDEILKIEEKVFWEDFIRLFKLMVQIRNSEIKSEKDYIISPIMDENGLFFDSRLNKEKMPKNADANGAYNIARKGLWIIEQIKNTPDDKLKKVKLAISNKDWLNFAQKEKYED

SEQ ID NO: 515 - protein, 1238 aa, unidentified
  REGION 1..1238: note = Cas Enzyme sequence
MKKIDGFINKYPISKTLRFSLIPVGKTEENFNNACILENDKKRSVEYKKAKKIIDEYHKAFIERKLNEFSYDTKLNKLFIEQLRNYADLYFKNNKTDSEIKAMEESENNMRKYIGDVFSSDKEFKLLFAKEIVKDILPECLNNKEDLSTIEEFQNFFTYFRGFNENRKNIYTSEAHTTGVANRCINENLPKFLDNTSTYRKVIGALDPNDIKAINDLSAELFGVDIDIIFTVDYFVSVLSQGGIDRYNGIIGGYTKESGVKVKGLNECINLYNQIVIKIDKNKKLPLLKMLYKQILSDKESISFIPQSFENDEDVFDSIKECFGSLNETLKELSELFDRFGDYDLDHIYVGSGTAVTDISNAVFNDWSAVRQGWNAKYEKTHPLKDIKRSDKYFEQRDKEYKKSLSFSISDLQEFGESDNCKNLISDFYKDKVVTFVNDVQKKYNAYVEFISVTEDTSSKKLCFNYDAIKVIKELLDGVKELERIIKPLMGSGKEEIKDELFYGEFLPCINAFSTIDALYDKVRNYVTKKPYSTEKIKLNFDNPQLLAGWDKNKERDYRTVLLRKDNNYYLAIMDKSNNKIFLDPPECNSESFYQKIEYKLLPGPNKMLPKVFFAESNLDRFKPNSKIMSIREKESFKKGKNFNLKDCHEFIDFFKESIEKHEDWSQFGFEFSPTETYNDISEFYNEVKEQGYSIKIKNIPESYISEMVESGQLYLFRIYNKDFSDHSHGKPNLHTMYFKMLFDEENLKDVVYKLDGEAEMFYREPSINEDELTIHNANEKLANKNKLRKKEMSVFPYDIIKDRRYTKRQFSLHIPITLNFKADGKKSINDEVRKAVKDCGKNYVIGIDRGERNLLYVCVIDNNGDIVLQKSLNMITSSNDTTVDYHHLLSKIEEDRQDARKNWGAIQNIKELKEGYLSQVVHEIYKLVLKYDAIIAMEDLNFGFKKGRFNVEKQVYQKFENMLIEKLNYLVSKDADINENGGLLKAYQLTNKVEGVNKGKQNGFIFYVPAWLTSKIDPVTGFADLIKPKYSSKKDSLEFINKIDAIRYNCNPENEYFEFDIDLSKFPGTNASYKKEWTICTFGERIINYRNKDKNSAWDSKTIVLTTEFKNLFDRYNIDYMKNDLKESILNQSSEEFFKSFIALFANTLQLRNSETGNTDLDYLISPVKDKDGVFYDSRNYPEYCSRLPGNADANGAYNIARKALWAIEKIKETDDDKLKNVNLAITNAEWLEWVQK

SEQ ID NO: 516 - protein, 1238 aa, unidentified
  REGION 1..1238: note = Cas Enzyme sequence
MNNSMKEFTNVYPVSKTLRFELKPVGRTLEFIEKNGIIADDNHRAESYKTIKGLIDDYHKEFIDDALSNYVIPIDDLEKYYSLYTSSQRDDNDEKQFNDIKKKLRKQLIQHVKNFDNKRFEKLFKKEMITEELVNRYKDEQDKLDVINEFSKFTTYFTGFYQNRKNIYSDEEISTSIAYRLVHQNIPKYIDNIKIFNRITETGIDSFLPELESKLIDRIGDSSISIKKYFSLNGVNLILTQKGIDIYNSILGAFFNDDESEKVKGINEYINLYNQKQKDKSKRIPQMKQLYKQILSDRLSSSFTMNKFEYDHDVYQAIDEYSSAMFEDILDNAEFINLEELIESIDSYNLSKIYIKNDSSITTISESLYKDWSKINNCISDDYDSKHNYKSTEKYYEKRKADLKKIKYYSISDLNEFTSDNIQKYYVDGIGEYIKNIRECYKEYVSIVKPGVDKATKNLINKNKSEVDKIKNYLDSIKALQNFVKSLIVDDSISDKDEHFYGRLTRIWTVLDKINPIYNKVRNYITQKPYSDEKIKINFNRSTVLDGWDKNKEEANLGVILLKDDLYYLAIMDCKSNKSFSNTPQSVSNDKFRKMNYKLLPDPSKMLPKVFFSKSRIDEFGPSKELLEAYNKGTHKKGDNFKIEDCHRLIDFYKDSIAKHEDWNKFNFHFSDTSSYNDLSDFYKEVSDQGYKITFQDVDADYINNLVDEGKLYLFQIYNKDFSTFSKGKPNLHTMYWKALFSDENLHNVVYKLNGQAEVFFRKKSIALKVTHKANEPIKNKYPNAKKTESVFDYDLIKDKRYAFDKFQFHVPITMNFKAPGENRFNNKVNRFIHDNDVFVIGIDRGERNLLYITVIDNKGNIVEQKSLNKIISVNNDNISHDVDYHMLLDKREKDNLTSRQSWSTINTIKELKEGYLSQVVHELSKLMVKYNAIIVLESLNSGFMRGRQKVEKQVYQKFEKMLIDKLNYLVFKDIPEGETGGLLNAYQFTDRFDSFQKLGMQSGFLFYIPAWMTSKIDPSTGFVNLLNTKYKSVEESKQFINKFNSIRFNKADDYFEFSLDYSNFTFKADGSKTDWILCSYGTRIINYRDKDNNNTWSTKEINLTDEFKNLFMKYDIDYNSDDLIGDINNIQSADFYKSFLDTIGNMLQLRNSDSERNIDEIKSPVKNDYGVFFNSSDSEYYNNTIPLDADANGSYNIARKGLMLIQRIKETPIDELQKVKLAISNKDWLKFAQENTI

SEQ ID NO: 517 - protein, 1238 aa, unidentified
  REGION 1..1238: note = Cas Enzyme sequence
MKIEHLKDFTNLYAMDKTLRFRLEPHEKTREHIRNAQVIETDARRSKEYQVVKGLIDKYHRWFIDSTLDGIQLKVESTGNDDSLQDFVDAWKSTADNRATRIQSIQGNLRKTIVKAFNGRREFKYLFKKELIRDLLPQFIEKEEHRKKVENFREFTTYFSGFFTNRENMYSHEAKSTGIAFRIINQNLVKFVENISVFQSYILPNLQRQYLSVLYDDFKEYLNVTQIPDLFTLAYFPEVLTQPQIEVYNAVIGGRKDKDNKQIKKGLNQYINEYNQQQKDKSARLPLMKPLFNQILSVREAVSFLPQQFTSAGELVGVLNEAYQNLSVVFGELFDVVSHLADFDSKGIFIKNDMGLNDIAQRYYGSYDVIKRALRAQYECEKPMRHGQKVEKYEEQIAKYLKSVESVSLSQINELLHDSGDIRDYFTAFGASDDGTIQHVNLLARINQAHSQALFVLNDENVTDQVLRDNVMLIKDLLDAIKQLQWFIKPLLGAGDELDKDPQFYGKFEPLYEQLDEIITPLYDKVRSYMTRKPYSLDKFKINFDCSTLLEGWDVNKEQQNLSFLMRKNGNYFLAIMRKGTQRRVQSLILNSEKQGQGYEKMEYKLLQSPVKMLPKCFFSGTGIANFHPSNALIQINEEKSFRENRDHLEQLINFYKVVILQYPGWERFEFSFSPTSSYKNISDFYNEVEQQGYSVKFTNVPEQVIDKLVEEGDLYLFKITNKDFSPHSKGRPNLHTIYWKMLFDPQNLRDVVYKLNGHAEVFFRPKSISSSTVHKAHQAINNKSAYNKANKSTSTFDYDITKDKRFTKDQFELHVPITMNFKQSKTYKIKSDVREFIKAQGVRHIIGIDRGERHLLYLTMIDMDGNIVKQCSLNAPAEDNQRAAEVDYHRLLGDKEAARMQARRDWSAIENIKELKQGYLSQVVHRLATMMIEHDAMLVLENLNAGFMRGRQKVEKSVYQKFEKMLIDKLNYVVDKGKSPSEQAGALHAVQLTDLYAAQSDKGSVRQCGFVFYVPAWNTSKIDPVTGFVNLFDTRLTSMGEIKAFFGKFERISYNKQEGWFEFDCDYSRFTTRAEGCRTRWTICTRGERIWTHRSKNQNNQFVDETVNVTQQMLQLLQDCGIDPNGNLKEAIANIDSKKPLETLLHLFKLTVQMRNSVTGSEVDYMISPVADECGRFFDSRESDGRLPANADANGAFNIARKGLMVARQIMAADDVNKVKFAVSNKDWLRFAQHMDD

SEQ ID NO: 518 - protein, 1238 aa, unidentified
  REGION 1..1238: note = Cas Enzyme sequence
MKTFNDFQRLCSRSITLRFELKPQGKTLQHFKESGLLDQDEHRAESYKAVKKLIDEYHMRFITRALTGFSLKLESTDEKDSLAEYYELYNNANSREVLDIVKKNLRTQIFKTFGFKDNKDYNLKFGSNLIKKYLHNEQLMRPLTSDEKALVEEFKKFTTYFTGFFENRKNMYSAEAKSTAIAYRLIHDNLPKFIDNIKTFEKLMQTELADKLADLSKSLDAQLKGTDIHDLFTLGYYSSVLTQEQIDDYNTMLGGKTQEDGNPIQGLNVLVNIYNQQHPEQKLPLFKLLFKQILSDRTSASWLPEEFKSDNDTLKAIKEYYGESSNVLSNSSELKNLLQTLSSYDLSKIYIANDKSLTEISQKMFGDWSTINRAIMANLKLSVKPKRKEDESDYEARLRKLLSKNDQYSIQYINDCIAAANIENKSTVEDYFAKLGEVDTADEQQANLFSQIELAYTDVKDLLSNEYPAKANLVQDDSATDKIKKLLDAIKTLQYFIKPLFGKGEQADKDELFYSSLTQLWELLDEVTPLYDKVRNYMTRKPYSQEKIKLNFENPTLMKGWDLNKESNNTTVILRKDGMYYLGIMNKAAKKVFDIANLSDDGDCYEKMEYKSLKSRDMIHKFFAAKHVKRFAPSDEIKAIKERESYKESNKANFSLSDCHAYIDFFKSSLKITDEWSMYKFNFSDTSSYGNINDFYNEFERQTYKLSFRNVSVKYIDKLVEEGKLYLFQIYNKDFSPHSKGTPNLHTLYWKMLFDERNLANVIYRLEGEAEVFFRRKSTINNNTIHHANVEIDRKNPRNKDARSKFPYDIVKDRRYTVNKFQFHVPIMLNFTNSGVGNINTLVWDYLKNTDDVYVLGIDRGERNLLYYSLIDKNGNIVEQDSLNVIGDYDYLSKLNEVEGSRKEARKNWKEIEGIKELKEGYLSQVIHKIAQLMVKYHAVVVLEDLNLGFKRSRQKFEKQVYQNFENALIDKLNYIVDKKVDANAPGGLLNAYQLANNPKKVNKQDKQCGFLFYVQASYTSKIDPTTGFVNKLKTRYETIDKARTFFNKFKSIRYNSQDDLFEFAFDYNDFSKELDGTKTEWVVCTNGERIERFRNRDNANHWDTRTLVLTDAFKEFFAQNDIDINGNIKAQIIERTDKKFFEKLLHMLNLTLQMRNSDATQDRIISPVRNSSGEFFDSNNPGNMPKDADANGAYNIALKGLLTVRRIKQSTDVKKSVSAIKTVDWLKFIQEKPYLTE

SEQ ID NO: 519 - protein, 1238 aa, unidentified
  REGION 1..1238: note = Cas Enzyme sequence
LISGPGYKSATRNNVLPQINSLQRVSQQDLDRLRDACEKDAVQSRQRVGGKGSRPYANAILRDVEVACGICYAKTAGGPSRHWQYAVILDHAARRVSMAHSWIKRAEEQRSKFEIERNKLDHVPHDARAWLDAFCNRRSSESGATDAYRIRRSAVGGWKQVVAEWAALPATAENAGSELLSGPELARIRAARELQDTVEKFGDIQLFEALSATDARCVWQPDGKSDAQPLLDYVAGTDAISKRQRFKVPAYRHPDALLHPIFCDFGNSRWSIDYAIHRAPKELTHAKQLLEKKKAEIDKAELTLAKANGTAKRADISEKIKSLRAAFIQQQSKVACLDSRHAMTMGLWDGSRIEDTPLRWQSKRFASDIGQPLSAHSLPVSRADRFGRASVAAEDNSPVKPSGLFDLPDWNGRLQAPRRQLEAIAAMRDSAKLSAGEKQHLVAKRIHSIRWLVTLSAKLQALGPWFEFAGPRGLLEYRNGEVVLSPRSSKDSWRGLAFPFWHPHNLKGRGGAVRHVLSRLPGLRVLSVDLGHRYAAACAVWETVSTGQIQKACLDAGMEAPGPHPLYLHLKQIVDGKEKKTIYRRIGADTLPDGSPHPAPWARLDRQFLIKLQGENRDARPATSEEVAAVEQMENELGVVRQLKRKGQELLVDELVFDTLRTLRLGLRRHGTRARIAFNLTATKRIRPGGIQEVLDQEGRLSLLKETLLLWYEVYSGERWRDKPAEDLWNRHIQPLLGGTILQDTVNQEDIPSAAKRRKQREETSEKLRPVAEQIAKNDSLCRQLRVLWSAQWQTEDAIWRTRLRWMRRWLLPRGIKRDAQLRKSIRDVGGLSLTRIASFKLLYQVQKAYRMRPHPEDPERNIPKRGDSSLEDFDQRVLDAMERMRENRVKQLASRIAEAALGIGDEAGIHSKDGRQKKRPTERSRDSRFASCHAVVIEDLTHYRPDETRTRRENRQLMSWSSSKVKKYLGEACQLHGLHLREVSPAYTSRQDSRTGAPGLRCNDVTVEEFKKSLFWRKQVGAAEKNREAGNKGDARERYLLWVDEKISADETKETDSFLIPSDGGEMFVSAFEDNKTQSASRRKKPSALQADLNAAANIGLRALLDPDWEGRWWYIPCDAATFCPDTKKFIGCKAVDPSKPLRVVAEEGAISASGIGSKKSGRKRNAAIDGTRIVNLWRDPSSMPVHLDASGSGEWQRYHEYKNNVQSRVIQNLKARYKQTWQQENAFVPQNEDTPF

SEQ ID NO: 520 - protein, 1239 aa, unidentified
  REGION 1..1239: note = Cas Enzyme sequence
MNNKLFANFTNLYSLTKTLRFELRPTLETKSLAEVIKEDKDIDRLYNEEMKPMFDKLHEEFITDSLENVKLSVDKLVALEKSLLEKKEFRKDKKITKEIIYELENKKEEEIVVLQKYLREEVVKLFNKKGDEWRDEKYPNLKLKDVGYKILTEARVLEILKLKNTDKKEIIEKFGKFFTYFSGFIQNRENYYSNEDKSTSVANRVVNENLVRFLDNKQKFEEVSKKVAQIKKFEEVFSLENYDKCLTQLGIEKFNLEIVGEINKELNLFSQQNRDILPKAPKLKFLYKQIGCGKRIFDLFSIIVGNEWKELKNLQNNKDDGKSFSQKELLEKIRKLYKLFFDKPSDYELDKIYFNKQSINTISSMWFVNWHKLSELLSGKRIIKNKNKETGEYTIPKKISLADLKNILESETNVEDLFKKGKINEDEIKENNSVGVYEKLFSSNGWETFLAIWEYEINESFKVLDNNVAKFELKKQTKFQNLDKKERVFFIKEFCDAFLAIERMVKYHKVDENNDTDDNFYETIDLYLQETELRKYYDAFRNYLTEKPFSENKIKLNFKSGTLLGGWSQTFETYGSLIFEKNGEYFLGIINGTKFSESELNKIYNINSDSIKAKRLLYNTQKIDNKNPPRWFIRSKKTTFSPMVREGLLDPESILELYDKKLYSKTENKNGYKEYLPRLLDYFKDGFLKHKDFVQFKENFKWLDNSEYDTVVDFYNHTADMCYKTSWEDINFTELENLTKDSRIYLFKIYNKDFAEKTSGIKNSHTILFLELLKSENNLKLKLLGGGEVFYREKSIEKEIDKERSFKTDKFEIIKNKRYSEEKYFLHFPIEIKGRKLKGSFNQFLNKEISKKESVNILGIDRGEKHLLYYSLVNNNGEIIKQGSFNKIKCGNKIVDYNELLSKRAKEMMEARQSWETIGKIKDLKEGYLSQVIHEIYKLVIENNAIVVLEDLNTEFKAKRTAKVEKSVYKKFELALVKKLNHLILKEKKANELGGSLNAYQLTPYIKPGDVDKFEKAKQWGIMFYVRPDYTSQTDPVTGWRKTIYISNSETIENIKKKWKDANIKIYFDSDKKCFKFLYDKWELCAYPNLERLYWNRSEKNAEGKFGNMKKYSLHKEFECIFEGVNKSKNISDQMFDKEDFNWKSFIFYWNLLNQIRNSDKSKDENESDFIQSPIWSEKINDFFDSRKKYQIDLPENGDANGAYNIARKGIMIVDRINENSQKPDLFIKNTDWDNFSQK

SEQ ID NO: 521 - protein, 1239 aa, unidentified
  REGION 1..1239: note = Cas Enzyme sequence
MNNNLFKDFTNLFSLTKTLRFELKPTLGTKSLTEVIKEDKDIDRLYNEEMKPMFDKLHEEFITDSLENVKLSVDKLVALEKSLLEKKEFRKDKKITKEIIYELENKKEEEIVVLQKYLREEVVKLFNKKGDEWRDEKYPNLKLKDVGYKILTEARVLEILKLKNTDKKEIIEKFGKFFTYFSGFIQNRENYYSNEDKSTSVANRVVNENLVRFLDNKQKFEEVSKKVAQIKKFEEVFSLENYDKCLTQLGIEKFNLEIVGEINKELNLFSQQNRDILPKAPKLKFLYKQIGCGKRIFDLFSIIVGNEWKELKNLQNNKDDGKSFSQKELLEKIRKLYKLFFDKPSDYELDKIYFNKQSINTISSMWFVNWHKLSELLSGKRIIKNKNKETGEYTIPKKISLADLKNILESETNVEDLFKKGKINEDEIKENNSVGVYEKLFSSNGWETFLAIWEYEINESFKVLDNNVAKFELKKQTKFQNLDKKERVFFIKEFCDAFLAIERMVKYHKVDENNDTDDNFYETIDLYLQETELRKYYDAFRNYLTEKPFSENKIKLNFKSGTLLGGWSQTFETYGSLIFEKNGEYFLGIINGTKFSESELNKIYNINSDSIKAKRLLYNTQKIDNKNPPRWFIRSKKTTFSPMVREGLLDPESILELYDKKLYSKTENKNGYKEYLPRLLDYFKDGFLKHKDFVQFKENFKWLDNSEYDTVVDFYNHTADMCYKTSWEDINFTELENLTKDSRIYLFKIYNKDFAEKTSGIKNSHTILFLELLKSENNLKLKLLGGGEVFYREKSIEKEIDKERSFKTDKFEIIKNKRYSEEKYFLHFPIEIKGRKLKGSFNQFLNKEISKKESVNILGIDRGEKHLLYYSLVNNNGEIIKQGSFNKIKCGNKIVDYNELLSKRAKEMMEARQSWETIGKIKDLKEGYLSQVIHEIYKLVIENNAIVVLEDLNTEFKAKRTAKVEKSVYKKFELALVKKLNHLILKEKKANELGGSLNAYQLTPYIKPGDVDKFEKAKQWGIMFYVRPDYTSQTDPVTGWRKTIYISNSETIENIKKKWKDANIKIYFDSDKKCFKFLYDKWELCAYPNLERLYWNRSEKNAEGKFGNMKKYSLHKEFECIFEGVNKSKNISDQMFDKEDFNWKSFIFYWNLLNQIRNSDKSKDENESDFIQSPIWSEKINDFFDSRKKYQIDLPENGDANGAYNIARKGIMIVDRINENSQKPDLFIKNTDWDNFSQK

SEQ ID NO: 522 - protein, 1239 aa, unidentified
  REGION 1..1239: note = Cas Enzyme sequence
MTVFDSLTGFYPLAKTLPVKLTPMGSTLQNIRVNGIIKNDEELLENFTRLKQLADEYHKEFIATVLENFKFKVASEGNNDSLSEFAEAFDSDRKQDADARFRFTIIRTCLRLAVAKAFEAMPDFKKLEKKEFVKDILRQRATGDDVPIIDSFSKFTTYMLSYNRTRRIYGYDEKANTVAYRCVDENLPIFYNNIKAFAKIREHLPQDIMNTLCEEMKPYLKSDELAEMFTLGYFNECLSQKGIEAYNAVLGGINTPNGHIKGLKEYIYLYNKETKEKKFYLPSLTSLKKQILSDHDSLSWIDTKYKNSHEMLQDIRTFHETYRKNVAHPLQALMAHIHEYDLHRIYIANKENLAPISLRLYAQWNALRDTIFNEYSAKIQRKRKETFEKYEKRVNKAIDDCGSFSLAEVNRFLMPFDKNVADYFTKMGAVDNHKEQRENLFATIENKWTDLLSLMEQDEKYEKVLQLTEHHITKIKAYLDAVRDLHHFVLPLQGEGNENDREPVFYDTLGNCLEVLQEIKYLYNRVRAFLTRKPFSTKKLKLNFGSSTLLSGWNTDNEKANRCTMLRKDGRNYLVIFEKGQGELFQDESMTLSKDEPYYEKFDFNIFGDPVKSLPHTCFAACNADFYKPSAEILQIREKGSYKAGKNFNLPDLHKMIDFYKACVKKMPKWGEVQFNWKETTEYENLTEFMESFIVKGYFIDFLKVSERTVNKWVDEGRIYLFRLDKRDYSPFSKGKKSLHTMYLDMLFHPDNLEKMVYKLSGGCEMFFRKASIKPSGPTHPAGQPIANKSPEVAEKKPVSTFAYHLIKDKRYTEDMFMIHLPVAVNYHVPDSKGMKVTAQVRHLIRQGLFKHVIGIHRGERNLLYVTVTDMQGHIVEQKSLNVIEDSYAGVTHAKDYNELLHRKGEQRTQSRKDWQTIDKIRDIKQGYLSQAINVITNMILQYEALVVLESLDDCFKRGRQKIEKNIYARFEQQLVDKLNFLVKKDRDLNEPGGLLNALQLTDRVEPGYKAFQNGIIFYVPAAYTANACPVTGFVNLFNFKKGSIEETKAFFSKFDGIRFNKQTGEFDFTFDYVNFTDKAEGIQTEWTMSSHGCRSHWTDIAGRKICKMVELTEEFKNLFIGHGVDFTGNLKEAIATVNKRSFYEGLSDLFNLLLQMRNVVPGVCDYFVSPVKDREGKYFISTPEHEHLPSDTDAVTAYNIARKGLLMVDSIATTHESDKLSLGVTNQIWMNHIQNQDN

SEQ ID NO: 523 - protein, 1239 aa, unidentified
  REGION 1..1239: note = Cas Enzyme sequence
MEEFNQFTGLYPLSKTLRFELKPVGKTLENIVKHGLLEEDKHRADSYEKVKKIIDEYHKVFIDNALTDFKLKNGESKKNETLDQYFALYNKREKDENDKKDFSEIQKSLRKQIVDSLTGNEKYKNIFKKELIKQDLLEFCNEDDRKYVEEFKDFTTYFNGFNENRANMYSAEEQSTAIAYRLIHDNLPKFVDNINTFSKVLAVPEINEKLPKLYKDFESYLNVESISEMFQLDYFNMVLTQKQIDVYNAIIGGKDDGNEKIQGLNEFINLYNQKHKDTRLPKLKVLYKQILSDRNAISWLPEEFKDDNEVLIAINSCYKDLYEHVLGEKNLKILLENISQYQLDGIFIKNDLQLPNISQKLLGNWSVIQNAIIEDSKSFIKKKGKESENEYESRLNEIYKKQNSFSVAYINECLKNAGKEIGVENYFSALGAVNTETEQRENLFARISNAYSIVSDLLNAQYPEGRNLSQDKQNVAKIKDLLDALKALQHFIKPLLGNGDESGKDEKFYGEFTALWDELNKITSLYNMVRNYMTRKPYSEEKIKLNFQNSTLMDGWDYNKERDNTAVILRKDGLYYLGIMNKKYNKIFEPENVKHDGECFEKMIYKLLPGANKMLPKVFFSKSRIDEFKPSKEIVENYKNDTHKKGEKFNIEDCHRLIDFFKSSIEKHSDWSKFNFKFSDTSKYADLSGFYREVEHQGYKVTFVNISKDYVNSLVDEGKLYLFQIYNKDFSPYSKGTPNMHTLYWKMLFDERNLENVVYKLNGQAEIFYRKKSINYDRPTHPAHQPINNKNIQNKKKESLFSYDLIKNRRYTVDKFFFHVPITINFKGVDSENINDQVRRYLQKAKDTHVIGIDRGERNLLYLVVVDNKGNIVEQYSLNNIVNEYKGNTYSTDYHALLDAKEKERELARESWQTIENIKELKEGYLSQVIHKITELMIKYHAIVVLEDLNMGFKRGRQKVEKQVYQKFEKQLIDKLNYVVDKHKAPEADGGLLHAYQLTSKFDSFQKLGKQSGFLFYIPAWNTSKIDPVTGFVNLFDTRYVNIEKAKAFFCKFDIIRYNQDKGWFEFDFDYKNFTSKADESRTKWTLCTFGTRVETFRNKEKNSQWDNRNVDLTKAFKELFSKYNIDLSSNIKEAICIQTEKDFFESLLHLLKLTLQMRNSVTGTEIDYIISPVANENGEFFDSRACSDKLPKDADANGAYNIARKGLMLIEQIKKAKDLQKLKFDISNKSWLQYVQNN

SEQ ID NO: 524 - protein, 1239 aa, unidentified
  REGION 1..1239: note = Cas Enzyme sequence
MKNFNDFQRLYSRSITLRFELKPQGKTLQHFVESDLLDQDEHRAESYKAVKKLIDEYHKRFISRALTGFSLKLDSTETKDSLSEYLELYNNANKSDNEKKHFAKIQDNLRAQIVKRLTTDEAYARLDKKELIKDLLNEKVMRQLSSAEKDLVKEFDGFTTYFTGFFENRKNMYSAEAKSTAIAYRLIHDNLPKFVDNIKAFDKLMQTDIADKLANLAQSLDEQLKGTDIQDLFTLGYYSSVLTQEQIDDYNTIIGGKTQENGNPIQGLNVLVNLYNQQHPEQKLPLFKLLFKQILSDRTSASWLPEEFKSDNATLNAIKEYYGESSNVLSNSSELKNLLQTLSSYNLSKIYIANDKSLTEISQRMFGDWSTINRAIMANLKLSVKPKRKEDESDYEARIRKQLSKNDQYSIQYINDCIAAANIENKSTVEDYFAKLGEVDTANEQQVNLFSQIELAYTDVKDLLSNEYPTNANLAQDDRAIEKIKKLLDTIKALQYFIKPLLGKGEQADKDELFYSSLTQFWEQLDKVTPLYNKVRNYMTRKPYLQEKIKLNFENSTLMDGWDLNKERDNTTVILRKDGLYYLGIMNKTANKAFDIANLSADGDCYEKMEYKLLPGPNKMLPKVFFSESRIAEFAPSEKILAIREDGSFKKGDNFSIDNCHAMIEFYKKSIQKHEDWSKFDFRFSDTESYEDLSGFYKEVEQQGYKLTFRNVSAKYIDTLIDEGKLYLFQIYNKDFSSCSKGTPNLHTLYWKMLFDERNLSNVIYKLNGQAEVFFRRKSNIYKNTIHRANIEIERKNPRNKDAYSKFPYDIIKNKRYTVDKFQFHVPITLNFKNDGVGNINSMVWDYLKDTDDVYVLGIDRGERNLIYYSLIDKNGNIVEQDSLNVIGDYDYLNKLNEREVERDNARKSWKCIEGIKELKVGYLSQVIHKIAQLMVKYHAIVVLEDLNFGFKRSRQKFEKQVYQNFEKTLIDKLNYLVDKKVDADAPGGLLNAYQLANQFESFQKLGKQCGFLFYVQASYTSKIDPTTGFVSKLNTRYETIDKARTFFNKFKSIRYNSQSDLFEFAFDYNDFSKELDGTKTQWTIHTNGERIEQFRNREKNNSWDTRTIVLTDAFKEFFAQNDIDINGNIKAQVVERSDKQFFEKLLHLLKLTLQMRNSNSTQDRIISPVRNSSGEFFDSNCPGNMPKDADANGAYNIALKGLLTVRRIKQSTDDKKNIPAIETVDWLKFIQEKPYLEN

SEQ ID NO: 525 - protein, 1239 aa, unidentified
  REGION 1..1239: note = Cas Enzyme sequence
MKNFNDFQRLYSRSITLRFELKPQGKTLQHFVESDLLDQDEHRAESYKAVKKLIDEYHKRFISRALTGFSLKLDSTETKDSLSEYLELYNNANKSDNEKKHFAKIQDNLRAQIVKRLTTDEAYARLDKKELIKDLLNEKVMRQLSSAEKDLVKEFDGFTTYFTGFFENRKNMYSAEAKSTAIAYRLIHDNLPKFVDNIKAFDKLMQTDIADKLANLAQSLDEQLKGTDIQDLFTLGYYSSVLTQEQIDDYNTIIGGKTQENGNPIQGLNVLVNLYNQQHPEQKLPLFKLLFKQILSDRTSASWLPEEFKSDNATLNAIKEYYGESSNVLSNSSELKNLLQTLSSYNLSKIYIANDKSLTEISQRMFGDWSTINRAIMANLKLSVKPKRKEDESDYEARIRKQLSKNDQYSIQYINDCIAAANIENKSTVEDYFAKLGEVDTANEQQVNLFSQIELAYTDVKDLLSNEYPTNANLAQDDRAIEKIKKLLDTIKALQYFIKPLLGKGEQADKDELFYSSLTQFWEQLDKVTPLYNKVRNYMTRKPYLQEKIKLNFENSTLMDGWDLNKERDNTTVILRKDGLYYLGIMNKTANKAFDIANLSADGDCYEKMEYKLLPGPNKMLPKVFFSESRIAEFAPSEKILAIREDGSFKKGDNFSIDNCHAMIEFYKKSIQKHEDWSKFDFRFSDTESYEDLSGFYKEVEQQGYKLTFRNVSAKYIDTLIDEGKLYLFQIYNKDFSSCSKGTPNLHTLYWKMLFDERNLSNVIYKLNGQAEVFFRRKSNIYKNTIHRANIEIERKNPRNKDAYSKFPYDIIKNKRYTVDKFQFHVPITLNFKNDGVGNINSMVWDYLKDTDDVYVLGIDRGERNLIYYSLIDKNGNIVEQDSLNVIGDYDYLNKLNEREVERDNARKSWKCIEGIKELKAGYLSQVIHKIAQLMVKYHAIVVLEDLNFGFKRSRQKFEKQVYQNFEKTLIDKLNYLVDKKVDADAPGGLLNAYQLANQFESFQKLGKQCGFLFYVQASYTSKIDPTTGFVSKLNTRYETIDKARTFFNKFKSIRYNSQSDLFEFAFDYNDFSKELDGTKTQWTIHTNGERIEQFRNREKNNSWDTRTIVLTDAFKEFFAQNDIDINGNIKAQVVERSDKQFFEKLLHLLKLTLQMRNSNSTQDRIISPVRNSSGEFFDSNCPGNMPKDADANGAYNIALKGLLTVRRIKQSTDDKKNIPAIETVDWLKFIQEKPYLEN

SEQ ID NO: 526 - protein, 1239 aa, unidentified
  REGION 1..1239: note = Cas Enzyme sequence
MEQFTNLYPISKTLRFELIPDPRTKDFLEHSDLIAQDEHRAESYKKVKKIIDRYHKAYIESVLGNLKLPCESRGGSDSLEELYELYSKGQKSDADRKALEKVQDKLRKLIADALTKDNRYKRIDKKELIREDIMSVIQPDEQTLIDEFRDFTTYFTGFHENRKNMYTAEAQSTAIAYRLIHENLPKFIDNMGTFNKIAASPIAEKLSILYEEMSEYLNVKDIREMFELGYYTDLLTQSHIEVYNAVIGGRTTDDGKKIQGLNEYVNLYNQQQGTQEARLPKLKPLFKQILSDREAVSWLPEEFSTDSSLLQAIKEFYRALSDHVLLPLKELMVNLPDYNLYGIFIPNDVSLTDISKSMFGDWSVIKNAVVKDVKHNCPPKKNETSEAYDERIHKLLKRENSFSIGYLNDCIKDAGKDICSHFASLGESDDGISQNINLIAQINNAYNEVQPLIEKEYPESHNLSQEKDNVTKIKALLDAIKSLQRFVRPLHGNGDEPEKDERFYGELSVLSEELDHITALYNKVRNRMTRKAYSIEKFKLNFENSTLLDGWDLNKERDNTCVILRKNGLYYLAIMRKQFNRIFLDAPSDDGGDAFEKMEYKLLPGANKMLPKVFFSKSRINEFAPSDELLRHYKAGTHKKGENFSLKDCHELIDFFKSSIQKHEDWNKFDYHFSPTETYEDLSGFYREVEQMGYKISFKKIPFRYIDLMVEDGKLFLFQIYNKDFSIHSKGTPNLHTLYWKMVFDERNLANVVYKLNGQAEVFYRKRSLFYDKPTHPAHQAIKNKNPEGTKPESTFAYDLIKDKRYTMDKFQFHVPITINFKATGSGSINPLVDQYIHDHHDLHFIGIDRGERHLLYVTVIDSTGHIKEQFSLNEIANEYNGHTYKTDYRSLLNRRETKRQQERQSWSTIESIKDLKQGYLSQVIHKITTLMMKYNAIVVLEDLNMGFKRRRQCVESSVYQQFEKALIDKLNLLVDKKIDAECPGGLLHPYQLTNRFTSFRDMRRQNGFLFYIPAWNTSKIDPVTGFVDLLHPRYESIEKARAFISKFKSIRYNEDKGWFELAFDYNDFTTMAEGSRTQWTLCSHGSRVETFRNNEKNSMWDSREIDLTKAYSDLFAKYGINLAHNLKEAIAGQNEKDFFERLIHLVGLTLQMRNSITGTDIDYMISPVADEAGNFYDSRKCSDDLPKNADANGAYNIARKGLWVARQIQSTPIGASVNLSLTNREWLHFAQTKPYLDD

SEQ ID NO: 527 - protein, 1240 aa, unidentified
  REGION 1..1240: note = Cas Enzyme sequence
MGKTHRIKLFCKNKIEKGDKIMANYYEGLTNKYSVSKTLRNSLIPVGKTLDYIKMNHMLDRDIQRRKDYAVVKKMIDAYHLKVINEALEGKKLSALDRTAELYFLGKRTDEEEKELEECFTALRKEIVVFLRSHEKFGILDKKNLIEEELNKTVCSEGELAALKNFEKFTSYFTNFNTVRMNLYSDEKKSSTVAYRLIEENLPRFFDNISVFNKIKDSINQSDLTETLELYNITDIGHLFLVDEYNYLLTQNGIDIYNSVIGKINQIINLHNQQNKNEAKLPKMKVLYKQILADRDKKSFIEEFTSDEELICRLREYSEELGKFLHADSEKSIISFINTLNEATGEGIFVKNDTSLTSLSVICCGSWNYMTEQISSEYDNCYTGKKKLNTEKYDDEKKKALNKYKSYSLKKLQEICDDTDIIKTYSARIYEDIEKIDADAIKVIKTLDNHDAGRKLFKNTNAVGEIKAYLDDVKKLEADIKLLMGTGMEPERNALFYGEYTEVYDNIQKIDALYNMTRNYLTKKPFSTEKIKLNFDKTTLLSGWDKNKEHDNLGVLLEKDGIYYLGIINKDNNKIFDEVHDQKLNSYHKMEYKLLPGPNKMLPKVFFSNARREEFNPSDELLEKYDRGTHKKGENFSVEDCHALIDFFKKSINKHEDWKNFDFHFSPTESYEDISGFYAEVKNQGYKVSFKNVDSEYIDSLVDSGALYLFKIYNKDFSEYSKGNYNLHTLYWKMLFDERNLSDVVYALNGGAEVFYRPASIFEEDKIVHKHGTAIANKRSSTDKPTSTFDYDIVKDKRYTEDRFELHVPITMNFTAEGSGKLNAEINGILKQNDGIHVIGIDRGERNLLYVVVVNPKGEIVHQISLNEIVSKYNGNEVKVNYHELLDNREKQRDAARKSWETIESIKELKEGYMSQVVHVIAQLIIQYNAVIAVEDLNFGFMRGRQKVEKQIYQKFEKMLIDKLNFLVTDKGRGQENPYKAGGSLNALQLTDKFESFKKIGKQTGVIYYVPAWMTSKIDPTTGFVNLFNLKYTNLDEAKRFWGKFESIRFNSEKNYFEISFDYSKYTYKADGSRTKWTICSYGERIEKYRNVMANNSWDDREVDPTELLKQLFDKYGLIYKAGNNLVEDITAVDEGYFFKELYHCLKLILQIRNSSKDGKRDYLQSCVMNDKGYFFNSDSADSTLPRDADANGAFNIARKGLWILEQIKSTDDEKLGKVKLAISNKEWLCYAQEHRSING

SEQ ID NO: 528 - protein, 1240 aa, unidentified
  REGION 1..1240: note = Cas Enzyme sequence
MKQFTNLYPVSKTLRFELIPDKRTKEYLEQSDLISKDEKRAESYKIVKKIIDRYHKQFIDEVLSTTKLQYAKEGKLNSLEEFYFLYTNSNKTDADKKALDKVKEQLRKQIADALKKDNRFKRIDKKELIREDILKVATQEERPLIDEFRDFTTYFTGFHENRKNMYSPEAQSTAIAYRLIHENLPKFVDNIATFQKILHSPIAENLPVLYKEMEEFLNVNSIEEMFMLDYYSDVLTQPQIEVYNAIIGGRTLEDGTKIQGLNEYVNLYNQRQTLRENRLPKLKPLFKQILSDKEAVSWLPEEFESDQQLLKSVREFYASFKDNVMQQLKELLLNLPNYNLDKIYIPNDLALTDISQSLYGDWSVIKNRINEDFRNEYPQKKNETAEKYEERITKLVKSMDSFSIGYLNSCLTSQVKNICSHFTSLGAVNTDKKQKENIFIQIENAYIDVCDLLEKEYPQNKNLAQDKVHVNNLKAFLDAIKTLQHFIKPFLNTENEAEKDERFYGDITVLGEELNSITPLYNKVRNRMTRKPYSIAKFKLNFENSTLLDGWDVNKERDNSCVILRKDGFYYLAIMRKDSNRIFADAPKVENNADAYEKMEYKLLPGANKMLPKVFFSKSRIDEFHPSSLLLEHYEKGTHKKGDNFSLRDCHELIDFFKASINKHEDWNKFNFNFSPTETYEDLSGFYREVEQMGYKVSFKNIPVCYINEMVSEGKLFLFQIYNKDFSQYSKGTPNLHTLYWKMVFDEQNLANVIYKLNGQAEVFYRKKSLNVVKATHPANQAIINKNPFNKKEESTFKYDLIKDKRFTVDKFQFHVPITINFKAIGMGNINPLVNHFIKNTSDLHIIGIDRGERHLLYVTVIDSKGNIKEQFSMNQIVNEHKGNTYKTDYHDLLDKREEERLKERQSWSTIEGIKELKQGYLSQVIHKIVTLMVQYNAIVVLEDLNMGFKRGRQKVESSVYQQFEKALIEKLNYLVDKQQNPHEYGGLLKGFQLTNKFTSFRDMGRQNGFLFYIPAWNTSKMDPVTGFVNLLHPKYESVEKARSFICKFKSIRFNEKKGWYEFTFDYNDFTAKAEGTRTEWTLCTYSTRIETFRNKEKNSSWDSREVNLTEEFNKLFSQYGISDDENLKEAIAKQTEKHFFETLMHLLNLTLQMRNSKTGTEIDYLISPVTNEEGYFYDSRNCGSSLPENADANGAYNIARKGLWITRQIQSSENFEKVDITMSNKEWLNFAQTKPYLND

SEQ ID NO: 529 - protein, 1240 aa, unidentified
  REGION 1..1240: note = Cas Enzyme sequence
MIPIGKTRETMEKHNVIEEDAERKSNAELTKEVSDSFIREFIADYKEDMDWKDLYDAYGEDRARFTDIMNQKAEKLAKRFSDSFNEYINTFLKANGINDKKSKWSDSGYVDVVLPLYVSIHPDFSNDKYERAVASLLHCSNSLFKKYTTSYARIIAGTKKGSFADRSMENFQTACANSVMFDLISRNLSSVGSHDAFKEVFADAPLNMNEYLSQKGISRYNEFVGDSFDESGQVIRYGVNHYINEWNQTHPDERMPKMHKLKKQILSIVEPSFRIRTINDETELFGTFDNIRTAEQRYAGMLESILENMNTADIYDKSGILVTSAERDSLANAITGEWSYFRRQIKEEEENRIREEYLQKKNRVKTKLTQKDNKQIEDALNKSIYSVADLNKMLGSDFGTIEEKLLDEYIRNKSKKESAYAQLVKTDFYDKKTIPAGDDVQRIQQYLDKVLSLTHIVRGLCADSQDPRTDFVFSDDVSSLEDDRVQIISCYNLIRNFVTKKREKTAKEKQIQLCFGRPAHFEQVWNNKQEGKFGNVDAALLEYAGKYYYMVPAAKNEAKLNFPVTDEPQMGECYNYLATKKAIGFAKAFAKFYIKSPEAMEGFEKTEEPFEISVGNDTMIISRKVYEDYEAKTFRESEEAKNKLIDCAKEFLSKNLSYCIYDWSGLKETKDYVNYGEFCNEVDSIAFRVINRYVSKKLVDDAVERGNLYMFEISSLDMYKDSSRMKNIMALRFNQIMNGMFTGDKFIIINNAPQIRYRPVVIEKKDVHPVGSRLVNKNTTDGRTIPGDVYLELCAYYNGKKDSLSPEASLYNEKVSVKDSDRAHIKDKHYTEEKFLITFSYTANKNVASATSGYQLNEMVRKEIRENGCNIMAVIRGIDNLLYYAVVDENGNRIEAGDLNVVGDTDFYEKLTILGKQRYTDQKNWKHENKVADLKDTYLGQVCRKIASIAVKNNAVIVIDKINERTKRKNAAFDNNMYRKFENALVNSLTDYYDIGIRGDEPGSVKNPLQLTVKEDNGFQNGIIFYQFDTFTKNICMRTGFVNLLNTFEIKTVASKVAFLKKLSGIYYDNDINEFVFEFTWRNIGCILKDEELSLYNGMDKIWKVRTHFTRYMRNAEKNKYVEIDGTEVLKELIRKNHPDMIGGKIDVDRLTSEEVKKVFEIFTLYTNGYIPRMDDAESGYMSPACDWNNFGTIRYDEMTALQLAKKSSLMIGKVKSGKDWKDMNVSRVEWLNHVLKADW

SEQ ID NO: 530 - protein, 1241 aa, unidentified
  REGION 1..1241: note = Cas Enzyme sequence
MQNKETFEKFTGLYELSKTLRFELKPIGGTKDLLSKNYIFEKDILVRENYLRAKKYFDCLHCEFINEALEKMSFEENDYQEYENLYLAYKQEKNQKNFKAWNDYVKKLRTKIKDNFTTIAIVWRDEYSKIVSDEKLQKKIKKISGIDLFFKKEIFGLLIKKYGEEEGAKIINLETGETETIFDCFSKRFSTYFINFHHSRQNFYKDEGIAGAIPTRIIDDNLTKFLDNRKIFQDKYGVLDLSEEEKIIFSLTYFNQCLTQVGIEKYNNQVARLKSKINEYRQKTKEKLPFLKELFKQILTEKNKQGTEQDEFIIKNDEQVFEILNNFLKEVKENNLKAELIFNKFIEKQNEYLLDKVFIKGNNINTISNKWFLNWSIFGSLLPKNRGNHNKVADFVSINQIKQAFDNPELPKDQKLLFKKEYFELKVVFENKNAFENFISIWQYEWNKSLDICNSSIIDVKKMIEEDKKYTNKKGVLKNCKKGELQKELIKDFSESALSVSQMMRYFELKKGKNSVNDLDEDANFYNEFNEWAEDDKVWLYFNEFRNYLTKKPYKEDKIKLNFEKGTLLMGWSANEDGNLQYYSSIFRQGGQYYLGIMSSASTFNLNKEEAFNIEDGFYELMEYNQLKSTTIYGSLYKGEYKTDYKTDKKILSDQELISRVKVILQKQEKHYPQLKEILKQNYETANDFAKVLGDLVLYNISFTKKVSKKYVDDLTQKNFYFFQIVNKDLISKGEKGKSNLHTRYFELLFDEQNLYNNQGLALKLSGGGEIFYRPKSLDDKKEIQTKKNKILLNKGDKAIEKKRYSEDKILFHLPIVFNAGLKNKQINFKVNQFIISQTKQRIIGIDRGEKHLLYVSVIDENGKVLETKSFNKIEVPNKKEPDDYHQLLDKKEKDRADARESWQEIENIKELKQGYISQVVNEINKLIFSYLEEEVLPIIIFEDLNIGFKRGRFKIEKQVYQKFELALAKKLNYLVSKVKENYLEALQLTPPIQNFQDIKKQTGIIFYVPASFTSAICSVCGFRKRLYGFLFKNIEQAKKLLTDHQFKIVYDGGNFNFECLASQENKKKTKNKNELFLEKELADKLIFSSDVERLINVRSKNNKGWETIKFDAKVELEKLFEDKIDLQGDIMEQILAEKLEANFYKQLMFIINTLLKLRNSHNVEDRDFIACPSCGFHSDKGFQGKEFNGDANGAYNIARKGVLISEKIRQFAKEGDLEKLKIIEDLQIEMREWDKFVQNN

SEQ ID NO: 531 - protein, 1241 aa, unidentified
  REGION 1..1241: note = Cas Enzyme sequence
MKNFNDFQRLYSRSITLRFELKPQGKTLQHFVESGLLDQDEHRAESYKAVKKLIDEYHKRFITRALNGFSLKFDSTGAKDSLSEYLELYNNANKSNTEKTQFAKIQDNLRKQIALRLSNSNNALFKRLFGQELIKKDLLNEQLMRPLSTAEKAQVKEFEKFTTYFVGFSKNRKNMYSVEAKSTAIAYRLIHDNLPKFIDNIKTFDKLMQTEIADELADLSKSLDKQLNGSDIHDLFTLAYYSSALTQEQIDNYNTIIGGKTIEGEKPIQGLNVLVNLYNQQHPEQKLPLFKLLFKQILSDRTSASWLPEEFKSDNATLRAINEYYHDSSEVLANNSQLKNLLHTLSSYDLSKIYIANDKSLTDLSQKMFGDWATINRAIMENLKLSVKPKRNEDESDYETRLRKLMDKNDQYSIQYINDCIAAANIDNKTTVEDYFAKCGEVNDTNEQQGNLFSQIESAYTEVKDLLSNEYPANANLAQDDTATEKIKTLLDRVKALQLFIKPLLSKGEQAEKDELFYSPLSQLWEQLDEVTPLYNKVRNYMTRKPYSQEKIKLNFENSTLMVGWDLNQEEANHTVILRKDGMYYLGIMNRTANKAFRSANLSADGDCYEKMEYKLLPDPKKMLPKVFFSESRIAEFAPSNEILVMRGDGSFKKGNNFSIDNCHAMIDFYKKSIQKHEDWSKFDFHFSDTESYDDLSGFYKEVEQQGYKLSFRNVSTKYIDKLVDEGKLYLFQIYNKDFSPCSKGTPNLHTLYWKMLFDERNLADFIYNLNGQAKVFYRRKSIINNNTIHHANVEIEHKNPRNKDAYSKFPYDIIKNKRYTVDKFQFHVPITLNFKNDGVGNVNPMVWEYLKNTDDVYVIGIDRGERNLLYYSLIDKNGNIIEQDSLNVIGDYDYLNKLNEVEVNRKEARKNWEKIESIKGLKEGYLSQVIHKITQLMVKYHAIVVLEDLNFEFKRLRQKFEKQVYQNFEKALIDKLNYLVDKKADVDAPGGLLNAYQLANEFVSFQKLGKQSGFLFYVNAGYTSKIDPTTGFINKLNTRYETVDKARNFFNKFQSIRYNAEANLFEFAFDYNIFSKELDGTKTQWTVCSYGERIEQFRNPDKVNNWDNRIIALTDAFKAFFADNGIDINGNVKAQIVERTDKQFFVQLLHLLKLTLQMRNSNDHQDRIISPVRNSSGEFFDSNNPGTMPKDADANGAYNIALKGLLTVRNIKQSTAPKPDLAFKNKDWLNFIQSKPYLTD

SEQ ID NO: 532 - protein, 1241 aa, unidentified
  REGION 1..1241: note = Cas Enzyme sequence
MKERTLKDFTNKYSLSKTLRFRLEPQGSTLKHITAAQIIETDERRTKDYEQIKGYIDEYHRHFISSALSEMNLKYDSTGHDDSLQDFLAVYLSNEEGRTAQLNKIFDNLRKSIVKAFKSHSQFKHLFKKEMITLLLPSFVKTEQEQHIVTKFKKFTTYFTGFFINRANMYDEGAKSTAIAYRIINQNLVRFTENMLIFQTKIQPTLSPEILKKLYTEFQEYLNVANISELLDLKNFTHILSQEQIEVYNAVIGGRKDENNKQIVQGLNQHINLYNQQQKDKNARLPLLKPLYNQILGDRQGVSFLPKQFNNAQELATDIKAIYEHLCPIIAQLHSLIVQINDYDLNGIFIKNDLNLTEIAQRHYGAYDTVKRALRNEYEHEHPQKNRQKAEKYEEQISKYLKNLGSISLAHINAIVPLAQPIQDYFKSFGAVCNTTIQRENWKAYIDNAYTAIAPILNDTQLDDNTLRKNITFIKDFLDAIKQLQWFLKPLLGAGNEIDKDSQFYGTFEPLYDTLDNAITPLYDKVRSYLTKKPYSLDKFKINFDCSTLLDGWDLNKEEQNLSFLMQKDGYYYLAIMQKGSQRRVLQAISYSEAQGDCYEKMEYKQLNGTYKMFTKCFLSSDNVIKKWNCPKQIIQIYQTGSHKDNKQDLETYINFCKKHILMYPGWERYNFKFRATNAYSSITEFFQELDQQAYNIQFQQVPVSLIHQLVDDGSLYLFKIANKDFSPYSKGRPNLHTIYWKMLFDPKNLNDVVYKLNGKAEIFFRRKTQGEHTVHKAHHAIDNKSEFTKHTKPQSTFSYDIIKDHRFTIDQFEFHVSITLNFKKPNRERLNLEVREFIKDQGVRHIIGIDRGERHLLYFTMIDMDGHIVKQFSLNTPSQTIVNSHQIDYHQLLETKETNRLDARRNWNVIENIKELKQGYLSQVVHLLATEMIANDAILVLENLNAGFMRGRQKVEKSVYQKFEKMLIDKLNYIVDKSKQPNEPCGALHAVQLTTPFSDFNSNNKANVKQCGFVFYIPAWNTSKIDPVTGFVNLFDCRLTTINELKSFFSKFDRICYNQSKGWFEFAFDYSKFTTRAEGTRTQWTICTYGERIWTHRSPSQNNQFVSETIDITQEILKLLSKLAIDPNSNLKEGIANIDSKEQLEDLLHLFKLTLQMRNSVTGSEVDYLVSPIADQQGTLFDSRQADEQLPQNADANGAYNIARKGLIIARQIMQSSDVEHIRFAITNKDWLRFAQHIDD

SEQ ID NO: 533 - protein, 1242 aa, unidentified
  REGION 1..1242: note = Cas Enzyme sequence
MNRIYQGRVSKIEIKDSEGNFRNVPVGSPDTCPLWRHHRIFQDAVNYYLVALGALAGTGSENAFVGLGSKDRVIHDLYSRLFDSWERFPRDMHGASSLRDSLRRTLPGLSERASLQDAFDAILSGNEANARERVLSLLSLIQDLGGDIQKGSKRYFPFFCEPATKATFPRARVGLLKVEGKDFVPRLLWSSDLEIAPDQVVEQLKFEYFANPNESVQPIEGNEARVRLIEALDNPQLGIELPIEILSDLRKRVHLIETDIRIPRYFFGGAGAELRKFRLDLFLIAAYVTPDPSILRALRNSFKEPSASKSSKKKDETEEVENLLRSLGDDPLILARGERGFVFPSFTSLPTWVGANAQKPIWRDFDIAAFAEALKSLNQFTAKTEEREEKLKKAEETLHYMLGISDAIPRSSDSETEEQAPSRPGKDPRWPLVAQLEKELGENLSEGTWQLSRSAMRGLRDIIGLWRKHPGASVVTLQKDVKTYQADEKHKREIGSVQLFLLLCEERYHALWQTETDDERGDESEENDDPARILSDAIEVHQIRREVERFREPIRLTPAEPVFSRRLFMFSDLTDKLAKVKFGETTEENSEVKSQFVEAAIALKEGENLKEARVRITFSAPRLHRDELLGGAESRWLQPITAALGFSNPAPSVKFDSAVALMPDHMDDGRIRHLLNFPVNFDSAWLHQSIGKADLWKSQFNGTKDKNLHLHWAGTARDTTRKNTWWENRTIIENGFTVLSNDLGQRSAGAWALLKVTCSRPDTKHPVRSIGHDGTREWFATVLATGIHRLPGEDQRILKNGKWATEQSGKKGRNATFSEYEAACVLAKNLGCESVENWLGMSGEKSYPALNDQLVKIANRRITRLGTYHRWSCFSPEKFEDPARRANVIGGQLAELSAYQDENVTVSADILKSGDFEGFRHRAGAAFEALRTELEVHLVNLANLTAPLRQKVWSWQKRPDSSGYGDLLMVDLDDCHPKIRGQRGLSMARLEQLEGLRRLFLRYNRSLDRSPGIPAKFGREDVGRTSGEPCQALLVKIDRMKEQRVNQTAHLILAQALGVRLCPHRIEENERKSRDLHGEYEKIPGREPVDFIVIEDLSRYLSSQGRAPSENSRLMKWAHRAVRDKLKMLAEEPFGIPVVETVPAYSSRFHALNGQAGSRLHELHELEAYQQQSLINLAAKTDFQNRDRSKAAGELFEQFQALAKLNERRRAEGKKVPRTLYYPKSGGPLSLHQGTETRSMLM

SEQ ID NO: 534 - protein, 1242 aa, unidentified
  REGION 1..1242: note = Cas Enzyme sequence
MERFDELTGLYSLSKTLQFELKPIGKTLEQIERKGIIAQDEKRAEEYEIAKCIIDEYHKAFISMCLKGLRLNLSSTGSLDSLEEYVEQASKLRRSESEEKNFDTIKQNLRRQIVNSFKSRGGSFTDLFKKELITQHLPEFVSEKNKKQIVENFSKFTTYFTGFHENRKNLYSEEEKSTAIAYRLIHENLPMFIDNIKTFAKIADSDVANYFVEIETTFSEYLDGSHITDMFKLEYFTETLTQEQISLYNNVIGGVSNEDGTKKKGLNEYVNLYNQQNKTRLPLLKPLYKMLLSDKVSLSWLPDDFVSDEEMIYAINEMQLSLKDLLYSDGENSLKYLLTHIGDYDTEHIYISNDLGLTDISQQIFGQYDVYTSGIKTELCNQIKQSAKEKREPELYKERINKLFKSAKSFSINYLNSFAEGDKTIQAYYARLGAHDLEGEQSTNLFTQIEMASIAASDILAGKHTNINQSEEDTKLIKDLLDTYKALQHFIKPLLGNGDEADKDNEFDARLRNAWDALSVVTPLYNKVRNWLTRKPYSTEKIKLNFDNAQLLGGWDLNKEPDCTSVLLRKDDMFYLAIMDKKYNHAFDIDELPCEGECYEKVDYKLLPGANKMLPKVFFSKSRISEFAPSLAIQKSYNEGTHKKGSNFSISDCHRLIDFFKQSIAKHEDWSKFPFSFSDTKRYEDISGFYREVEQQGYMLSYRNVSVSFINQLVDEGKLYLFQIWNKDFSKYSKGTPNMHTLYWKMLFDEVNLADTVYKLNGQAEVFYRKSSLKLENTTIHKANQTIKNKNVQNEKKTSTFDYDIVKNRRYTVDKFQFHVPITLNFKATGGDNINANVQDIIRNNGIEHIIGIDRGERHLLYLSLIDLKGNIVKQMTLNDIINEYKGNIYKTNYKDLLVTREGDRTEARRNWHKIENIKDLKEGYLSQVVHIIARMMAEYKAIVVLEDLNMGFMRGRQKIERNVYEQFERMLIDKLNYYVDKQKKATENGGLLHALQLANKFESFKKLGKQSGCLFYIPAWNTSKIDPVTGFVNLFEIHYENVDKARCFFSKFDIIQYNEERDWFEFAFDYNDFGTKAEGTKSKWTLCTYGTRIKTFRNPNKLNQWDNEEVVLTEEFKKIFNEAGIDINGNIKDAICQLKEKKHLESLMHLMKLLLQMRNSVSNSEIDYLLSPVADENGEFYDSRTCAPTLPKDADANGAYNIARKGLWVIEQIKQTADKPRLAMTNKEWLKFAQDKPYLNE

SEQ ID NO: 535 - protein, 1242 aa, unidentified
  REGION 1..1242: note = Cas Enzyme sequence
MNKKFDLKNIKNEFPLMKTLRFELKPQGDTLKNFMESIYDEDKDLYDSSFEAKKIMTKYYLKVLDEILSEISVDWKKLYNDLLNKEKKEIDELLQKEIEKKFKDYPGIKNIFSGKCIEDIKESPDFNEDEKRKVEKFDKKTTYFTAYFKNIKNIFTVNGKSASAIYRIADNFKKYSKNVELYEKLKKDEKIMKYLNENKFDEKTMDNLFDVSKYNSYLRQVDIEKYNTLLSGYSKENGEKVKGLNELINEVNQKYKSKLNVFNSLYKQILTEEDTKSFVDEILLTPESVIKTIDNFIDSIIMNDIEGLKEEFLKISLENFEGIYISNKKLNEISNRKFGDYNSINMMIKQSMNEKGILSKKEINELIPDLENINKPKVKSFNLSFIFENLTKEHKELIIDYIRENICNVIENVKITIEKYRNIDNKIEFKNNAEKVSKIKEMLESINELCKLIKEFNTDEIEKNNEFYNILNKNFEIFESSYKVLNKVRNFVTKKEVIENKMKLNFSNYQLGNGWHKNKEKDCSIILFRKRNNERWIYYLGILKHGTKIKENDYLSSVDTGFYKMDYYAQNSLSKMIPKCSITVKNVKNAPEDESVILNDSKKFNEPLEITPEIRKLYGNNEHIKGDKFKKESLVKWIDFCKEFLLKYKSFEKAKKEILKLKESNLYENLEEFYSDAEEKAYFLEFINIDEDKIKKLVKEKNLYLFQIYNKDFSAYSTGNKNLHTMYFEELFTDENLKKPVFKLNGNTEVFYRIASSKPKIVHNKGEKLVNKTYLDDGIIKTIPDSVYEEISEKVKNNEDYSKLLEENNIKNLEIKVATHEIVKDKRYFENKFLFYLPITLNKKVSNKNTNKNINKNVIDEIKDCNEYNVIGIDRGERNLISLCIINQNGEIILQKEMNIIQSSDKYNVDYNEKLEIKSKERDNAKKNWSEIGKIKDLKSGYLSAVVHEIVKLAIEYNAVITLEDLNGGFKNSRKKVDKQIYQKFERALIEKLNFLIFKNYDKNEKGGLRNAFQLTPELKNVTKVVSQQGIIIYTNPAYTSKIDPTTGYANIIKKSNNNEESIVKAIDKISYDKEKDMFYFDINLSKSSFNLTVKNVLKKEWRIYTNGERIIYKDRKYITLNITQEMKDILSKCGIDYLNIDNLKQDILKNKLHKKVYYIFELANKMRNENKDVDYIISPVLNKDGKFFMTQESNELTPKDADLNGAYNIALKGKLMIDNLNKNGKFKFLSNEDWLKFIQGR

SEQ ID NO: 536 - protein, 1242 aa, unidentified
  REGION 1..1242: note = Cas Enzyme sequence
MSNYLYYNFTGQYPVSKTLSLELKPVGETRNTIRKNRILEIDEHLLENFVRVKELINEVHKQVIADVLENKVILSANLLEELYALQFEVAGPDERKEEINSLLRKEVAEAFYSYPVFKKLFGGELFTEVLPKCVDTEDDLNAVSSFNKLVSMFQGFNEVKKSMYSAEMKHSTIPYRIVHENLPRFLNNIRLYRNLQERNIDFNANLTELENILGIPGAEFLFTVEGFNVVLAQKGIDWYNQVIGGVSTETGKVKGLNECINLWNQQNPREKKLPLFTQLYKQILSDSNTCSFVIDAFENDDDVLTALTGSYTELATKILGRTDGMTYQSLFQNIDAFDMNGICVKDTDINNLSYRFCGRFRELEDYFSKKYDADYKGRKKPGTEKYEEEKRKEMKKVKERSLEEIRGAFLDNPDNSPYFIDWIKNQAAAYEADTRCKASAMLSAVNCHRKDTPIRQHKELISVIKEYLDAVKEMQWFLKLFSGAGMNAAKDMVFYSEYNTINDRFIPFTTLYNKVRNYVTKKPFSQEKIKLNFESPSLLAGWSVTKESTNLCMLFRKEGQIYLGIAEKNNTSIFKELEEDAGEGECYEKMEYRLLPGPNKMLPKVCFSAKGMADFQPSDEICTIYRKGTFKKGPDFSLADCHKLIDFYKEAIGRYEAWAPFDFKFSDTGSYRDISDFFREITEQGYRVDFRNVSASVIDAMVAEGRLYLFQIWRKDFGKYSKGNLDLQSIYFKMLFDERNLADVIYKLNGEAEIFYRKASIDIKKTPIHRANEPVANKNPQNPKQYSLFSYNIVKNRRYTEEKFLFHVPVTMNFKAGNGYGLNADVDNSIREAEELHFIGINRGERNLLYVVVMNQKGEIKEQFSLNTICNVYKSYDGSTGTIETDYHELLDRREKERDAAQENWQDMDSIKDLKRGYLGQAVHVIAQLAVKYNAMIIMEDLSSVFVNRRKKIEKSIYQEFEGALLKKLNYLIVDKNRELLDVHEAGKALRAYQLTGKFESFSKIGYRSGIVFYVSPWNTSSMDPTTGFSKLFSTKYENMVQAKKFLANFDALRFNAEKDYFEISFDYKNFGVKPDAGKRDWIVCTYGRRLERYKNPNKNDLKETADYYPTEEMKNLLYNYGIEYVEGENLLEQILKVSDASFFKELLYILTMTMQMYNYTEGFGAGSEEFFQSCVMNSAGEFYNSLTAENTLPQCGDAITAYHIAKKGLLIAERIRNTPEGEKVPLAVRNEEWLDYIRRTL

SEQ ID NO: 537 - protein, 1242 aa, unidentified
  REGION 1..1242: note = Cas Enzyme sequence
MNTYEELTGSYSLTKTISLALNPIGETLRHIEEKGFIAQDEQRAEDYKKVKDIIDRYHKYFITMCLDGFKFSTDKLMKYVALAENAKRDEDAFDEVKTQLRKEIVAAFEKGETYKDLFKKELILEHLPNFVTDENEKRLVASFNKFTTYFTGFHENRENMYSDEAKSTAIAHRLIHENLPMFYDNMKSFKKIAACEDCIDFAEFEAAFSEEFKEFKVEHLTDIFQLEYFNNTLTQRKIDFYKLVIGGKVLEDGTKLKGVNEYVNLYNQQHKDARLPLLKPLYKMILSDKVALSWLPEEFKSDEEMVEAIQEMHKNLKGALTDNAENNLRDLLLNMDKYDLAHIYIANDLGLTDISQNIFGQYDVYTSALKQALRNEYAPIPKERRNPELYDERINKLFKSRTSFSIAELNSLADCDHTIENHFKQLGAAERNGKQEIDLFSQIETAYAKASDILSGKHGNIGQSEAETALVKNLLDAYKSLQHFIKPLLGHGDEAEKDNEFDAKLRAAWDALDIINPLYNKVRNWLTRKPYSTEKIKLNFENAQLLNGWDKNKETDCTSVLLRKDGMYYLAIMNKKANHAFACDELPADGDCYEKIDYKQIALPMGLGAFVRKCGKTAEKLGWSCPERLKNKDKKIITNDAEAEGVLPDLIDCYKAFLNTYEKDGFKYKDFNFKFKPSSEYSSLVEFFAEVPSQGYKIAFRKVSVAYINQLVESGKLYLFQIWNKDFSKFSKGTPNMHTLYWKQLFDERNLADVVYKLNGQAEVFYRKRSLKLEETTVHQAHQPIPNKNKQNEKRQSQFNYDIVKNRRFTVDKFQFHVPITLNFKATGRGNINDKVLEIIRNNGIKHVIGIDRGERHLLYLSLIDLKGNIIKQMTLNDIVNEYRGHTYATNYKDLLAEREDNRTEARRNWKKIDNIKEIKQGYLAQVVHIISKMMVEYKAIVILEDLNMGFMRGRQKIERSVYEQFEKSLIEKLNYYVDKQKDEEEVGGLLHALQLTSKFKSFKELGKQSGCLFYVPVWNTSKIDPVTGFVNLFDTKYVNVEKARAFFSNFDAIRYNAEKDWFEFAFNYSNFTDKAKDTREKWTLCTHGTSIRTFRNPSKLNQWDSEEVVLTDEFKKVFEKAGIDICGNLKNAICALKEKAHLEKLMQLMKLLLQMRNSKPNTEVDYMISPVADEQGNFYDSRCGNSALPDNADANGAYNIARKGLWVIKQIRETPAGKRPKLAIKNKEWLKFAQQKPYLDD

SEQ ID NO: 538 - protein, 1242 aa, unidentified
  REGION 1..1242: note = Cas Enzyme sequence
MKQFNDFQRLYSRSITLRFELIPQGKTLKHFVDSGILAQDEHRAESYKAVKGLIDDYHKRFITHALSGFRLNVDSSGSYDSLTEYLELYDKPNKSNSEKKQFAKIQDNLRGQIADRLSKQDNSKFKRLFGKELIQEDLLNNELMRELTDTERQQVNEFKNFTTYFTGFFENRRNMYSKEAKSTAIPYRLIHDNLPKFLDNIKSFEKLMHTEIAGQIPMLSQSLEDHLCGEKLQDFFSLSHYSSVLTQEQIDNYNILIGGKTIDGEKPIQGLNVLINLYNQQHPEQKLPLLKLLFKQILSDRTTASWLVEELTSDTATLKAISEFFNESFNVLSNNSELKNLLQTISSYDLSKIYIANDKSITDISQRIFGDWSTISRAIMANLQLSVKPKRQEDESAYEERLRKILNQIDQFSILYINECLVAAEIDRKLTIDDYFFRLGEVNTAEEQTTNLFIQIELAYADVKPLLSKEYPVDANLAQDDRAITKIKKLLDSVKALQAFIKPLLGKGEQADKDALFYSSLMQLWQQLDGITPLYNKVRNYMTRKPYSQEKLKLNFANSTLMDGWDLNKEEDNYTVILRKAGLYYLGIMNKAAKKVFNVMNLPTDGDCYEKMEYKLLPGPNKMLPKVFFSKSRIAEFAPSEQVLQIHKDGSFKKGDNFSIDNCHALIDFFTKSIQKHEDWSKFDFYFSDTESFKDISGFYKEVEQQGYKLTFRDVSATYIDQLVDEGKLYLFQIYNKDFSPNSKGTPNLHTLYWEMLFDERNLANVVYKLNGQAEVFYRRKSIINNNTIHHANVEIERKNPRNKDARSKFPYDIVKNRRYTVDKFQFHVPITMNFKNEGIKDINPMVWDYLKNTDDVYVIGIDRGERNLLYYSLIDKNGNIIEQASLNVIGNYDYLNKLNEREIERDIARKSWKSIEGIKELKEGYLSLVIHKIAQLMVRYHAIVVLEDLNFGFKRSRQKFEKQVYQNFEKALIDKLNYLVDKKADANAPGGLLNAFQLTNKFESFQQLSKQCGFLLYVQANYTSKIDPTTGFVSKLNTRYETVDKARSFFDKFSTIKYNADNDWFEFAFDYNAFSKELDGTRTQWTICTHGERIEQFRNPDKNNNWDSRSINLTAAFKECFAHNNIAINGNLKAQIVERKDKSFFEQLLHLIKLTLQLRNTDARQDRIISPVRNSYGAFYDSNCPGKMPIDADANGAYNIALKGLLTVRRMKQATDSKKPNYAISTKEWLQFVQDKPFLKD

SEQ ID NO: 539 - protein, 1242 aa, unidentified
  REGION 1..1242: note = Cas Enzyme sequence
MSIFDKLTNKHSLNKTLRFELIPVPETEKYIKDNNILNVEEERHQKYLKIKPILDDFHNKFITKALENSSINWESYFPVYSRFLENRKNKQKDESKEKDRIEIKLRNQIVDLFNDIANKYKDDVNNKLGNKMLKEFGINVLTEANILKVIALSYQNDKEKLEILKSFNKFYGFLDGYNTNRENYYSNEEKSTAVANRIVNENLPIYAQNKYATEKLPSQIKAVTNNIPDFDQCLTQKEIEDYNDIIGKINTAINGINQIEKRTKKDKIPPLKTLRKQIGCKPIKEGKPRIEELQNNAEFYKFIKEWVQELDKKSNYRENINKLIKYLKTEKHTQNNIYVAKNSFSRLILSYVFDGGYEGAINTLDKSNLLTKKKETGEAELKRPAFSVSELNLAFSNIPENRFRVENIDKDTDWISKAIKESADNRFVNLFCKNMEYLNQKLDVSMDKINVLENNYLETSNKEDNKEVVKTFADSVLDIHRLIGIFRIPPQKVGAIDSEFYNTLNEVCDNFKFARKYDVARNFVTKKPFSTDKIPVSLENGHLLEGFDIGKLREHGGLLLESSNNYYLAICPDKSGDVLKNVYSEFENKSTFFVYKIRQVANSYRMIPKVIFSKKSITKGLWEIPKEITSIKEKETFKIKNDRYNREHLDKLINFYISCIEKYPGWEIFKLHFKNTTDYRDISEFYKDFDDQAYVIEKICTNDSYFKEQVVLGKILLFRILTKDLAKTDPRRNKKENLHTLYFRSLFTNTSAPNNKISGNAQIFFRSSSLNTKENVITKKNKIIITRKGACVNKRYTRDRYFLHLPIEINYKAENVNIKDMNYITRENLIGSGNNFNILGIDRGERNLIYYCLINPKGGIIKNNSTDINYQYKCGDLNYQYKDLINDVAGERKKQRKNWQEISRIKNLKDGYISKVVSDISKMVLEYNAIIVLEDLNYKFKEGRKKIESSVYQKFELALAKKLSYLVIKGTENGNPGSVENAYQLVPPISTFGDIKGKQWGLLFYTNPKYTSKICPVCGFRPYKKFVYESQEKFNAFIKDTINKFVYKGGSFVIQITIEDKTWEIDTKNMERIRFFKDAQEKERKINDSSQKTLGPTKSGFYQMFVLTECFKQLFHGSIDISVDIVSQLTEKRFDKKFYESFVFYFNLFFQIRNGATTDKEEIDYISCPKCQFDTRNNRHNLKSIMNGDANGAYNIARKGLMMVERIIKNKEKPDLYIKNEDWDKVAQNWTGFCQDLQKLNG

SEQ ID NO: 540 - protein, 1242 aa, unidentified
  REGION 1..1242: note = Cas Enzyme sequence
MKNFNDFQRLYSRSITLRFELKPQGKTLQHFVESGLLDQDEHRAESYKAVKKLIDEYHKRFITRALTGFSLKLDSTGAKDSLSEYLELYNNANKSNTEKTQFAKIQDNLRKQIALRLSNSNNALFKRLFGQELIKEDLLNEQLMRPLSSTEKAQVKEFEKFTTYFVGFSENRKNMYSAEAKSTAIAYRLIHDNLPKFIDNIKTFDKLMQTEIADELADLSKSLDKQLNGSDIHDLFTLAYYSSALTQEQIDNYNTIIGGKTIEGEKPIQGLNVLVNLYNQQHPEQKLPLFKLLFKQILSDRTSASWLPEEFKSDNATLRAINEYYHNSSEVLANNSQLKNLLQTLSSYDLSKIYIANDKSLTDISQKMFGDWATINRAIMENLKLSVKRKRNEDESDYETRLRKLMDKDEQYSIQYINDCIAAANIESKTTVEDYFAKCGEVNTADKQEAGIFTQIELAYSNAKDLLTNEYPANANLAQDDSATEKIKTLLDTIKALQLFIKPLLRKGEQADKNELFYSSLSQLWEQLDVVTPLYNMVRNYMTRKPYSQEKFKLNFENSTLMDGWDLNKERDNTTVILRKDGLYYLGIMNKAANKVFDIANLSADGDCYEKMEYKQLPNVIANLPRVFIRAKSRAADFAPSEKILAIYNDGSFKKGNNFSIDNCHAMIDFYKKSIQKHEDWSKFDFHFSDTESYEDLSGFYKEVEQQGYKVSFRNVSTKYIDKLVDEGKLYLFQIYNKDFSPYSKGTPNLHTLYWKMLFDERNLANVIYKLNGQAEVFFRRKSNIYKNTRHRANVEIERKNPRNKDAYSKFPYDIIKNKRYTVDKFQFHVPITLNFKNDGVGNVNPLVWDYLKNTDDVYVIGIDRGERNLLYYSLIDKNGNIVEQDSLNVIGGYDYLNKLNEREVERDNARKSWKCIEGIKELKEGYLSQVIHKITQLMVKYHAIVVLEDLNFEFKRLRQKFEKQVYQNFEKALIDKLNYLVNKKADADAPGGLLNAYQLANKFESFQKLGKQSGFLFYVNAGYTSKIDPTTGFINKLNTRYETVDKARNFFNKFQSIRYNAEANLFEFAFDYNDFSKEFDGTKTQWTVCSYGERIEQFRNPDKVNKWDNRIIALTDAFKAFFAENGIDINGNLKAQIVERTDKQFFVQLLHLLKLTLQMRNSNDHQDRIISPVRNSSGEFFDSNNPGTMPKDADANGAYNIALKGLLTVRNIKQSTAPKPDLAFKTKDWLNFIQEKPYRTD

SEQ ID NO: 541 - protein, 1243 aa, unidentified
  REGION 1..1243: note = Cas Enzyme sequence
MIMTVFDSLTGFFPLAKTLPVKLTPIGSTMDKIRENGIIETDEGLLRNYTRLKQMADEYHKQFIATVLENFKFRVHSEGKDDSLQEYAEAYDSDRTHDADNRLKFDVVRACLRLAVSKAFEAMPQFKKLDKKEFVNEILAGLAQGEDVAVVQSFSKFTSYMIPYYNSRKIYGYEEKAHTVPYRCVEDNLPIFYANTKIYTKVREKLPQEVFDDLYRQLEPYLNVNTLDEMFTLDYYNECLTQKDIEVYNSVLGGINTPDGHIKGLKEYIHLYNESCKDKKERLPELKELKKQILSDRVILSWVDAKYVDSRDMYKDLQTFHQKSYSPDVAGPLRLLLMNIHNYNSRGLFITNKDSLAQISVGTCGRWDALRNAMYADYSVRMPRKRRETPENYEKRVLKAMSDCKSLTVEEVNDLLGEYGKNVLDYFSRMGAVDQGTLQRENYFAAIDNKWTDLVPYVLRSAKADSSHKPDEAESSAIKAYLDAVKDLYNFVLPLKGCGNENGRDTLFYDQLDRLLETLEEVIPLYNRVRNFVTQKPFSVEKMKLNFSSPMLLSGWSTDNEKSHRSVILREDDKIYLAILEKGMGGLFIDESDTLQEDEPYYEKMVYNFFGDANKNLPYRCFAKCNEEAYKPSAEVLRIRQAGSYMTTSKNFRLGDLHKLIDYYKSCIMKMPVWSEVKFDWKPTEEYKTLGEFTESFVRPGYFIEFLKISAQTIERLVDEGKIYLFRMDRKDWSVYSKGRKSLHTLYMEMLFHPENLDKVVYKLSGGAEMFFRKASIRPGNPTHPAGQPIANKSPEVACQKPTSTFDYDLIKDKRYTKDMFMLHLPVAVNYCIPDSKGMKVTAAVRDLIRQGRFRHIIGIHRGERNLLYVSVTDMHGNIVEQKSLNVIEDTQDGILHTKDYNDLLQRRGEDRQQSRKDWKTIDKIRDIKQGYLSQAINVVTDMILKYEAVVVLESLDDRFKRSRQKIEKNIYAKFEDQLVTKLNFLVKKDRSLNEPGGLLNGLQLTDRVDADSRLFQNGIIFYVPAAHTSNACPVTGFLNFFKFKDNDVASVKAFFGKFDTIRYNGLKDVFEFTFDYTQFTDKAEGGRTRWTVSTYGQRCAWSGSTGNRKMRMADLTEEFKQLFVSHGVDFTGNLKEAIATVEKRSFYDGLASLFTLMMQMRNVSNGVCDFFISPVEDHQGNHFVSSPENRRLPVDTDAVSAYNIARKGYLMVQSIMQTASGDKVNLGITNQRWMSHIQKTAE

SEQ ID NO: 542 - protein, 1243 aa, unidentified
  REGION 1..1243: note = Cas Enzyme sequence
MNKLYKNLHNLFKISKTLRFELKPVGETQEHFNKNVLKTDEEKAEKFKKVKKYCDEYHKVFIKECLENFHDNDFIKLLTEYNQFFIKTNLEEKEKKQFEEIQKQLRNKLSNLFKKASKYDGLFKEELIKEYLKEYYKNDKDKLDEIAVFDKFTSYFKGFHTNRKNMYSEKEKHTAIAYRLINENLPIYLKNIAIFKKIEKNIPTIKEQIQNNLGKNCDNYFSSIEEYINCLSQKQIEEYNLIIAGKSQEKAPKIQGLNEIINLYNQKNSTKLPIFKELYKQILSDTNSSSFKFDIIEYDYQIIEVIKSYYQEFEQEILNKSEFIDTISNISQFDASKIYINNDNSLTTLSQNVFEDWSYIKNLLEIEYDKKNGSKKSKNIDKYLEKRNKELNKIKEISIEKIENLIKEFEPENSNKIAEYFKNKTKEQIEKIKLEYENVKTVLQKEYDNSSTNLLQDKNSVEKIKNFLDSIKDLQSNIKLLIPKNKTLGDMDFYNKLNYEVLSEIIPVYNKTRNYVTKKPYSLEKFKLNFGSSQLLAGWDKNKEESNLGVLLEKDGNYYLGIMNKTDNKIFSGIESPNDKCCYRKIEYKLLPKVEENFPRVFFAKSRIKDFEPTEELLFKYKQGMHKKGENFDLSFCHELIDFYKSSIKKHKDWSKFNFKFSDTNTYDDTSQFYREVETQGYKIDFVNISEEDINQLVHDGELYLFQIYNKDFSKYSKGKENLHTLYWKALFDKDNLSDVVYQLNGKAEIFYRKKSIEAKIIYKRNEPIGNKKFKQLKRYRVFAEENEPIENKKTNPQKETSVFEYDLIKDKRFTVDKFQFHVPITLNFKAAGKNKFNDFVNNELKECDDIHIIGIDRGERHLLYISVINSKGEIVEQRTLNVINDTNYHALLDEREDARNKARKSWNTIQNIKEIKEGYMSQVVNVLTKLMLKYNAIIVLEDLNSGFKNSRKKIEKQVYDKFETKLISKLEYLVIKPDRNKYEEEKFNEGGILNAYQLANSEIKNSKQNGIILYIPAWNTSKIDPTTGFVNLFNLKKVNNEFVEKFQDIRYNEAEDYFEFDFNYSDFSDKSSGERKNWTICTYGDRLRSFGKQNKNSSWDSQSVNLTAEFKKLFDEYKIDYSNIKDEILNKSNSKFYNAQIEKDNFYGFAILFKLLVQLRNSIANSEEDYILSPVKNKRGFFYDSRQAGNILPQNADANGAYNIARKGLILLNRIKENEAGEKLDYSIKNADWLSYVQEQDQ

SEQ ID NO: 543 - protein, 1243 aa, unidentified
  REGION 1..1243: note = Cas Enzyme sequence
MKFENYTKKNQVQKTIRFELRPVGDSLINLERSGLLNRDRELSKNYPIVKKMIDRYHRGFIESCLQGYQTDWNGLAEAIANNRKKDEVNHEKNRKELDRIKQDYRDSICARFKADPRFKKINSEKLFSKLMKDEVERDATEEQKEAFYSFNRFSGYFIGFHENRMNMYDSGSKSTAIAYRIVDQNFPKYLQNIQSLEYISANCPAVLEKARKEIGDDIDGYMDINGFNKLLNQKGIDRYNEIIGGVAISEKEHILGLNQILNEYRQHDSNSKRILLQPLYKFILSESITNSFVPSIFTSDEEVCKSVAGYVQQLSEPKEMLDGTDLLHGISGLFKELMNGRFNLDGIFVSSAALPRISSCLYGQWDTLDRNLRSYYADRLNDPLMKKTSKKIEKLIAAKHFRLSEIVAAVEHDDPTKDWGLYVNNLSKKAEDAYSGLSEVKLLINVKNVRTEEGSSAIRRILEPLIDLVRDMKVFSISSEDGRDESFYQEFDYEYDELFSVIRLYNKVRNYCTKKEYNTDKMKMNFGNPTLANGWSVSKERDNTCVLFRKDGNYYLGVMDPSKKVDFTKIAQSSSSDCYEKMDYRYLADPVKMLPKVFLSSDKWKANHEIPKDILDTYELKRNGKIDKYSVDFEKALIGYYQDSISQYEEWKSFDFKFKKPNEYDSLNEFYDSLTRQGYKVSFRPIDSKMIDDLVKEGRLFLFQLYNKDFSPNSTARTRPQSANLHTIYWNALFSDENLRETVIKLNGEAELFYRKKSDMDIRSHKKGEIIIRRTDGSGNPIPEDIFAELFRYVTHPGTKLSKEAEPYLEMAKPRPAPHEIVKDKRYTVDKMFMHVSLTFNYANQGTTKSQMDQAILQDAAESEEKYIIGIDRGERNLIYVCLIDGKGRIIRQKSMNVLGGFDYRTKLDDRERGRLDDRRNWNAVRNISNLKEGYISKAVHEIVMMAVEYNALIVMEDLNFGFKRGRFKIEKQVYQKFESMLLDKLSHLVFKGRSPTEPGGVLNAYQLSPPFESFTKLGRQSGIVLYVPAAYTSKIDPVTGFADVFNRGSETVANKREFLKNMTSIEYDPSLGCFTFTFDYRKYQTRQTMSHNIWSVSTIGDRIVYSRKDRAYSVLSPTNIIQEVLSSEGVRPEGNLKQTIISNDNLLKEVYRAFDLSLRMRNSDNERDFIISPVRSGGRFYCSDDYSGEDAPLPIDADANGAYNIARKGLLYLSLCVEKGNYSSGSVKMSNDDWFRFVQEED

SEQ ID NO: 544 - protein, 1243 aa, unidentified
  REGION 1..1243: note = Cas Enzyme sequence
MSNFKEFTALYPVQKTLRFELRPQGRTMEHLKASNFFEEDRSRAVKYKRLKKTIDDFHRKFIDKCLSDVSLDWTPLANALEKYQNSKDEDKKASKINLEKEQKRMRSEIVSLFRKDKDIFENLFNEKLFSVILKKEVYEKGDPEEIEALETFNKFSGYFIGFHENRANIYSEGDENTAISNRIVNENFPKFFENLKTYQEIRKDSPELIKDLESELEDPDIKMDELFSLDGFNKVLKQAGIEKYNLSLGGYAPNTGEKRKGLNELLNLRHQQDKSSKKRSRMIPLYKQILSDRKTFSYLLDAFNEDSQILPSLEGFFADIEDNAIFDRAADLISSYCEYDNSKVYVRQKDLNKVSKEIFGSWDTLGEMLRTYRGDYLGDKNLERTGKKVDVWLNSKEFTLSDILGAISLSGSTTTFDEYVSKLRKTKEEIDAAWMEKNCITKKISGNEESIEIIKKILDPIQRLLHMVAPFQARSDLPLDNAFYAEFEEIYNKLFAIVPLYNRIRNYLTKSNLNTSKIKLNFKNPTLAAGWDVNKEYDNTAVIFRRDGMYYLGIMDPKKKKSISLKGCPCTGSHYQKMEYKLLPGPNKMLPKVFFSEKNKGYYAPSEEISKGYDADKHKKGENFDICFCHKLIDFFKESIQKNEDWKIFDFKFSPTESYVDISGFYQEVERQGYKIQFVDIPADIIDGYVERGEMFLFQIYNKDFSEKSKGRKNLHTIYWNAAFSDENLRNVVVKLNGEAELFYRDKSDVERSVHEAGTVLVNRTYDAEGKKIPVPDAIHKELYDYHKRGSSGTLSAEAEKYRDSVGAFQAPYVITKDRRYLEDKLFFHVPLTFNFKASGKKNVNEMVVKKFLNDEEMHIIGIDRGERNLIYVSVIDRSGNIIDQKSFNTVDGFDYHEKLEQRETERKDARVSWKSIGKIKDLKEGYLSKIVHEVSKMIIEYNAVVVLEDLNFGFKRGRFKVEKQIYQKFEKMLIDKLNYLVFKEVPGNEIGGILNAYQLTAPFESFAKLGKQSGILFYVPAPYTSEIDPTTGFVKLFNTSGVTNSDGRKGFMSKFESIVYSYDDKAFAFSFDYRNFLTSKTDHKNKWTVYSNGERVKYNMERKCYERTDPTKRIAEALSASGIEYRGGKDILSEIIETGNQKLIDTLYYSFRDSIQMRNKDEENDYIISPVKNLKGEFFKTDPGREDIPKDSDANGAYNIALKGKLLLDLIKKELDKNPEKMLMPKLEHKVWFEFIQTRGDQ

SEQ ID NO: 545 - protein, 1243 aa, unidentified
  REGION 1..1243: note = Cas Enzyme sequence
MNDFKDFTALYPVQKTLRFELRPQGRTMEHLKATNFFEEDRSRAAKYKRLKKTIDDFHRKFIDECLSNVSLNWTPLADALEKYQKSKDEDKKASKINLEKEQKRMRGEIASLFRKDKEFFKNLFSEKLFSVILKKEVYEIGDPEEIETLEAFNRFSGYFIGFHENRANIYSEGDEKTAISNRIVNENFPKFFENLKTYQEIRKDSPELIKDAELELKDHDISMDELFSLDGFNKVLKQAGIEKYNLSLGGYAPNTGEKLKGLNELLNLRHQQDKNNKKKSRMVPLYKQILSDRKTFSYLLDAFNEDSQILTSLKGFFEDIEDNAILDRAVNLISSYCEYDTSKLYIRQRDLNQVSKEIFDSWDKLGGMLRTYRGDQLGDKNLERTSKKVDEWLNSKEFTLSDILGAISLSRSEITFDEYVSKLHKVKEEIDAAWTKRNCIMKKISGNEESIEIVKKILDLVQHFLHMFGPFQARPDLSLDNTFYAEFEEIYNRLFAIVPLYNRIRNYLTKSNLNKSKIKLNFKNPTLAAGWDISKEYDNTAVIFRRDGMYYLGIMDPKKKKNINLKGCPCTGPYYQKMEYKLLPGPNKMLPKVFFSKKNKGYYAPSEEITKGYDANKHKKGETFDIDFCHKLIDFFKESIQKNEDWKIFDFKFSPTESYADISGFYQEVERQGYKIQFVDIPADIIDGYVEKGEMFLFQIYNKDFSEKSKGRKNLHTMYWNAAFSDENLRNVVVKLNGEAELFYRDKSDVERNVHEAGTVLVNRTYDVEGKKMPVPDAIHKELYDYHRIGCSGTLSPEAEKYRDSVGTFPAPYDITKDRRYLEDKLFFHVPLTFNFKASGKKNVNEMVVKKFLDDKEMHIIGIDRGERNLIYVSVIDRSGNIIDQKSFNTVDGFDYHEKLDQRETERKDARKSWKDIGKIKDLKEGYLSKIVHEVSKMIIEHNAMVVLEDLNFGFKRGRFKVEKQIYQKFEKMLIDKLNYLVFKNVPDNKVGGILNAYQLTAPFESFAKLGKQSGILFYVPAPYTSEIDPTTGFVDLFNTSGVTNSDGRKGFISKFESIMYSYDDKAFAFSFDYRNFLTSKTDYKNRWTVYSNGARVKYFRERKCYEWTDPTKRIAEALSAAGIEYRGGKNILPEIIKTDDTDLVKTVYYSFLDSLQMRNKDEEKDYIISPVKNRKGEFFKTDPEREDIPKDSDANGAYNIALKGKLLLDMIKKDLEKNLEKMVMPKMEHKTWFEFMQTRGDQ

SEQ ID NO: 546 - protein, 1244 aa, unidentified
  REGION 1..1244: note = Cas Enzyme sequence
MKKIDSFTGKYSLSKTLRFRLIPVGKTLENFKNKKLLDEDMTRAENYEKVKLYMDRKHKAFIDRILQAVKLENLSEYIELYYIKNKTDKQKKDIDVFENAFRKQIAAAFKNDEERKLLFGEKMIKEVLPSFLEDEEEIKIVNTFNRFTTYFTGFYENRKNMYSADSKSSSIAYRCIDENLPRFLDNAETFRKIAISLPKENFIELTEKLSLADGFIEREFLPESFNFVLSQSGIDEYNLLLGGKTLTENGEKVKGLNEYINLFNQQHNKEEKLPHFKPLRKQILSDRQSESFIPEAFSSDNELITSIKIFFEGESSDSGYRKTIENTKRLFYNLESYGLSEIFISAGADLSEFSARAAKSWSAVRDAWIKKYDRVHSDKDKKQKKYKENRDKKYKTIKSFSLSEIQSYIRNTEFDGELPYADFDIVLFIKREISELVETSMQYYENAKQLLNTPYASEKNLLKDSNSIELIKNLLDSLKEIELYTKAFKGSGKEDEKDESFYGEYTLLSDELIVLDSLYNKVRNYLTRKPFSSDKLKLNFRNAQLLDGWDISKEKDYKTILLRKEGSYYLGIVDEEENYEKLMIDLPRPNIGDQVFEKMNYKLLPNPYKMLPKVFFSNKNKEYYSPSDEILRIRDTGSFKNGKESTTFNHGDLMKFIDFYKESIKKNNDWNIFGFKFRPTVEYKNINEFYKDVSDQGYSVSFSPVSADFIRELVEDGRLYLFRLYNKDFSENSKGIPNLHTMYFRALFDEHNLSDAVYKLNGKAEMFYRDGKLCLKDTTIHTANQSIKNKNPLQKKATSTFAYDIIKDRRYTEPQFFLHLPITMNLKAEERDSLNYDVRKALRLSEKNYIIGIDRGERNLLYISVIDQDGRIVEQESMNILSVVKDDVVYETDYHDLLDRREKERDAARKSWKSIKNIKELKEGYLSGVVNRICNLVVKYDAIIAMEDLNMGFKRSRSKVEKQVYQKFEKMLIDKMNYLVDKKADINSPGGLMKAYQLTEKFTSFKNIKFQNGFIFYVPAWLTSKIDPTTGFVSLFRTHGLSEDMCREFVSAFDLITYNNAENQFEFVVNYDNFIGSEVSPKKLWTVCTNGERVETKRSKAINNNWESKEIILTDEFVKLFKEYEIDYSDGKDIKAQCLKIEKGGFLKEVVRLFALTVQMRNSIPNTDVDYLISPVRGTDGKFFDSRKGIESLPKDADANGAYNIARKALWIINRFKESSDDELSTVKICMTQRQWLEFAQSNG

SEQ ID NO: 547 - protein, 1244 aa, unidentified
  REGION 1..1244: note = Cas Enzyme sequence
MKKIDSFTGKYSLSKTLRFRLIPVGKTLENFKNKKLLDEDMTRAENYEKVKLYMDRKHKAFIDRILQAVKLENLSEYIELYYIKNKTDKQKKDIDVFENAFRKQIAAAFKNDEERKLLFGEKMIKEVLPSFLEDEEEIKIVNTFNRFTTYFTGFYENRKNMYSADSKSSSIAYRCIDENLPRFLDNAETFRKIAISLPKENFIELTEKLSLADGFIEREFLPESFNFVLSQSGIDEYNLLLGGKTLTENGEKVKGLNEYINLFNQQHNKEEKLPHFKPLRKQILSDRQSESFIPEAFSSDNELITSIKIFFEGESSDSGYRKTIENTKRLFYNLESYGLSEIFISAGADLSEFSARAAKSWSAVRDAWIKKYDRVHSDKDKKQKKYKENRDKKYKTIKSFSLSEIQSYIRNTEFDGELPYADFDIVLFIKREISELVETSMQYYENAKQLLNTPYASEKNLLKDSNSIELIKNLLDSLKEIELYTKAFKGSGKEDEKDESFYGEYTLLSDELIVLDSLYNKVRNYLTRKPFSSDKLKLNFRNAQLLDGWDISKEKDYKTILLRKEGSYYLGIVDEEENYEKLMIDLPRPNIGDQVFEKMNYKLLPNPYQMLPKVFFSNKNKEYYSPSDEILRIRDTGSFKNGKESTTFNHGDLMKFIDFYKESIKKNNDWNIFGFKFRPTVEYKNINEFYKDVSDQGYSVSFSPVSADFIRELVEDGRLYLFRLYNKDFSENSKGIPNLHTMYFRALFDEYNLSDVVYKLNGKAEMFYRDGKLCLKDTTIHTANQSIKNKNPLQKKATSTFAYDIIKDRRYTEPQFFLHLPITMNFKAEERDSLNCDVRKALRLSEKNYIIGIDRGERNLLYISVIDQDGRIIEQESMNILSVVKDDVVYETDYHDLLDRREKERDAARKSWKSIKNIKELKEGYLSGVVNRICNLVVKYDAIIAMEDLNMGFKRSRSKVEKQVYQKFEKMLIDKMNYLVDKKADINSPGGLMKAYQLTEKFTSFKNIKFQNGFIFYVPAWLTSKIDPTTGFVSLFRTHGLSEDMCREFVSAFDLITYNNAENQFEFVVNYDKFIGSEVSPKKLWTVCTNGERVETKRSKAINNNWESKEIILTDEFVKLFKEYGIDYSDGKEIKAQCLKIEKGGFLKEVVRLFALTVQMRNSIPNTDVDYLISPVRGTDGKFFDSRKGIESLPKDADANGAYNIARKALWIINRFKESSDDELLTVKIGMTQRQWLEFAQSNG

SEQ ID NO: 548 - protein, 1244 aa, unidentified
  REGION 1..1244: note = Cas Enzyme sequence
MKTFNDLTGLYSLSKTLRFELKPVGKTKDNIETKGIIAQDEKRAEEYKKVKDIIDRYHKSFIDMCLAGLVLKTTSDGNNDSLKDYVALASKSNRDEKEDKDFDDVKTVLRKHIVDAFKKGNSYGDLFKKELIQNHLPDFVTDEQEKLMVENFSKFTTYFTGFNENRKNMYSDEKKSTAIAYRLIHENLPMFIDNIKSFAKITEQEDIDFIADVEHSFKEELKGKSITQMFCLENFTETLTQGQIELYNKIVGGRVEDSGVKKQGINEYVNLYNQQHKDARLPLLKPLYKMILSDRVALSWLPEEFATDEEMLAAINETHGNLKDVLADVRELLQNINNYDTKHIYIANDKGLTDISQQIFGQYDVYTSAIKAELRNNTNHSAKEKKNPELLEKRINDIFKASKSFSIEYLNSHVDSDKTIQSYYKELGAYDRNGEQRINLLSQIELAYVDAHDVLLGKHTNLNQSEDSIKKIKALLDAYKALQHFIKPLLGNGDEADKDNEFDAKLRAIWDELDIVTPLYDKVRNRLTRKPYSTEKIKLNFDNAQLLNGWDMNKEPDCTSVLLRKDGQYYLAIMDKKSNHAFDADELPCDGECYEKMEYKQMALPMGMGAFVRKCFGTAKALGWQCPRHLMTSDGKIIIKDEEAQKVLPELIDCYKSFLDIYEKDGFKYKTFNFKFKPSSEYEKLSHFFAEVPSQGYKCSFRNVSVSFINQLVDEGKLYLFQIWNKDFSEYSKGTPNMHTLYWKMLFDERNLANVVYKLNGQAEVFYRKRSLDLDKTTIHRANQPIANKNMQNEKRESTFCYDIVKNRRYTVDKFQFHVPITINFKATGSDNINASVLDVIRNNGIEHIIGIDRGERHLLYLSLIDMKGNIVKQMTLNDIINEYKGNTYTTNYKELLQAREGDRKEARQNWQKIENIKELKEGYLSQVVHVITKMMVEYKAIVVLEDLNGGFMRGRQKIERQVYEKFEKMLIDKLNYYVDKQKDVNDNGGLLHAYQLASKFDTFKKLGKQSGCLFYIPAWNSSKIDPVTGFVNMLDTRYENADKARNFFSKFKSISYNADKDWFEFVIDDYSKFTDKAKDTRTDWVLCTYGTRIKTFRNPEKLNQWDNKEIVLTDEFKKVFMEAGIDINGNLKEAICTLTEKKHLESLMQLMKLLVQMRNSETNSEVDYLLSPVADTEGHFYDSRNCDDNLPKDADANGAYNIARKGLWAVMKIKASKPQENLKLGISNKEWLQFAQEKPYLND

SEQ ID NO: 549 - protein, 1244 aa, unidentified
  REGION 1..1244: note = Cas Enzyme sequence
MKKIDSFTGKYSLSKTLRFRLIPVGKTLENFKNKKLLDEDMTRAENYEKVKLYMDRKHKAFIDRILQAVKLENLSEYIELYYIKNKTDKQKKDIDVFENAFRKQIAAAFKNDEERKLLFGEKMIKEVLPSFLEDEEEIKIVNTFNRFTTYFTGFYENRKNMYSADSKSSSIAYRCIDENLPRFLDNAETFRKIAISLPKENFIELTEKLSLADGFIEREFLPESFNFVLSQSGIDEYNLLLGGKTLTENGEKVKGLNEYINLFNQQHNKEEKLPHFKPLRKQILSDRQSESFIPEAFSSDNELITSIKIFFEGESSDSGYRKTIENTKRLFYNLESYGLSEIFISAGADLSEFSARAAKSWSAVRDAWIKKYDRVHSDKDKKQKKYKENRDKKYKTIKSFSLSEIQSYIRNTEFDGELPYADFDIVLFIKREISELVETSMQYYENAKQLLNTPYASEKNLLKDSNSIELIKNLLDSLKEIELYTKAFKGSGKEDEKDESFYGEYTLLSDELIVLDSLYNKVRNYLTRKPFSSDKLKLNFRNAQLLDGWDISKEKDYKTILLRKEGSYYLGIVDEEENYEKLMIDLPRPNIGDQVFEKMNYKLLPNPYQMLPKVFFSNKNKEYYSPSDEILRIRDTGSFKNGKESTTFNHGDLMKFIDFYKESIKKNNDWNIFGFKFRPTVEYKNINEFYKDVSDQGYSVSFSPVSADFIRELVEDGRLYLFRLYNKDFSENSKGIPNLHTMYFRALFDEHNLSDVVYKLNGKAEMFYRDGKLCLKDTTIHTANQSIKNKNPLQKKATSTFAYDIIKDRRYTEPQFFLHLPITMNFKAEERDSLNYDVRKALRLSEKNYIIGIDRGERNLLYISVIDQDGRIVEQESMNILSVVKDDVVYETDYHDLLDRREKERDAARKSWKSIKNIKELKEGYLSGVVNRICNLVVKYDAIIAMEDLNMGFKRSRSKVEKQVYQKFEKMLIDKMNYLVDKKADINSPGGLMKAYQLTEKFTSFKNIKFQNGFIFYVPAWLTSKIDPTTGFVSLFRTHGLSEDMCREFVSAFDLITYNNAENQFEFVVNYDKFIGSEVSPKKLWTVCTNGERVETKRSKAINNNWESKEIILTDEFVKLFKEYGIDYSDGKDIKAQCLKIEKGGFLKEVVRLFALTVQMRNSIPNTDVDYLISPVRGTDGKFFDSRKGIESLPKDADANGAYNIARKALWIINRFKESSDDELSTVKICMTQRQWLEFAQSNG

SEQ ID NO: 550 - protein, 1244 aa, unidentified
  REGION 1..1244: note = Cas Enzyme sequence
MKTFNDLTGLYSLSKTLRFELKPVGKTKDNIETKGIIAQDEKRAEEYKKVKDIIDRYHKSFIDMCLAGLVLKTTSDGNNDSLKDYVALASKSNRDEKEDKDFDDVKTVLRKHIVDAFKKGNSYGDLFKKELIQNHLPDFVTDEQEKLMVENFSKFTTYFTGFNENRKNMYSDEKKSTAIAYRLIHENLPMFIDNIKSFAKITEQEDIDFIADVEHSFKEELKGKSITQMFCLENFTETLTQGQIELYNKIVGGRVEDSGVKKQGINEYVNLYNQQHKDARLPLLKPLYKMILSDRVALSWLPEELATDEEMLAAINETHGNLKDVLADVRELLQNINNYDTKHIYIANDKGLTDISQQIFGQYDVYTSAIKAELRNNTNHSAKEKKNPELLEKRINDIFKASKSFSIEYLNSHVDSDKTIQSYYKELGAYDRNGEQRINLLSQIELAYVDAHDVLLGKHTNLNQSEDSIKKIKALLDAYKALQHFIKPLLGNGDEADKDNEFDAKLRAIWDDLDIVTPLYDKVRNRLTRKPYSTEKIKLNFDNAQLLNGWDMNKEPDCTSVLLRKDGQYYLAIMDKKSNHAFDADELPCDGECYEKMEYKQMALPMGMGAFVRKCFGTAKALGWQCPRHLMTSDGKIIIKDEEAQKVLPELIDCYKSFLDIYEKDGFKYKTFNFKFKPSSEYEKLSHFFAEVPSQGYKCSFRNVSVSFINQLVDEGKLYLFQIWNKDFSEYSKGTPNMHTLYWKMLFDERNLANVVYKLNGQAEVFYRKRSLDLDKTTIHRANQPIANKNMQNEKRESTFCYDIVKNRRYTVDKFQFHVPITINFKATGSDNINASVLDVIRNNGIEHIIGIDRGERHLLYLSLIDMKGNIVKQMTLNDIINEYKGNTYTTNYKELLQAREGDRKEARQNWQKIENIKELKEGYLSQVVHVITKMMVEYKAIVVLEDLNGGFMRGRQKIERQVYEKFEKMLIDKLNYYVDKQRDANENGGLLHAYQLASKFDTFKKLGKQSGCLFYIPAWNTSKIDPVTGFVNMFDTRYENADKTRNFFSKFKSISYNADKDWFEFVIGDYSKFTDKAKDTRTDWVLCTYGTRIKTFRNPEKLNQWDNKEIVLTDEFKKVFMEAGIDINGNLKEAICTLTEKKHLESLMQLMKLLVQMRNSETNSEVDYLLSPVADTEGHFYDSRNCGDNLPKDADANGAYNIARKGLWAVMKIKASKPQENLKLGISNKEWLQFAQEKPYLND

SEQ ID NO: 551 - protein, 1244 aa, unidentified
  REGION 1..1244: note = Cas Enzyme sequence
MKTFSGFTNLYPLSKTLRFRLIPVGETLKHFIGSGILEEDQHRAESYVKVKAIIDDYHRAYIENSLSGFELPLESTGKFNSLDEYYLYHNIRNKTEDIQSSLSKVRADLRKQIVAQLTKNEVFKRIYKKELIQSDLIDFVKNEPDVNEKIALISEFRNFTVYFKGFHENRRNMYSDEEKSTSIAFRLIHENLPKFIDNMEVFAKIQNTSISENFDAIQKELCPELVTLCGMFKLGYFNKTLSQKQIDAYNTVIGGKTTSEGKKIKGLNEYINLYNQQHKQKKLPKMKLLFKQILSDRESASWLPEKFENDSQVVCAMVNFWNTIHDTVLAEGGLKTIIASLGSYGLEGIFLKNDLQLTDISQKVTGSWSKISSEIKQKIEVMNPQKKKESYESYQERIDKLFKSYKSFSLAFINECLRGEKIEDYFLKLGAVNTSSLQKENHFLHIFNAYTDIKEVIDSYSESTETKLIRDNDSIQKIKQFLDAVKDLQAYVKPLLGNGDETGKDERFYGDLIEYWSLLDLITPLYNMVRNYVTQKPYSVDKIKINFQNPTLLNGWDLNKEMDNTSVILRRDGKYYLAIMNNKSRKVFLKYPSGTDRNCYEKMEYKLLPGANKMLPKVFFSKSRINEFMPNERLLSNYEKGTHKKSGTCFSLDDCHTLIDFFKKSLDKHEDWKNFGFKFSDTSTYEDMSGFYKEVENQGYKLSFKPIDATYVDQLVDEGKIFLFQIYNKDFSEHSKGTPNMHTLYWKMLFDETNLGDVVYKLNGEAEVFFRKASINVSHPTHPANIPIKKKNLKHKDEERILKYDLIKDKRYTVDQFQFHVPITMNFKADGNGNINQKAIDYLRSASDTHIIGIDRGERNLLYLVVIDGNGKICEQFSLNEIEVEYNGEKYSTNYHDLLNVKENERKQARQSWQSIANIKDLKEGYLSQVIHKISELMVKYNAIVVLEDLNAGFMRGRQKVEKQVYQKFEKKLIEKLNYLVFKKQSSDLPGGLMHAYQLANKFESFNTLGKQSGFLFYIPAWNTSKMDPVTGFVNLFDVKYESVDKAKSFFSKFDSIRYNVERDMFEWKFNYGEFTKKAEGTKTDWTVCSYGNRIITFRNPDKNSQWDNKEINLTENIKLLFERFGIDLSSNLKDEIMQRTEKEFFIEFISLFKLVLQMRNSWTGTDIDYLVSPVCNENGKFFDSRNVDETLPQNADANGAYNIARKGMILLDKIKKSNGEKKLALSITNREWLSFTQGCCKNG

SEQ ID NO: 552 - protein, 1244 aa, unidentified
  REGION 1..1244: note = Cas Enzyme sequence
MSDLKQFIGIYPVSKTLRFELKPIGKTQEWIEKNHVLEHDWKRTEDYPKVKEMIDAYHKLCIGKSLKNMDFDWVPLRDAIERNRQEKSDESKKALEAEQTKMRNKIHDQLSKFEHYKKLNADTPSLLINHILPQEDALESFKKFATYFEGFQKNRKNIYSKEAISTGVPYRLVHDNFPKFLANIEVFENLQELCPEVIQQAATEMAPFLQGVMIEDVFTVGFYNTILTQDGIDFYNQILGGVVKDERHYQGINQLTNLYRQAHPDLTANRRSMTMVPLFKQILSDRETLSDISKPIELEEQLIDTVTSFYHRITDFTFNGNCVNIIGELATLVQSLNNYNSEGIFVSAKSLTDVSHTLYGHWNRLNEKLYEKAVEMFGDVQMAKNRKKVETYLNKDAYTLAELSFGDDISIAQYFENISGSADATNVLWLQFQSWRKTAEKPRFVHNDAGTEIVKMLLDSIMNVLHKCSTLVVSMENDLDKDFYNKFLPLYAELENVILVYNRVRNFLTQKPSSTGKIKLKFDIPSLGAGWGINKEKTNKAILLFKDGRSYLGIMNVKGTLDFDCKAEPDEPTYKKMVCINHSKPYMDLPNSFFRQTGIDKYHPSEHILKIYEAFKKDSKSVDIKEVRELIDYYKEAITRNEDWNSVSFTYSPTETYETIDDFYKEVAKQSYQVCFKDISQKLVDEWVENGLLYLFQLYNKDYAEGAHGRKNLHTLYWESLFTAENLSDIVIKLGSNAELFYRPQAIKKPVKHEVGTKILNRRDKSGMPIPDTIYRSLYQFYNGKKTEVELTAEERAYISQVIVKDVQHEIIKDRRYAKQFHYQFHVPIVFNANANEKVKFNDKVMDYLQDNPDVNIIGIDRGERHLIYLTLINQRGEILKQKTFNVVGSYNYQEKLKQREKERNEARRSWQSVGKIKDLKEGFLSAVVHEIAQMMIEYNAIVVLEDLNRGFKRGRFKVERQVYQKFEKMLIDKLNYLSFKEREITEEGGILRGFQLTEKTLNYSDIGRQTGFLFYVPPAYTSKIDPVTGFVNHFNLNDITNAEKRKAFLMKMERIEMKNGNVEFEFDYRKFKTFQTDYQNVWTVNTSGKRIIFDTETRKAKDVYPTKEIVQAFANRGIVLEEGMDLKAIIAEVEPDSKNAAFFRSLFYAFENTLRMRNSNAEAQEDYILSPVAISGKQFCTTDEANKGKDANGNWLSKLPVDADANGAYHIALKGLYLLNNPQTKKIENEKWFQFMVEKPYLE

SEQ ID NO: 553 - protein, 1244 aa, unidentified
  REGION 1..1244: note = Cas Enzyme sequence
MKDLKQFIGIYPVSKTLRFELKTVGRTQEWIERNHVLEHDWKRAEDYPKVKEMIDAYHKLCISKSLKNVDFDWVPLHDAIERNRQEKSDESKKALEAEQTKMRNKINDQLSKFEHYGELNAATPSLLINHILPQEDALDSFKKFATYFEGFQKNRKNIYSKEAISTGVPYRLVHDNFPKFLANIEVFKNLQTLCPEVIRQTATEMAPFLQGVMIEDVFTVGFYNAILTQDGIDFYNQILGGVVKDEQHYQGINQLTNLYRQAHPDLSANKKSLTMVPLFKQILSDRETLSDISKPIESEEQLIETVTCFYHRITYFTLNGNIINIISELANLTQCLNTYSPEGIFISAKSLTEASHTLYGHWNRLNEKLYEKAVELFGDVQVAKNKKKVEAYLNKDAYTLAELNFGDDVSIAQYFENISGAADATNSLWVQFQNWCNTAEKPKFVHNEAGTELVKMLLDSIMNVLHKCSALVVSMENDLDKDFYNKFLPLYAELENVILVYNRVRNFLTQKPSSTGKIKLKFDIPSLGAGWGINKEKKNKAILLFKDGRSYLGIMNVKGTLDFDDKAEPGEPTYKKMVCVNHSKPYMDLPNSFFRQTGIDKYKPSERILKIYEAFKKDSKSVDIKEVRGLIDYYKEAITRNGDWNSVSFTYSPTETYETIDDFYKEVAKQSYQVSFKDISQKLVDEWVENGQLYLFQLYNKDYAEGAHGRKNLHTLYWESLFTAENLSDIVIKLGSNAELFYRPQAIKKPVKHEVGTKMLNRRDKSGMPIPDAIYLSLYQFYNGKKEEAELTDEERAYISQVIVKDVQHEIIKDRRYTKQFHYQFHVPIVFNANANGKVKFNDKVMDYIQDNPDVNIIGIDRGERHLIYLTLINQRGEILKQKTFNVVGNYNYQEKLKQREKERKNAQKSWQDIERIKDLKEGFLSAVVHEIAQMMIEYNAIVVLEDLNRGFKRGRFKVERQVYQKFEKMLIDKLNYLSFKDREIAEEGGILRGYQLTEKTLNYSDIGRQTGFLFYIPAAYTSKIDPVTGFVNHFNLNDITNAEKRKAFLMKMERMEMKNGNVEFEFDYRKFKTFQTDYQNVWTVNTSGKRIIFDTETRKAKDVYPTKEIVQAFANRGIVLEEGMDLKAIIAEVEPDSKNAAFFRSLFYAFENTLRMRNSNAETQEDYILSPVAISGKQFCTTDEANKGKDANGNWLSKLPVDADANGAYHIALKGLYLLNNPQTKKIENEKWFHFMIEKPYIE

SEQ ID NO: 554 - protein, 1244 aa, unidentified
  REGION 1..1244: note = Cas Enzyme sequence
MKDLKQFIGIYPISKTLRFELKTVGRTQEWIERNHVLEHDWKRAEDYPKVKEMIDAYHKLCISKSLKNVDFDWVPLYDAIERNRQEKSDESKKALEAEQTKMRNKIHDQLSKFEHYKKLNADTPSLLINHILPQEDALESFKKFATYFEGFQKNRKNIYSKEAISTGVPYRLVHDNFPKFLANIEVFENLQELCPEVIQQAATEMAPFLQGVMIEDVFTVGFYNTILTQDGIDFYNQILGGVVKDERHYQGINQLTNLYRQAHPDLSANKKSLTMVPLFKQILSDRETLSDISKPIESEEQLIETVTCFYHRITYFTLNGNIINIISELANLTQCLNTYSPEGIFISAKSLTEVSHTLYGHWNRLNEKLYEKAVELFGDVQVAKNKKKVEAYLNKDAYTLAELTFSDDVSIALYFASMSGAADATNVLWTQFQSWCKTAGKPRFVHNEAGIELVKMLLDSIMNILHKCSSLVVSMENNIDKDFYNKLLPLYAELENVILVYNRVRNFLTQKPSSTGKIKLKFDIPSLGAGWGINKEKTNKAILLFKDGRSFLGIMNVKGTLDFDGKVEPGEPTYRKMVCINHSKPYMDLPNSFFRQTGIDKYKPSERILKIYEAFKNDSKSVDIKEIRELIDYYKEAITRNEDWNSVSFIYSPTETYETIDDFYKEVAKQSYQLSFKDISQKQVDEWVENGQLYLFQLYNKDYAEGAHGRKNLHTLYWESLFTAENLSNIVIKLGSNAELFYRPQAIKNPVKHEVGTKMLNRRAKSGKPIPDAVYRSLYQFYNGKKAEMELTAEERAYIGQVIVKDVQYEIVKDRRYTKQFHYQFHVPIVFNANANGKVKFNDKVMAYIQDNPDVNIIGIDRGERHLIYLTLINQRGEILKQKTFNVVGNYNYQEKLKQREKERKNAQKSWRDIERIKDLKEGFLSAVVHEIAQMMIEHNAIIVLEDLNRGFKRGRFKVERQVYQKFEKMLIDKLNYLSFKDREIAEEGGILRGYQLTEKTLNYSDIGRQTGFLFYIPAAYTSKIDPVTGFVNHFNLNDITNAEKRKAFLMKMERIEVKNGNVEFEFDYRKFKTFQTDYQNVWTVNTSGKRIVFDPETKKAKDVYPTKVIAQAFANKNIVLEEGMDLKAIITGIDADAKNASFFSTLFYAFKTTLQMRNSNAETEEDYILSPVAVSGKQFCTTDEANKGKDASGNWLSKLPIDADANGAYHIALKGLYLLNNPQTKKIENEKWFQFMIEKPYIE

SEQ ID NO: 555 - protein, 1244 aa, unidentified
  REGION 1..1244: note = Cas Enzyme sequence
MKDLKQFIGIYPVSKTLRFELKTVGRTQEWIERNHVLEHDWKRAEDYPKVKEMIDAYHKLCISKSLKNVDFDWVPLHDAIERNRQEKSDESKKALEAEQTKMRNKINDQLSKFEHYGELNAATPSLLINHILPQEDALDSFKKFATYFEGFQKNRKNIYSKEAISTGVPYRLVHDNFPKFLANIEVFENLQTLCPEVIRQTATEMAPFLQGVMIEDVFTVGFYNAILTQDGIDFYNQILGGVVKDEQHYQGINQLTNLYRQAHPDLSANKKSLTMVPLFKQILSDRETLSDISKPIESEEHLIETVTCFYHRITYFTLNGNIINIISELANLTQCLNTYSPEGIFISAKSLTEVSNTLYGHWNRLNEKLYEKAVELFGDVQVAKNKKKVEAYLNKDAYTLAELNFGDDVSIAQYFENISGAADATNSLWVQFQNWCNTAEKPKFVHNEAGTELVKMLLDSIMNVLHKCSTLVVSMENDLDKDFYNKFLPLYAELENVILVYNRVRNFLTQKPSSTGKIKLKFDIPSLGAGWGINKEKTNKAILLFKDGRSFLGIMNVKGTLDFDGKVEPGEPTYRKMVCINHSKPYMDLPNSFFRQTGIDKYKPSERILKIYEAFKNDSKSVDIKEIRELIDYYKEAITRNEDWNSVSFTYSPTETYETIDDFYKEVAKQSYQLSFKDISQKQVDEWVENGQLYLFQLYNKDYAEGAHGRKNLHTLYWESLFTVENLSNIVIKLGSNAELFYRPQAIKNPVKHEVGTKMLNRRAKSGKPIPDAIYRSLYQFYNGKKAEMELTAEERAYIGQVIVKDVQYEIVKDRRYTKQFHYQFHVPIVFNANANGKVKFNDKVMAYIQDNPDVNIIGIDRGERHLIYLTLINQRGEILKQKTFNVVGNYNYQEKLKQREKERKNAQKSWRDIERIKDLKEGFLSAVVHEIAQMMIEHNAIIVLEDLNRGFKRGRFKVERQVYQKFEKMLIDKLNYLSFKDREIANEGGILRGYQLTEMTLNYSDIGRQTGFLFYIPAAYTSKIDPVTGFVNHFNLNDISNAEKRKAFLMKMERIEVKNGNVEFEFDYRKFKTFQTDYQNVWTVNTSGKRIVFDPETRKAKDVYPTKEIAQAFANRGIVLEEGIDLKAIIAGIEPDAKNASFFKSLFYAFENTLRMRNSNAETEEDYILSPVAVSGKQFCTTDEANKGKDASGNWLSKLPIDADANGAYHIALKGLYLLNNPQTKKIENEKWFQFMIEKPYIE

SEQ ID NO: 556 - protein, 1244 aa, unidentified
  REGION 1..1244: note = Cas Enzyme sequence
MKDLKQFIGIYPVSKTLRFELKPIGKTQEWIEKNHVLEHDWKRTEDYPKVKEMIDAYHKLCIGKSLKNMDFDWVPLRDAIERNRQEKSDESKKALEAEQTKMRNKIHDQLSKFEHYKKLNADTPSLLINHILPQEDALESFKKFATYFEGFQKNRKNIYSKEAISTGVPYRLVHDNFPKFLANIEVFENLQELCPEVIQQAATEMAPFLQGVMIEDVFTVGFYNTILTQDGIDFYNQILGGVVKDERHYQGINQLTNLYRQAHPDLTANRRSMTMVPLFKQILSDRETLSDISKPIESEEQLIKTVTSFYRRITDFTLNGNCVNIISELAALAQSLNTYNPEGIFISAKSLTDVSHTLYGHWNKLNEKLYEKAVEAIGDVQVAKNKKKVEAYLNKDAYTLAELNFGDDVSIAQYFENISGAADATNSLWVQFQNWCNTAEKPKFVHNEAGTELVKMLLDSIMNVLHKCSTLVVSMENDLDKDFYNKFLPLYAELENVILVYNRVRNFLTQKPSSTGKIKLKFDIPSLGAGWGINKEKKNKAILLFKDGRSYLGIMNVKGTLDFDDKAEPGEPTYKKMVCVNHSKPYMDLPNSFFRQTGIDKYKPSERILKIYEAFKKDSKSVDIKEVRGLIDYYKEAITRNEDWNSVSFTYSPTETYETIDDFYKEVAKQSYQVSFKDISQKLVDEWVENGQLYLFQLYNKDYAEGAHGRKNLHTLYWESLFTAENLSDIVIKLGSNAELFYRPQAIKKPVKHEVGTKMLNRRDKSGMPIPDAIYLSLYQFYNGKKEEAELTDEERAYISQVIVKDVQHEIIKDRRYTKQFHYQFHVPIVFNANANGKVKFNDKVMDYIQDNPDVNIIGIDRGERHLIYLTLINQRGEILKQKTFNVVGNYNYQEKLKQREKERKNAQKSWQDIERIKDLKEGFLSAVVHEIAQMMIEYNAIVVLEDLNRGFKRGRFKVERQVYQKFEKMLIDKLNYLSFKDREIAEEGGILRGYQLTEKTLNYSDIGRQTGFLFYIPAAYTSKIDPVTGFVNHFNLNDITNAEKRKAFLMKMERMEMKNGNVEFEFDYRKFKTFQTDYQNVWTVNTSGKRIIFDTETRKAKDVYPTKEIVQAFANRGIVLEEGMDLKAIIAEVEPDSKNAAFFRSLFYAFENTLRMRNSNAETQEDYILSPVAISGKQFCTTDEANKGKDANGNWLSKLPVDADANGAYHIALKGLYLLNNPQTKKIENEKWFQFMVEKPYLE

SEQ ID NO: 557 - protein, 1244 aa, unidentified
  REGION 1..1244: note = Cas Enzyme sequence
MKDLKQFIGIYPVSKTLRFELKTVGRTQEWIERNHVLEHDWKRAEDYPKVKEMIDAYHKLCISKSLKNVDFDWVPLHDAIERNRQEKSDESKKALEAEQTKMRNKINDQLSKFEHYGELNAATPSLLINHILPQEDALDSFKKFATYFEGFQKNRKNIYSKEAISTGVPYRLVHDNFPKFLANIEVFENLQTLCPEVIRQTATEMAPFLQGVMIEDVFTVGFYNAILTQDGIDFYNQILGGVVKDEQHYQGINQLTNLYRQAHPDLSANKKSLTMVPLFKQILSDRETLSDISKPIESEEQLIETVTCFYHRITYFTLNGNIINIISELANLTQCLNTYSPEGIFISAKSLTEVSHTLYGHWNRLNEKLYEKAVELFGDVQVAKNKKKVEAYLNKDAYTLAELNFGDDVSIAQYFENISGAADATNSLWVQFQNWCNTAEKPKFVHNEAGTELVKMLLDSIMNVLHKCSTLVVSMENDLDKDFYNKFLPLYAELENVILVYNRVRNFLTQKPSSTGKIKLKFDIPSLGAGWGINKEKTNKAILLFKDGRSFLGIMNVKGTLDFDGKVEPGEPTYRKMVCINHSKPYMDLPNSFFRQTGIDKYKPSERILKIYEAFKNDSKSVDIKEIRELIDYYKEAITRNEDWNSVSFTYSPTETYETIDDFYKEVAKQSYQLSFKDISQKQVDEWVENGQLYLFQLYNKDYAEGAHGRKNLHTLYWESLFTVENLSNIVIKLGSNAELFYRPQAIKNPVKHEVGTKMLNRRAKSGKPIPDAIYRSLYQFYNGKKAEMELTAEERAYIGQVIVKDVQYEIVKDRRYTKQFHYQFHVPIVFNANANGKVKFNDKVMAYIQDNPDVNIIGIDRGERHLIYLTLINQRGEILKQKTFNVVGNYNYQEKLKQREKERKNAQKSWRDIERIKDLKEGFLSAVVHEIAQMMIEHNAIIVLEDLNRGFKRGRFKVERQVYQKFEKMLIDKLNYLSFKDREIANEGGILRGYQLTEMTLNYSDIGRQTGFLFYIPAAYTSKIDPVTGFVNHFNLNDISNAEKRKAFLMKMERIEVKNGNVEFEFDYRKFKTFQTDYQNVWTVNTSGKRIVFDPETRKAKDVYPTKEIAQAFANRGIVLEEGIDLKAIIAGIEPDAKNASFFKSLFYAFENTLRMRNSNAETEEDYILSPVAVSGKQFCTTDEANKGKDASGNWLSKLPIDADANGAYHIALKGLYLLNNPQTKKIENEKWFQFMIEKPYIE

SEQ ID NO: 558 - protein, 1244 aa, unidentified
  REGION 1..1244: note = Cas Enzyme sequence
MTDFDLFTGLYPVSKTLRFELIPQGATLEHIQSSGFLDKDQRRAESYILLKQIIDDYHKEFISRTLNGLKLIGLDEYARLFEISIKEEYEKIEFEKVKATLRKQIADRFTKHPNYKNLFTKELFRDVLKDFVRTEEELELVQEFEKFTTYFTGFHKNRENLYSNEEKATAIAYRLIHENLPRFLDNIRSFKKIYESPVREQFNILIEDSQVGPVTQVRRVEEMFQTGYFNQTLTQAGIDQYNHLIGGYAVAAGQLKIKGLNEYINLYNQTASRENRIPKLKPLYKQILSDRMTASFIPEQFAGDNEVLETIEKFYQEINEDVINKNQPGENSLKFLLANLSDYDLNRIFLRNDRGLTDISQGLCGDWSVIKSAVLNWFDLNYSGRARKGSEKYEEEQKKYLRNQDSFSIGFLNECLNLQNGNNHHSIEGYFRLLGKAGDSDDLFQRIEKNYLMVKETLNNPYPEDKNLSQDEKNVEDLKVFLDSLKDLQWFIKPLLGQGDEANKDERFYGEFTALWATLDQLTALYNKVRNYMTRKPFSTEKIKLNFENPTLLDGWDVNKERDNSGLIFTKDGLYFLGIMDKNHRRIFKADIEYTEGPCYEKMEYKLLPGANKMLPKVFFSKSRIDEFAPSSSLLRNYDNGTHKKGGNFSLKDCHELIDFYKASIEKHEDWKNFGFRFSPTSSYEDLSGFYREVEQQGYKISLRKIPADYIERMVDEGKLYLFQIYNKDFSPNSKGRPNLHTLYWKILFDPMNLEDVVYKLNGEAEVFYRKASIKEETRIIHVPDQPIPNKNGSNVKKHSRFPYEIIKDRRYTLDKFQFHVPITLNFKAKGNGNINPLVNQYLKENQDVHVIGIDRGERHLLYLTLIDRTGKIIDQFSLNQIVNEYNGQTYRTDYHQLLDLKEGNRNEARRNWKTIETIKELKEGYLSQVINKIIHLMTEYKAVVVLEDLNTGFMRSRQKVEKQVYQKFERMLIEKLNYSVDKTKPADTIGGLLRAYQLTSEFKSFKTMGKQNGFLFYVPAWNTSKMDPVTGFVNLFDTRYQNVVKAKTFFSKFNSIQFNPGKGFFEFDFDYLDFTAKGEGTRTRWTLCTNGTRIETMRNKEKNNQWDNREVNLRMEFCALFDKYGVHYQAGNEIKGFIIQQEDKSFFERLLYLFRLTLQMRNSITGTEIDYLISPVADRNGNFFDTRKVTPFLPKNADANGAYNIARKGLWALNQIRIAENPNRVKLAISNREWLEYAQNFER

SEQ ID NO: 559 - protein, 1244 aa, unidentified
  REGION 1..1244: note = Cas Enzyme sequence
MGQKKLADSFIGAYQVSKTLRFELRPVGKTLENIERDGIIDADIVRGDNYAKAKKYIDEYHRDFIQRTLENVTLDLADLEVCARLYNKKKRTAEENKALAACQKNLRGQVSDAFTKAPEYETINKKKLFTHDLPAFFRDDQEKMGVLSVFEKSTTYFTDYHKIRMNLYTAAAKQSAIGNRIVHDNLPKYARNMKAYSMLKETVIAESLDNLNTRLSEVYDDFGSIEDYFVLEGFNNVLTQTGIDKYNTIIGGYAVEGGEKIQGLNELINLYNQKNKTKLPKLSPLFKQLLSGRGTVSYIPEKIKEDSEVFDAIDAADRILTENIFECVDSETVESLFSGLAGCDLDKIYVNNGESISAISKSLYGEWYVIKNAIAHDYERRVPVKRMSPGRYAEKMEKELKKVKSYSIGELNRIMESDSREAVVEQFFSRKAEEILDAIDSAREKYYGINREKYGEGSGKHLKNCDADILKIKEFLDSLKALQDVVRPISLEDNEEAEKDDAFYEEFSRIAETLSTVTPLYDKARNYVTAKPYSDEKIKLNFGTSTLLDGWDKDLEQKYLGSIFMKDGQYFLGILNRERAGDLGEPPAAVSANVYRKMVYKQVPDPSKMLPKVFLTSKTGQETYKPSEELLEKYKKNTHKDGANFSLEDCRALIDYYKQCIAKNEKWKCFGFRFSDTASYSGMSDFYDEVSSQGYLITFRDVDADYIDRLVSEGALYLFHIYNKDFSRYSSGTPNLHTLYWKALFSPENLDHRVYKLNGGAEVFFRRASIKKEDIITHPAGIAIANKDPMNEKKESLFEYTLVKDKRYTRDKFMFHVPITINCLAGKAGKLSAFNLRVNKAIREAEDMHIIGIDRGERNLLYVSVIDIEGRIVEQMSLNEILSCGKDGKPRRRDYHELLDRREKENTAAQKNWTTINSIKELKKGYISQAVHVITELMIKYNAVVVMEDLNFGFKNGRKKIEKQVYQKIEEMLIDKLNLYANKRKGMDENGGIMKPYQLTARFTSFQALDKQSGFLYYIPAWNTSSIDPTTGFVNLLRPAYKSAEKAREFIMKMDDIRYDEETGCYAFSFDYSNFTAKAEGSKTNWTVYSYGRRIDHFRNPAKNSEWDVRYVDLTKAFDDLFAEYSVSKNTGDMREAMADVKKAEFFSRFMKLMSLTLQMRNSDEKNGIDEIVSPVKNGNGTFFVTGTDKRLPLDADANGAYNIAKKGLWAIRKIRETDEDDLENVKLAVSNREWLQFAQENTI

SEQ ID NO: 560 - protein, 1245 aa, unidentified
  REGION 1..1245: note = Cas Enzyme sequence
MQERKKISHLTHRNSVQKTIRMQLNPVGKTMDYFQAKQILENDEKLKENYQKIKDIADRFYRNLNEDVLSKTGLDKLKDYAEIYYHCNTDADRKRLDECASELRKEIVKNFKNRDEYNKLFNKKMIEIVLPKHLKNEDEKEVVASFKNFTTYFTGFFTNRKNMYSDGEESTAIAYRCINENLPKHLDNVKAFEKAISKLSKNAIDDLDATYSGLCGTNLYDVFTVDYFDFLLSQSGITEYNKIIGGYTTSDGTKVKGINEYINLYNQQVSKRDKIPNLKILYKQILSESEKVSFIPPKFEDDNELLSAVSEFYANDETLDGMPLKKAIDETKLLFGNLDNSSLNGIYIQNDRSVTNLSNSMFGSWSVIEDLWNKNYDSVNSNSRIKDIQKREDKRKKAYKAEKKLSLSFLQVLISNSENDEIREKSIVDYYKTSLMQLTDNLSDKYNEAAPLLNENYSNEKGLKNDDKSISLIKNFLDAIKEIEKFIKPLSETNITGEKNDLFYSQFTPLLDNISRIDILYDKVRNYVTQKPFSTDKIKLNFGNSQLLNGWDKDKEREYGAVLLCRDEKYYLAIIDKSNNSILENIDFQDCDESNYYEKIVYKLLTKISGNLPRVFFSEKRKKLLSPSDEILKIYKSGTFKKGDKFSLDDCHKLIDFYKESFKKYPNWLIYNFKFKKTNEYNDISEFYNDVALQGYNISKMKIPTSFIDKLVDEGKIYLFQLYNKDFSPHSKGTPNLHTLYFKMLFDERNLEDVVYRLNGEAEMFYRPASIKYDKPTHPKNTPIKNKNTLNDKKASTFPYDLIKDKRYTKWQFSLHFPITMNFKAPDKAMINDDVRNLLKSCNNNFIIGIDRGERNLLYVSVIDSNGAIIYQHSLNIIGNKFKGKTYETNYREKLATREKERTEQRRNWKAIESIKELKEGYISQAVHVICQLVVKYDAIIVMEKLTDGFKRGRTKFEKQVYQKFEKMLIVKLNYYVDKKLDPDEEGGLLHAYQLTNKLESFDKLGTQSGFIFYVRPDFTSKIDPVTGFVNLLYPRYENIDKAKDMISRFDDIRYNAGEDFFEFDIDYDKFPKTASDYRKKWTICTNGERIEAFRNPANNNEWSYRTIILAEKFKELFDNNSINYRDSDDLKAEIFSQTKGKFFEDFFKLLRLTLQMRNSNPETGEDRILSPVKDKNGNFYDSSKYDEKSKLPCDADANGAYNIARKGFWIVEQFKKADNVSTVEPVIHNDKWLKFVQENDMANN

SEQ ID NO: 561 - protein, 1245 aa, unidentified
  REGION 1..1245: note = Cas Enzyme sequence
MQERKKISHLTHRNSVQKTIRMQLNPVGKTMDYFQAKQILENDEKLKEDYQKIKEIADRFYRNLNEDVLSKTGLDKLKDYAEIYYHCNTNTDRKRLDECASELRKEIVKNFKNRDEYNKLFNKRMIEIVLPQHLKNEDEKEVVASFKNFTTYFTGFFTNRKNMYSDGEESTAIAYRCINENLPKHLDNVKAFEKAISKLSKNAIDDLDATYSGLCGTNLYDVFTVDYFNFLLPQSGITEYNKIIGGYTTSDGTKVKGINEYINLYNQQVSKRDKIPNLKILYKQILSESEKVSFIPPKFEDDNELLSAVSEFYANDETFDGMPLKKAIDETKLLFGNLDNSSLNGIYIQNDRSVTNLSNSMFGSWSVIEDLWNKNYDSVNSNSRIKDIQKREDKRKKAYKAEKKLSLSFLQVLISNSENDEIREKSIVDYYKTSLMQLTDNLSDKYNEAAPLLNENYSNEKGLKNDDKSISLIKNFLDAIKEIEKFIKPLSETNITGEKNDLFYSQFTPLLDNISRIDILYDKVRNYVTQKPFSTDKIKLNFGNSQLLNGWDRNKEKDCGAVWLCKDEKYYLAIIDKSNNSILENIDFQDCDESDCYEKIIYKLLPGPNKMLPKVFFSEKCKKLLSPSDEILKIRKNGTFKKGDKFSLDDCHKLIDFYKESFKKYPNWLIYNFKFKNTNEYNDISEFYNDVASQGYNISKMKIPTTFIDKLVDEGKIYLFQLYNKDFSPHSKGTPNLHTLYFKMLFDERNLEDVVYKLNGEAEMFYRPASIKYDKPTHPKNTPIKNKNTLNDKKASTFPYDLIKDKRYTKWQFSLHFPITMNFKAPDRAMINDDVRNLLKSCNNNFIIGIDRGERNLLYVSVIDSNGTIIYQHSLNIIGNKFKGKTYETNYREKLATREKERTEQRRNWKAIESIKELKEGYISQAVHVICQLVVKYDAIIVMEKLTDGFKRGRTKFEKQVYQKFEKMLIDKLNYYVDKKLDPDEEGGLLHAYQLTNKLESFDKLGTQSGFIFYVRPDFTSKIDPVTGFVNLLYPRYENIDKAKDMISRFDDIRYNAGEDFFEFDIDYDKFPKTASDYRKRWTICTNGERIEAFRNPANNNEWSYRTIILAEKFKELFDNNSINYRDSDDLKAEILSQTKGKFFEDFFKLLRLTLQMRNSNPETGEDRILSPVKDKNGNFYDSSKYDEKSKLPCDADANGAYNIARKGLWIVEQFKKADNVSTVEPVIHNDKWLKFVQENDMANN

SEQ ID NO: 562 - protein, 1245 aa, unidentified
  REGION 1..1245: note = Cas Enzyme sequence
MQEHKKISHLTHRNSVQKTIRMQLNPVGKTMDYFQAKQILENDEKLKEDYQKIKEIADRFYRNLNEDVLSKTGLDKLKDYAEIYYHCNTDADRKRLNKCASELRKEIVKNFKNRDEYNKLFDKRMIEIVLPKHLKNEDEKEAVASFKNFTTYFTGFFTNRKNMYSDGEESTAIAYRCINENLPKHLDNVKAFEKAISKLSKNAIDDLNATYSGLCGTNLYDVFTVDYFNFMLSQSGITEYNKIIGGYTTSDGTKVKGINEYINLYNQQVSKRDKIPNLKILYKQILSESEKVSFIPPKFEDDNELLSTVSEFYANDETFDGMPLKKAIDETKLLFGNLDNSSLNGIYIQNDRSVTNLSNSMFGSWSVIEDLWNKNYDSVNSNSRIKDIQKREDKRKKAYKAEKKLSLSFLQVLISNSENDEIREKSIVDYYKTSLMQLTDNLSDKYKEAAPLFNESYANEKGLKNDDKSISLIKNFLDAIKEIEKFIKPLSETNITGEKNDLFYSQFTPLLDNISRIDILYDKVRNYVTQKPFSTDKIKLNFGNYQLLNGWDKDKEKDCGAVWLCKDEKYYLAIIDKSNNRILENIDFQDCDESDCYEKIIYKLLPTPNKMLPKVFFAKKHKKLLSPSDEILKIYKNGTFKKGDKFSLDDCHKLIDFYKESFKKYPNWLIYNFKFKKTNEYNDISEFYNDVASQGYNISKMKIPTSFIDKLVDEGKIYLFQLYNKDFSPHSKGTPNLHTLYFKMLFDERNLEDVVYKLNGEAEMFYRPASIKYDKPTHPKNTPIKNKNTLNDKRASTFPYDLIKDKRYTKWQFSLHFPITMNFKAPDRAMINDDVRNLLKSCNNNFIIGIDRGERNLLYVSVIDSNGAIIYQHSLNIIGNKFKGKTYETNYREKLATREKDRTEQRRNWKAIESIKELKEGYISQAVHVICQLVVKYDAIIVMEKLTDGFKRGRTKFEKQVYQKFEKMLIYKLNYYVDKKLDPDEEGGLLHAYQLTNKLESFDKLGTQSGFIFYVRPDFTSKIDPVTGFVNLLYPRYENIDKAKDMISRFDEIRYNAGEDFFEFDIDYDKFPKTASDYRKKWTICTNGERIEAFRNPANNNEWSYRTIILAEKFKELFDNNSINYRDSDDLKAEILSQTKGKFFEDFFKLLRLTLQMRNSNPETGEDRILSPVKDKNGNFYDSSKYDEKSKLPCDADANGAYNIARKGLWIVEQFKKADNVSTVEPVIHNDKWLKFVQENDMANN

SEQ ID NO: 563 - protein, 1245 aa, unidentified
  REGION 1..1245: note = Cas Enzyme sequence
METFSGFTNLYPLSKTLRFRLIPVGETLKYFIGSGILEEDQHRAESYVKVKAIIDDYHRAYIENSLSGFELPLESTGKFNSLEEYYLYHNIRNKTEEIQNLSSKVRTNLRKQVVAQLTKNEIFKRIDKKELIQSDLIDFVKNEPDANEKIALISEFRNFTVYFKGFHENRRNMYSDEEKSTSIAFRLIHENLPKFIDNMEVFAKIQNTSISENFDAIQKELCPELVTLCEMFKLGYFNKTLSQKQIDAYNTVIGGKTTSEGKKIKGLNEYINLYNQQHKQEKLPKMKLLFKQILSDRESASWLPEKFENDSQVVGAIVNFWNTIHDTVLAEGGLKTIIASLGSYGLEGIFLKNDLQLTDISQKATGSWGKISSEIKQKIEVMNPQKKKESYETYQERIDKIFKSYKSFSLAFINECLRGEYKIEDYFLKLGAVNSSSLQKENHFSHILNTYTDVKEVIGLYSESTDTKLIQDNDSIQKIKQFLDAVKDLQAYVKPLLGNGDETGKDERFYGDLIEYWSLLDLITPLYNMVRNYVTQKPYSVDKIKINFQNPTLLNGWDLNKETDNTSVILRRDGKYYLAIMNNKSRKVFLKYPSGTDRNCYEKMEYKLLPGANKMLPKVFFSKSRINEFMPNERLLSNYEKGTHKKSGTCFSLDDCHTLIDFFKKSLDKHEDWKNFGFKFSDTSTYEDMSGFYKEVENQGYKLSFKPIDATYVDQLVDEGKIFLFQIYNKDFSEHSKGTPNMHTLYWKMLFDETNLGDVVYKLNGEAEVFFRKASINVSHPTHPANIPIKKKNLKHKDEERILKYDLIKDKRYTVDQFQFHVPITMNFKADGNGNINQKAIDYLRSASDTHIIGIDRGERNLLYLVVIDGNGKICEQFSLNEIEVEYNGEKYSTNYHDLLNVKENERKQARQSWQSIANIKDLKEGYLSQVIHKISELMVKYNAIVVLEDLNAGFMRGRQKVEKQVYQKFEKKLIEKLNYLVFKKQSSDLPGGLMHAYQLANKFESFNTLGKQSGFLFYIPAWNTSKMDPVTGFVNLFDVKYESVDKAKSFFSKFDSIRYNVERDMFEWKFNYGEFTKKAEGTKTDWTVCSYGNRIITFRNPDKNSQWDNKEINLTENIKLLFERFGIDLSSNLKDEIMQRTEKEFFIELISLFKLVLQMRNSWTGTDIDYLVSPVCNENGEFFDSRNVDETLPQNADANGAYNIARKGMILLDKIKKSNGEKKLALSITNREWLSFAQGCCKNG

SEQ ID NO: 564 - protein, 1245 aa, unidentified
  REGION 1..1245: note = Cas Enzyme sequence
MQERKKISHLTHRNSVQKTIRMQLNPVGKTMDYFQAKQILENDEKLKEDYQKIKEIADRFYRNLNEDVLSKTGLDKLKDYAEIYYHCNTNADRKRLNKCASELRKEIVKNFKNRDEYNKLFDKRMIEIVLPKHLKNEDEKEVVASFKNFTTYFTGFFTNRKNMYSDGEESTAIAYRCINENLPKHLDNVKAFEKAISKLSKNAIDDLDATYSGLCGTNLYDVFTVDYFNFLLPQSGITEYNKIIGGYTTSDGTKVKGINEYINLYNQQVSKRDKIPNLQILYKQILSESEKVSFIPPKFEDDNELLSAVSEFYANDETFDGMPLKKAIDETKLLFGNLDNSSLNGIYIQNDRSVTNLSNSMFGSWSVIEDLWNKNYDSVNSNSRIKDIQKREDKRKKAYKAEKKLSLSFLQVLISNSENDEIREKSIVDYYKTSLMQLTDNLSDKYKEAAPLFSENYDNEKGLKNDDKSISLIKNFLDAIKEIEKFIKPLSETNITGEKNDLFYSQFTPLLDNISRIDILYDKVRNYVTQKPFSTDKIKLNFGNSQLLNGWDRNKEKDCGAVWLCKDEKYYLAIIDKSNNSILENIDFQDCDESDCYEKIIYKLLPGPNKMLPKVFFSEKCKKLLSPSDEILKIRKNGTFKKGDKFSLDDCHKLIDFYKESFKKYPNWLIYNFKFKKTNEYNDISEFYNDVASQGYNISKMKIPTSFIDKLVDEGKIYLFQLYNKDFSPHSKGTPNLHTLYFKMLFDERNLEDVVYKLNGEAEMFYRPASIKYDKPTHPKNAPIKNKNTLNDKKTSTFPYDLIKDKRYTKWQFSLHFPITMNFKSPDRAMINDDVRNLLKSCNNNFIIGIDRGERNLLYVSVIDSNGAIIYQHSLNIIGNKFKGKTYETNYQEKLATREKERTEQRRNWKAIESIKELKEGYISQAVHVICQLVVKYDAIIVMEKLTDGFKRGRTKFEKQVYQKFEKMLIDKLNYYVDKKLDPDEEGGLLHAYQLTNKLESFDKLGMQSGFIFYVRPDFTSKIDPVTGFVNLLYPRYENIDKAKDMISRFDDIRYNAGEDFFEFDIDYDKFPKTASDYRKKWTICTNGERIEAFRNPASNNEWSYRTIILAEKFKELFDNNSINYRDSDNLKAEILSQTKGKFFEDFFKLLRLTLQMRNSNPETGEDRILSPVKDKNGNFYDSSKYDEKSNLPCDADANGAYNIARKGLWIVEQFKKSDNVSTVEPVIHNDKWLKFVQENDMANN

SEQ ID NO: 565 - protein, 1245 aa, unidentified
  REGION 1..1245: note = Cas Enzyme sequence
MQEHKKISHLTHRNSVQKTIRMQLNPVGKTMDYFQAKQILENDEKLKEDYQKIKEIADRFYRNLNEDVLSKTGLDKLKDYAEIYYHCNTDADRKRLDECASELRKEIVKNFKNRDEYNKLFNKKMIEIVLPQHLKNEDEKEVVASFKNFTTYFTGFFTNRKNMYSDGEESTAIAYRCINENLPKHLDNVKAFEKAISKLSKNAVDDLDTTYSGLCGTNLYDVFTVDYFNFLLPQSGITEYNKIIGGYTTSDGTKVKGINEYINLYNQQVSKRYKIPNLKILYKQILSESEKVSFIPPKFEDDNELLSAVSEFYANDETFDGMPLKKAIDETKLLFGNLDNSSLNGIYIQNDRSVTNLSNSMFGSWSVIEDLWNKNYDSVNSNSRIKDIQKREDKRKKAYKAEKKLSLSFLQVLISNSENDEIREKSIVDYYKTSLMQLTDNLSDKYNEAAPLFSENYDNEKGLKNDDKSISLIKNFLDAIKEIEKFIKPLSETNITGEKNDLFYSQFTPLLDNISRIDILYDKVRNYVTQKPFSTDKIKLNFGNSQLLNGWDKDKEREYGAVLLCKDEKYYLAIIDKSNNSILENIDFQDCNESDYYEKIVYKLLTKINGNLPRVFFSEKRKELSSPSDEILKIYKSGTFKKGDKFSLDDCHKLIDFYKESFKKYPNWLIYNFKFKNTTEYNDISEFYNDVALQGYNISKMKIPTSFIDKLVDEGKIYLFQLYNKDFSPHSKGTPNLHTLYFKMLFDERNLEDVVYRLNGEAEMFYRPASIKYDKPTHPKNTPIKNKNTLNDKKASTFPYDLIKDKRYTKWQFSLHFPITMNFKAPDRAMINDDVRNLLKSCNNNFIIGIDRGERNLLYVSVIDSNGAIIYQHSLNIIGNKFKGKTYETNYREKLATREKDRTEQRRNWKAIESIKELKEGYISQAVHVICQLVVKYDAIIVMEKLTDGFKRGRTKFEKQVYQKFEKMLIDKLNYYVDKKLDPDEEGGLLHAYQLTNKLESFDKLGMQSGFIFYVRPDFTSKIDPVTGFVNLLYPRYENIDKAKDMISRFDDIRYNAGEDFFEFDIDYDKFPKTASDYRKKWTICTNGERIEAFRNPASNNEWSYRTIILAEKFKELFDNNSINYRDSDNLKAEILSQTKGKFFEDFFKLLRLTLQMRNSNPETGEDRILSPVKDKNGNFYDSSKYDEKSNLPCDADANGAYNIARKGLWIVEQFQKADNVSAVEPVIHNDKWLKFVQENDMANN

SEQ ID NO: 566 - protein, 1245 aa, unidentified
  REGION 1..1245: note = Cas Enzyme sequence
MQERKKISHLTHRNSVQKTIRMQLNPVGKTMDYFQAKQILENDEKLKENYQKIKDIADRFYRNLNEDVLSKTGLDKLKDYAEIYYHCNTDADRKRLDECASELRKEIVKNFKNRDEYNKLFNKKMIEIVLPKHLKNEDEKEVVASFKNFTTYFTGFFTNRKNMYSDGEESTAIAYRCINENLPKHLDNVKAFEKAISKLSKNAIDDLDATYSGLCGTNLYDVFTVDYFDFLLSQSGITEYNKIIGGYTTSDGTKVKGINEYINLYNQQVSKRDKIPNLKILYKQILSESEKVSFIPPKFEDDNELLSAVSEFYANDETLDGMPLKKAIDETKLLFGNLDNSSLNGIYIQNDRSVTNLSNSMFGSWSVIEDLWNKNYDSVNSNSRIKDIQKREDKRKKAYKAEKKLSLSFLQVLISNSENDEIREKSIVDYYKTSLMQLTDNLSDKYNEAAPLLNENYSNEKGLKNDDKSISLIKNFLDAIKEIEKFIKPLSETNITGEKNDLFYSQFTPLLDNISRIDILYDKVRNYVTQKPFSTDKIKLNFGNSQLLNGWDKDKEREYGAVLLCRDEKYYLAIIDKSNNSILENIDFQDCDESNYYEKIVYKLLTKISGNLPRVFFSEKRKKLLSPSDEILKIYKSGTFKKGDKFSLDDCHKLIDFYKESFKKYPNWLIYNFKFKKTNEYNDISEFYNDVALQGYNISKMKIPTSFIDKLVDEGKIYLFQLYNKDFSPHSKGTPNLHTLYFKMLFDERNLEDVVYRLNGEAEMFYRPASIKYDKPTHPKNTPIKNKNTLNDKKASTFPYDLIKDKRYTKWQFSLHFPITMNFKAPDKAMINDDVRNLLKSCNNNFIIGIDRGERNLLYVSVIDSNGAIIYQHSLNIIGNKFKGKTYETNYREKLATREKERTEQRRNWKAIESIKELKEGYISQAVHVICQLVVKYDAIIVMEKLTDGFKRGRTKFEKQVYQKFEKMLIVKLNYYVDKKLDPDEEGGLLHAYQLTNKLESFDKLGTQSGFIFYVRPDFTSKIDPVTGFVNLLYPRYENIDKAKDMISRFDDIRYNAGEDFFEFDIDYDKFPKTASDYRKKWTICTNGERIEAFRNPANNNEWSYRTIILAEKFKELFDNNSINYRDSDDLKAEIFSQTKGKFFEDFFKLLRLTLQMRNSNPETGEDRILSPVKDKNGNFYDSSKYDEKSKLPCDADANGAYNIARKGLWIVEQFKKADNVSTVEPVIHNDKWLKFVQENDMANN

SEQ ID NO: 567 - protein, 1245 aa, unidentified
  REGION 1..1245: note = Cas Enzyme sequence
MQEHKKISHLTHRNSVQKTIRMQLNPVGKTMDYFQAKQILENDEKLKEDYQKIKEIADRFYRNLNEDVLSKTGLDKLKDYAEIYYHCNTDADRKRLDECASELRKEIVKNFKNRDEYNKLFNKKMIEIVLPQHLKNEDEKEVVASFKNFTTYFTGFFTNRKNMYSDGEESTAIAYRCINENLPKHLDNVKAFEKAISKLSKNAVDDLDTTYSGLCGTNLYDVFTVDYFNFLLPQSGITEYNKIIGGYTTSDGTKVKGINEYINLYNQQVSKRYKIPNLKILYKQILSESEKVSFIPPKFEDDNELLSAVSEFYANDETFDGMPLKKAIDETKLLFGNLDNSSLNGIYIQNDRSVTNLSNSMFGSWSVIEDLWNKNYDSVNSNSRIKDIQKREDKRKKAYKAEKKLSLSFLQVLISNSENDEIREKSIVDYYKTSLMQLTDNLSDKYKEAAPLFNESYANEKGLKNDDKSISLIKNFLDAIKEIEKFIKPLSETNITGEKNDLFYSQFTPLLDNISRIDILYDKVRNYVTQKPFSTDKIKLNFGNSQLLNGWDRNKEKDCGAVWLCKDEKYYLAIIDKSNNSILENIDFQDCDESDCYEKIIYKLLPGPNKMLPKVFFSEKCKKLLSPSDEILKIRKNGTFKKGDKFSLDDCHKLIDFYKESFKKYPNWLIYNFKFKKTNEYNDISEFYNDVASQGYNISKMKIPTSFIDKLVDEGKIYLFQLYNKDFSPHSKGTPNLHTLYFKMLFDERNLEDVVYKLNGEAEMFYRPASIKYDKPTHPKNTPIKNKNTLNDKRASTFPYDLIKDKRYTKWQFSLHFPITMNFKAPDRAMINDDVRNLLKSCNNNFIIGIDRGERNLLYVSVIDSNGAIIYQHSLNIIGNKFKGKTYETNYREKLATREKDRTEQRRNWKAIESIKELKEGYISQAVHVICQLVVKYDAIIVMEKLTDGFKRGRTKFEKQVYQKFEKMLIDKLNYYVDKKLDPDEEGGLLHAYQLTNKLDSFDKLGMQSGFIFYVRPDFTSKIDPVTGFVNLLYPRYENIDKAKDMISRFDEIRYNACEDFFEFDIDYDKFPKTASDYRKKWTICTNGERIETFRNPANNNEWSYRTIILAEKFKELFDNNSINYRDSDDLKAEILSQTKGKFFEDFFKLLRLTLQMRNSNPETGEDRILSPVKDKNGNFYDSSKYDEKSKLPCDADANGAYNIARKGLWIVEQFQKADNVSAVEPVIHNDKWLKFVQENDMANN

SEQ ID NO: 568 - protein, 1245 aa, unidentified
  REGION 1..1245: note = Cas Enzyme sequence
MQERKKISHLTHRNSVQKTIRMQLNPVGKTMDYFQAKQILENDEKLKENYQKIKEIADRFYRNLNEDVLSKTRLDKLKDYADIYYHCNTDADRKRLNECASELRKEIVKNFKNRDEYNKLFNKKMIEIVLPKHLKNEDEKEVVASFKNFTTYFTGFFTNRKNMYSDGEESTAIAYRCINENLPKHLDNVKAFEKAISKLSKNAIDDLDATYSGLCGTNLYDVFTVDYFDFLLSQSGITEYNKIIGGYTTSDGTKVKGINEYINLYNQQVSKRDKIPNLKILYKQILSESEKVSFIPPKFEDDNELLSAVSEFYANDETFDGMPLKKAIDETKLLFSNLDNSSLNGIYIQNDRSVTNLSNSMFGSWSVIEDLWNKNYDSVNSNSRIKDIQKREDKRKKAYKAEKKLSLSFLQVLISNSENNEIRKKSIVDYYKTSLMQLTDNLSDKYKEAAPLFSENYDNEKGLKNDDKSISLIKNFLDAIKEIEKFIKPLSETNITGEKNDLFYSQFTPLLDNISRIDILYDKVRNYVTQKPFSTDKVKLNFGNSQLLNGWDRNKEKDCGAVWLCKDEKYYLAIIDKSNNSILENIDFQDCDESDCYEKIIYKLLPGPNKMLPKVFFSEKCKKLLSPSDEILKIRKNGTFKKGDKFSLDDCHKLIDFYKESFKKYPNWLIYNFKFKKTNEYNDIREFYNDVASQGYNISKMKIPTSFIDKLVDEGKIYLFQLYNKDFSPHSKGTPNLHTLYFKMLFDERNLEDVVYKLNGEAEMFYRPASIKYDKPTHPKNTPIKNKNTLNDKKASTFPYDLIKDKRYTKWQFSLHFPITMNFKAPDRAMINDDVRNLLKSCNNNFIIGIDRGERNLLYVSVIDSNGAIIYQHSLNIIGNKFKGKTYETNYQEKLATREKERTEQRRNWKAIESIKELKEGYISQAVHVICQLVVKYDAIIVMEKLTDGFKRGRTKFEKQVYQKFEKMLIDKLNYYVDKKLDPDEEGGLLHAYQLTNKLESFDKLGTQSGFIFYVRPDFTSKIDPVTGFVNLLYPRYENIDKAKDMISRFDDIRYNAGEDFFEFDIDYDKFPKTASDYRKKWTICTNGERIEAFRNPANNNEWSYRTIILAEKFKELFDNNSINYRDSDDLKAEILSQTKGKFFEDFFKLLRLTLQMRNSNPETGDDRILSPVKDKNGNFYDSSKYDEKSKLPCDADANGAYNIARKGLWIVEQFKKSDNVSTVEPVIHNDKWLKFVQENDMANN

SEQ ID NO: 569 - protein, 1245 aa, unidentified
  REGION 1..1245: note = Cas Enzyme sequence
MQERKKISHLTHRNSVKKTIRMQLNPVGKTMDYFQAKQILENDEKLKENYQKIKEIADRFYRNLNEDVLSKTGLDKLKDYAEIYYHCNTDADRKRLNKCASELRKEIVKNFKNRDEYNKLFDKRMIEIVLPKHLKNEDEKEVVASFKNFTTYFTGFFTNRKNMYSDGEESTAIAYRCINENLPKHLDNVKAFEKAISKLSKNAIDDLDATYSGLCGTNLYDVFTVDYFNFLLPQSGITEYNKIIGGYTTNDGTKVKGINEYINLYNQQVSKRDKIPNLQILYKQILSESEKVSFIPPKFEDDNELLSAVSEFYANDETFDGMPLKKAIDETKLLFGNLDNSSLNGIYIQNDRSVTNLSNSMFGSWSVIEDLWNKNYDSVNSNSRIKDIQKREDKRKKAYKAEKKLSLSFLQVLISNSENDEIRKKSIVDYYKTSLMQLTDNLSDKYNEAAPLLNENYSNEKGLKNDDKSISLIKNFLDAIKEIEKFIKPLSETNITGEKNDLFYSQFTPLLDNISRIDILYDKVRNYVTQKPFSTDKIKLNFGNYQLLNGWDKDKEREYGAVLLCKDEKYYLAIIDKSNNRILENIDFQDCDESDCYEKIIYKLLPTPNKMLPKVFFAKKHKKLLSPSDEILKIYKNGTFKKGDKFSLDDCHKLIDFYKESFKKYPKWLIYNFKFKKTNGYNDIREFYNDVALQGYNISKMKIPTSFIDKLVDEGKIYLFQLYNKDFSPHSKGTPNLHTLYFKMLFDERNLEDVVYRLNGEAEMFYRPASIKYDKPTHPKNTPIKNKNTLNDKRASTFPYDLIKDKRYTKWQFSLHFPITMNFKDPDKAMINDDVRNLLKSCNNNFIIGIDRGERNLLYVSVINSNGAIIYQHSLNIIGNKFKGKTYETNYREKLATREKDRTEQRRNWKAIESIKELKEGYISQAVHVICQLVVKYDAIIVMEKLTDGFKRGRTKFEKQVYQKFEKMLIDKLNYYVDKKLDPDEEGGLLHAYQLTNKLESFDKLGTQSGFIFYVRPDFTSKIDPVTGFVNLLYPRYEKIDKAKDMISRFDDIRYNAGEDFFEFDIDYDKFPKTASDYRKKWTICTNGERIEAFRNPANNNEWSYRTIILAEKFKELFDNNSINYRDSDDLKAEILSQTKGKFFEDFFKLLRLTLQMRNSNPETGEDRILSPVKDKNGNFYDSSKYDEKSKLPCDADANGAYNIARKGLWIVEQFKKADNVSTVEPVIHNDKWLKFVQENDMANN

SEQ ID NO: 570 - protein, 1245 aa, unidentified
  REGION 1..1245: note = Cas Enzyme sequence
MQEHKKISHLTHRNSVQKTIRMQLNPVGKTMDYFQAKQILENDEKLKEDYQKIKEIADRFYRNLNEDVLSKTGLDKLKDYADIYYHCNTDADRKRLDECASELRKEIVKNFKNRDEYNKLFNKKMIEIVLPKHLKNEDEKEVVASFKNFTTYFTGFFTNRKNMYSDGEESTAIAYRCINENLPKHLDNVKAFEKAISKLSKNAIDDLDATYSGLCGTNLYDVFTVDYFNFLLPQSGITEYNKIIGGYTTSDGTKVKGINEYINLYNQQVSKRDKIPNLKILYKQILSESEKVSFIPPKFEDDNELLSAVSEFYANDETFDGMPLKKAIDETKLLFGNLDNSSLNGIYIQNDRSVTNLSNSMFGSWSVIEDLWNKNYDSVNSNSRIKDIQKREDKRKKAYKAEKKLSLSFLQVLISNSGNDEIRKKSIVDYYKTSLMQLTDNLSDKYNEAAPLFSENYDNEKGLKNDDKSISLIKNFLDAIKEIEKFIKPLSETNITGEKNDLFYSQFTPLLDNISRIDILYDKVRNYVTQKPFSTDKIKLNFGNSQLLNGWDRNKEKDCGAVWLCKDEKYYLAIIDKSNNSILENIDFQDCDESDCYEKIIYKLLPGPNKMLPKVFFSEKCKKLLSPSDEILKIYKSGTFKKGDKFSLDDCHKLIDFYKESFKKYPNWLIYNFKFKNTNEYNDISEFYNDVALQGYNISKMKIPTTFIDKLVDEGKIYLFQLYNKDFSPHSKGTPNLHTLYFKMLFDERNLEDVVYKLNGEAEMFYRPASIKYDKPTHPKNTPIKNKNTLNDKKASTFPYDLIKDKRYTKWQFSLHFPITMNFKAPDKAMINDDVRNLLKSCNNNFIIGIDRGERNLLYVSVIDSNGAIIYQHSLNIIGNKFKGKTYETNYQEKLATREKERTEQRRNWKAIESIKELKEGYISQAVHVICQLVVKYDAIIVMEKLTDGFKRGRTKFEKQVYQKFEKMLIDKLNYYVDKKLNPDEEGGLLHAYQLTNKLESFDKLGTQSGFIFYVRPDFTSKIDPVTGFVNLLYPRYENIDKAKDMISRFDDIRYNAGEDFFEFDIDYDKFPKTASDYRKKWTICTNGERIEAFRNPANNNEWSYRTIILAEKFKELFDNNSINYRDSDDLKAEILSQTKGKFFEDFFKLLRLTLQMRNSNPETGEDRILSPVKDKNGNFYDSSKYDEKSKLPCDADANGAYNIARKGLWIVEQFKKADNVSTVEPVIHNDQWLKFVQENDMANN

SEQ ID NO: 571 - protein, 1245 aa, unidentified
  REGION 1..1245: note = Cas Enzyme sequence
MQERKKISHLTHRNSVQKTIRMQLNPVGKTMDYFQAKQILENDEKLKEDYQKIKEIADRFYRNLNEDVLSKTRLDKLKDYADIYYHCNTDADRKKLDECASELRKEIVKNFKNRDEYNKLFNKKMIEIVLPKHLKNEDEKEVVASFKNFTTYFTGFFTNRKNMYSDGEESTAIAYRCINENLPKHLDNVKAFEKAISKLSKNAIDDLDATYSGLCGTNLYDVFTVDCFNFLLPQSGITEYNKIIGGYTTSDGTKVKGINEYINLYNQQVSKRDKIPNLKILYKQILSESEKVSFIPPKFEDDNELLSAVSEFYANDETFDGMPLKKAIDETKLLFGNLDNSSLNGIYIQNDRSVTNLSNSMFGSWSVIEDLWNKNYDSVNSNSRIKDIQKREDKRKKAYKAEKKLSLSFLQVLISNSENDEIREKSIVDYYKTSLMQLTDNLSDKYNEAAPLLNENYSNEKGLKNDDKSISLIKNFLDAIKEIEKFIKPLSETNITGEKNDLFYSQFTPLLDNISRIDILYDKVRNYVTQKPFSTDKIKLNFGNSQLLNGWDKDKEREYGAVLLCRDEKYYLAIIDKSNNSILENIDFQDCDESNYYEKIVYKLLTKISGNLPRVFFSEKRKKLLSPSDEILKIYKSGTFKKGDKFSLDDCHKLIDFYKESFKKYPKWLIYNFKFKKTNEYNDISEFYNDVALQGYNISKLKIPTSFIDKLVDEGKIYLFQLYNKDFSPHSKGTPNLHTLYFKMLFDERNLEDVVYRLNGEAEMFYRPASIKYDKPTHPKNTPIKNKNTLNDKKASTFPYDLIKDKRYTKWQFSLHFPITMNFKAPDKAMINDDVRNLLKSCNNNFIIGIDRGERNLLYVSVIDSNGAIIYQHSLNIIGNKFKGKTYGTNYREKLATREKDRTEQRRNWKAIESIKELKEGYISQAVHVICQLVVKYDAIIVMEKLTDGFKRGRTKFEKQVYQKFEKMLIDKLNYYVDKKLDPDEEGGLLHAYQLTNKLDSFDKLGTQSGFIFYVRPDFTSKIDPVTGFVNLLYPRYENIDKAKDMISRFDEIRYNAGEDFFEFDIDYNKFPKTASDYRKKWTICTNGERIEAFRNPANNNEWSYRTIILAEKFKELFDNNSINYRDSDDLKAEILSQTKGKFFEDFFKLLRLTLQMRNSNPETGEDRILSPVKDKNGNFYDSSKYDEKSKLPCDADANGAYNIARKGLWIVEQFKKSDNVSTVEPVIHNDKWLKFVQENDMANN

SEQ ID NO: 572 - protein, 1245 aa, unidentified
  REGION 1..1245: note = Cas Enzyme sequence
MQEHKKISHLTHRNSVQKTIRMQLNPVGKTMDYFQAKQILENDEKLKENYQKIKEIADRFYRNLNEDVLSKTGLDKLKDYADIYYHCNTDADRKRLNECASELRKEIVKNFKNRDEYNKLFNKKMIEIVLPKHLKNEDEKEVVASFKNFTTYFTGFFTNRKNMYSDGEESTAIAYRCINENLPKHLDNVKVFEKAISKLSKNAIDDLDATYSGLCGTNLYDVFTVDYFNFLLPQSGITEYNKIIGGYTTNDGTKVKGINEYINLYNQQVSKRDKIPNLKILYKQILSESEKVSFIPPKFEDDNELLSAVSEFYANDETFDGMPLKKAIDETKLLFGNLDNSSLNGIYIQNDRSVTNLSNSMFGSWSVIEDLWNKNYDSVNSNSRIKDIQKREDKRKKAYKAEKKLSLSFLQVLISNSENDEIREKSIVDYYKTSLMQLTDNLSDKYKEAAPLFNESYANEKGLKNDDKSISLIKNFLDAIKEIEKFIKPLSETNITGEKNDLFYSQFTPLLDNISRIDILYDKVRNYVTQKPFSTDKIKLNFGNSQLLNGWDRNKEKDCGAVWLCKDEKYYLAIIDKSNNSILENIDFQDCDESDCYEKIIYKLLPGPNKMLPKVFFSEKCKKLLSPSDEILKIRKNGTFKKGDKFSLDDCHKLIDFYKESFKKYPNWLIYNFKFKKTNEYNDISEFYNDVASQGYNISKMKIPTSFIDKLVDEGKIYLFQLYNKDFSPHSKGTPNLHTLYFKMLFDERNLEDVVYKLNGEAEMFYRPASIKYDKPTHPKNTPIKNKNTLNDKRASTFPYDLIKDKRYTKWQFSLHFPITMNFKAPDKAMINDDVRNLLKSCNNNFIIGIDRGERNLLYVSVIDSNGAIIYQHSLNIIGNKFKGKTYETNYREKLATREKERTEQRRNWKAIENIKELKEGYISQAVHVICQLVVKYDAIIVMEKLTDGFKRGRTKFEKQVYQKFEKMLIDKLNYYVDKKLDPDEEGGLLHAYQLTNKLESFDKLGTQSGFIFYVRPDFTSKIDPVTGFVNLLYPRYENIDKAKDMISRFDDIKYNAGEDFFEFDIDYDKFPKTASDYRKKWTICTNGERIEAFRNPASNNEWSYRTIILAEKFKELFDNNSINYRDSDDLKAEILSQTKGKFFEDFFKLLRLTLQMRNSNPETGEDRILSPVKDKNGNFYDSSKYDEKSKLPCDADANGAYNIARKGLWIVEQFKKADNVSAVEPVIHNDKWLKFVQENDMANN

SEQ ID NO: 573 - protein, 1245 aa, unidentified
  REGION 1..1245: note = Cas Enzyme sequence
MQERKKISHLTHRNSVQKTIRMQLNPVGKTMDYFQAKQILENDEKLKEDYQKIKEIADRFYRNLNEDVLSKTGLDKLKDYADIYYHCNTDADLKRLNECASELRKEIVKNFKNRDEYNKLFNKKMIEIVLPKHLKNEDEKEVVASFKNFTTYFTGFFTNRKNMYSDGEESTAIAYRCINENLPKHLDNVKAFEKAISKLSKNAIDDLDATYSGLCGTNLYDVFTVDYFNFLLPQSGITEYNKIIGGYTTSDGTKVKGINEYINLYNQQVSKRDKIPNLKILYKQILSESEKVSFIPPKFEDDNELLSAVSEFYANDETFDGMPLKKAIDETKLLFGNLDNSSLNGIYIQNDRSVTNLSNSMFGSWSVIEDLWNKNYDSVNLNSRIKDIQKREDKRKKAYKAEKKLSLSFLQVLISNSENDEIRKKSIVDYYKTSLMQLTDNLSDKYKEAAPLLSENYSNEKGLKNDDKSISLIKNFLDAIKEIEKFIKPLSETNITGEKNDLFYSQFTPLLDNISRIDILYDKVRNYVTQKPFSTDKIKLNFGNSQLLNGWDRNKEKDCGAVWLCKDEKYYLAIIDKSNNSILENIDFQDCDESDCYEKIIYKLLPGPNKMLPKVFFSEKCKKLLSPSDEILKIRKNGTFKKGDKFSLDDCHKLIDFYKESFKKYPNWLIYNFKFKNTNEYNDISEFYNDVASQGYNISKMKIPTSFIDKLVDEGKIYLFQLYNKDFSPHSKGTPNLHTLYFKMLFDERNLEDVVYKLNGEAEMFYRPASIKYDKPTHPKNTPIKNKNTLNDKKASTFPYDLIKDKRYTKWQFSLHFPITMNFKAPDRAMINNDVRNLLKSCNNNFIIGIDRGERNLLYVSVIDSNGAIIYQHSLNIIGNKFKGKTYETNYREKLATREKERTEQRRNWKAIESIKELKEGYISQAVHVICQLVVKYDAIIVMEKLTDGFKRGRTKFEKQVYQKFEKMLIDKLNYYVDKKLDPDEEGGLLHAYQLTNKLESFDKLGTQSGFIFYVRPDFTSKIDPVTGFVNLLYPRYENIDKAKDMISRFDDIRYNAGEDFFEFDIDYDKFPKTASDYRKKWTICTNGERIEAFRNPANNNEWSYRTIILAEKFKELFDNNSINYRDSDDLKAEILSQTKGKFFEDFFKLLRLTLQMRNSNPETGEDRILSPVKDKNGNFYDSSKYDEKSKLPCDADANGGYNIARKGLWIVEQFKKADNVSTVEPVIHNDQWLKFVQENDMANN

SEQ ID NO: 574 - protein, 1245 aa, unidentified
  REGION 1..1245: note = Cas Enzyme sequence
MQEHKKISHLTHRNSVQKTIRMQLNPVGKTMDYFQAKQILENDEKLKEDYQKIKEIADRFYRNLNEDVLSKTGLDKLKDYAEIYYHCNTDADRKRLDECASELRKEIVKNFKNRDEYNKLFNKKMIEIVLPQHLKNEDEKEVVASFKNFTTYFTGFFTNRKNMYSDGEESTAIAYRCINENLPKHLDNVKAFEKAISKLSKNAVDDLDTTYSGLCGTNLYDVFTVDYFNFLLPQSGITEYNKIIGGYTTSDGTKVKGINEYINLYNQQVSKRYKIPNLKILYKQILSESEKVSFIPPKFEDDNELLSAVSEFYANDETFDGMPLKKAIDETKLLFGNLDNSSLNGIYIQNDRSVTNLSNSMFGSWSVIEDLWNKNYDSVNSNSRIKDIQKREDKRKKAYKAEKKLSLSFLQVLISNSENDEIREKSIVDYYKTSLMQLTDNLSDKYKEAAPLFNESYANEKGLKNDDKSISLIKNFLDAIKEIEKFIKPLSETNITGEKNDLFYSQFTPLLDNISRIDILYDKVRNYVTQKPFSTDKIKLNFGNSQLLNGWDRNKEKDCGAVWLCKDEKYYLAIIDKSNNSILENIDFQDCDESDCYEKIIYKLLPGPNKMLPKVFFSEKCKKLLSPSDEILKIRKNGTFKKGDKFSLDDCHKLIDFYKESFKKYPNWLIYNFKFKKTNEYNDISEFYNDVASQGYNISKMKIPTSFIDKLVDEGKIYLFQLYNKDFSPHSKGTPNLHTLYFKMLFDERNLEDVVYKLNGEAEMFYRPASIKYDKPTHPKNTPIKNKNTLNDKRASTFPYDLIKDKRYTKWQFSLHFPITMNFKAPDRAMINDDVRNLLKSCNNNFIIGIDRGERNLLYVSVIDSNGAIIYQHSLNIIGNKFKGKTYETNYREKLATREKDRTEQRRNWKAIESIKELKEGYISQAVHVICQLVVKYDAIIVMEKLTDGFKRGRTKFEKQVYQKFEKMLIDKLNYYVDKKLDPDEEGGLLHAYQLTNKLDSFDKLGMQSGFIFYVRPDFTSKIDPVTGFVNLLYPRYENIDKAKDMISRFDEIRYNACEDFFEFDIDYDKFPKTASDYRKKWTICTNGERIETFRNPANNNEWSYRTIILAEKFKELFDNNSINYRDSDDLKAEILSQTKGKFFEDFFKLLRLTLQMRNSNPETGEDRILSPVKDKNGNFYDSSKYDEKSKLPCDADANGAYNIARKGLWIVEQFKKSDNVSTVEPVIHNDKWLKFVQENDMANN

SEQ ID NO: 575 - protein, 1245 aa, unidentified
  REGION 1..1245: note = Cas Enzyme sequence
MQERKKISHLTHRNSVQKTIRMQLNPVGKTMDYFQAKQILENDEKLKEDYQKIKEIADRFYRNLNEDVLSKTGLDKLKDYAEIYYHCNTNTDRKRLDECASELRKEIVKNFKNRDEYNKLFNKRMIEIVLPQHLKNEDEKEVVASFKNFTTYFTGFFTNRKNMYSDGEESTAIAYRCINENLPKHLDNVKAFEKAISKLSKNAIDDLDATYSGLCGTNLYDVFTVDYFNFLLPQSGITEYNKIIGGYTTSDGTKVKGINEYINLYNQQVSKRDKIPNLKILYKQILSESEKVSFIPPKFEDDNELLSAVSEFYANDETFDGMPLKKAIDETKLLFGNLDNSSLNGIYIQNDRSVTNLSNSMFGSWSVIEDLWNKNYDSVNSNSRIKDIQKREDKRKKAYKAEKKLSLSFLQVLISNSENDEIREKSIVDYYKTSLMQLTDNLSDKYNEAAPLLNENYSNEKGLKNDDKSISLIKNFLDAIKEIEKFIKPLSETNITGEKNDLFYSQFTPLLDNISRIDILYDKVRNYVTQKPFSTDKIKLNFGNSQLLKGWDRNKEKDCGAVWLCKDEKYYLAIIDKSNNSILENIDFQDCDESDCYEKIIYKLLPGPNKMLPKVFFSEKCKKLLSPSDEILKIRKNGTFKKGDKFSLDDCHKLIDFYKESFKKYPNWLIYNFKFKNTNEYNDISEFYNDVASQGYNISKMKIPTTFIDKLVDEGKIYLFQLYNKDFSPHSKGTPNLHTLYFKMLFDERNLEDVVYKLNGEAEMFYRPASIKYDKPTHPKNTPIKNKNTLNDKKASTFPYDLIKDKRYTKWQFSLHFPITMNFKAPDRAMINDDVRNLLKSCNNNFIIGIDRGERNLLYVSVIDSNGTIIYQHSLNIIGNKFKGKTYETNYREKLATREKERTEQRRNWKAIESIKELKEGYISQAVHVICQLVVKYDAIIVMEKLTDGFKRGRTKFEKQVYQKFEKMLIDKLNYYVDKKLDPDEEGGLLHAYQLTNKLESFDKLGTQSGFIFYVRPDFTSKIDPVTGFVNLLYPRYENIDKAKDMISRFDDIRYNAGEDFFEFDIDYDKFPKTASDYRKRWTICTNGERIEAFRNPANNNEWSYRTIILAEKFKELFDNNSINYRDSDDLKAEILSQTKGKFFEDFFKLLRLTLQMRNSNPETGEDRILSPVKDKNGNFYDSSKYDEKSKLPCDADANGAYNIARKGLWIVEQFKKADNVSTVEPVIHNDKWLKFVQENDMANN

SEQ ID NO: 576 - protein, 1245 aa, unidentified
  REGION 1..1245: note = Cas Enzyme sequence
MQEHKKISHLTHRNSVQKTIRMQLNPVGKTMDYFQAKQILENDEKLKENYQKIKEIADRFYRNLNEDVLSKTGLDKLKDYAEIYYHCNTDADRKRLNKCASELRKEIVKNFKNRDEYNKLFNKKMIEIVLPKHLKNEDEKEVVASFKNFTTYFTGFFTNRKNMYSDGEESTAIAYRCINENLPKHLDNVKAFEKAISKLSKNAIDDLDATYSGLCGTNLYDVFTVDYFNFLLPQSGITEYNKIIGGYTTSDGTKVKGINEYINLYNQQVSKRDKIPNLKILYKQILSESEKVSFIPPKFEDDNELLSAVSEFYANDETFDGMPLKKAIDETKLLFGNLDNSSLNGIYIQNDRSVTNLSNSMFGSWSVIEDLWNKNYDSVNLNSRIKDIQKYEDKRKKAYKAEKKLSLSFLQVLISNSENDEIREKSIVDYYKTSLMQLNDNLSDKYKEAAPLLSENYDNKKGLKNDDKSISLIKNFLDAIKEIEKFIKPLSETNITGEKNDLFYSQFTPLLDNISRIDILYDKVRNYVTQKPFSTDKIKLNFGNSQLLNGWDRNKEKDCGAVWLCKDEKYYLAIIDKSNNSILENIDFQDCDESDCYEKIIYKLLPGPNKMLPKVFFSEKCKKLLSPSDEILKIYKNGTFKKGDKFSLDDCHKLIDFYKESFKKYPKWLIYNFKFKKTNEYNDIREFYNDVALQGYNISKMKIPTSFIDKLVDEGKIYLFQLYNKDFSPHSKGTPNLHTLYFKMLFDERNLEDVVYRLNGEAEMFYRPASIKYDKPTHPKNTPIKNKNTLNDKKASTFPYDLIKDKRYTKWQFSLHFPITMNFKDPDKAMINDDVRNLLKSCNNNFIIGIDRGERNLLYVSVIDSNGAIIYQHSLNIIGNKFKGKTYETNYREKLATREKDRTEQRRNWKAIESIKELKEGYISQAVHVICQLVVKYDAIIVMEKLTDGFKRGRTKFEKQVYQKFEKMLIDKLNYYVDKKLDPDEEGGLLHAYQLTNKLKSFDKLGTQSGFIFYVRPDFTSKIDPVTGFVNLLYPRYEKIDKAKDMISRFDDIRYNAGEDFFEFDIDYDKFPKTASDYRKKWTICTNGERIEAFRNPAKNNEWSYRTIILAEKFKELFDNNSINYRDSDDLKAEILSQTKGKFFEDFFKLLRLTLQMRNSNPETGEDRILSPVKDKNGNFYDSSKYDEKSKLPCDADANGAYNIARKGLWIVEQFQKADNVSAVEPVIHNDKWLKFVQENDMSNN

SEQ ID NO: 577 - protein, 1245 aa, unidentified
  REGION 1..1245: note = Cas Enzyme sequence
MQEHKKISHLTHRNSVQKTIRMQLNPVGKTMDYFQAKQILENDEKLKEDYQKIKKIADRFYRNLNEDVLSKIRLDKLKDYAEIYYHCDTDADRKRLNECASELRKEIVKNFKNRDEYNKLFNKKMIEIVLPKHLKNDDEKEVVASFKNFTTYFTGFFTNRKNMYSDGEESTAIAYRCINENLPKHLDNVKVFEKAISKLSKNAIDDLDATYSGLCGTNLYDVFTVDYFDFLLSQSGITEYNKIIGGYTTSDGTKVKGINEYINLYNQQVSKRDKIPNLKILYKQILSESEKVSFIPPKFEDDNELLSAVSEFYANDETLDGMPLKKAIDETKLLFGNLDNSSLNGIYIQNDRSVTNLSNSMFGSWSVIEDLWNKNYDSVNSNSRIKDIQKREDKRKKAYKAEKKLSLSFLQVLISNSENDEIREKSIVDYYKTSLMQLTDNLSDKYNEAAPLLNENYSNEKGLKNDDKSISLIKNFLDAIKEIEKFIKPLSETNITGEKNDLFYSQFTPLLDNISRIDILYDKVRNYVTQKPFSTDKIKLNFGNSQLLNGWDKDKEREYGAVLLCRDEKYYLAIIDKSNNSILENIDFQDCDESNYYEKIVYKLLTKISGNLPRVFFSEKRKKLLSPSDEILKIYKSGTFKKGDKFSLDDCHKLIDFYKESFKKYPNWLIYNFKFKKTNEYNDISEFYNDVALQGYNISKMKIPTSFIDKLVDEGKIYLFQLYNKDFSPHSKGTPNLHTLYFKMLFDERNLEDVVYRLNGEAEMFYRPASIKYDKPTHPKNTPIKNKNTLNDKKASTFPYDLIKDKRYTKWQFSLHFPITMNFKAPDKAMINDDVRNLLKSCNNNFIIGIDRGERNLLYVSVIDSNGAIIYQHSLNIIGNKFKGKTYETNYREKLATREKERTEQRRNWKAIESIKELKEGYISQAVHVICQLVVKYDAIIVMEKLTDGFKRGRTKFEKQVYQKFEKMLIVKLNYYVDKKLDPDEEGGLLHAYQLTNKLESFDKLGTQSGFIFYVRPDFTSKIDPVTGFVNLLYPRYENIDKAKDMISRFDDIRYNAGEDFFEFDIDYDKFPKTASDYRKKWTICTNGERIEAFRNPANNNEWSYRTIILAEKFKELFDNNSINYRDSDDLKAEIFSQTKGKFFEDFFKLLRLTLQMRNSNPETGEDRILSPVKDKNGNFYDSSKYDEKSKLPCDADANGAYNIARKGLWIVEQFKKADNVSTVEPVIHNDKWLKFVQENDMANN

SEQ ID NO: 578 - protein, 1245 aa, unidentified
  REGION 1..1245: note = Cas Enzyme sequence
MQERKKISHLTHRNSVQKTIRMQLNPVGKTMDYFQAKQILENDEKLKENYQKIKEISDRFYRNLNEDVLSKTRLDKLKDYADIYYHCNTDADRKRLNECASELRKEIVKNFKNRDEYNKLFNKKMIEIVLPKHLKNDDEKEVVASFKNFTTYFTGFFTNRKNMYSDGEESTAIAYRCINENLPKHLDNVKAFEKAISKLSKNAIDDLDATYSGLCGTNLYDVFTVDYFNFLLPQSGITEYNKIIGGYTTSDGTKVKGINEYINLYNQQVSKRDKIPNLKILYKQILSESEKVSFIPPKFEDDNELLSAVSEFYANDETFDGMPLKKAIDETKLLFGNLDNSSLNGIYIQNDRSVTNLSNSMFGSWSVIEDLWNKNYDSVNSNSRIKDIQKREDKRKKAYKAEKKLSLSFLQVLISNSENDEIREKSIVDYYKTSLMQLTDNLSDKYKEAAPLFSENYDNEKGLKNDDKSISLIKNFLDAIKEIEKFIKPLSETNITGEKNDLFYSQFTPLLDNISRIDILYDKVRNYVTQKPFSTDKIKLNFGNSQLLNGWDRNKEKDCGAVWLCKDEKYYLAIIDKSNNSILENIDFQDCDESDCYEKIIYKLLPGPNKMLPKVFFSEKCKKLLSPSDEILKIRKNGTFKKGDKFSLDDCHKLIDFYKESFKKYPNWLIYNFKFKNTNEYNDISEFYNDVASQGYNISKMRIPTSFIDKLVDEGKIYLFQLYNKDFSPHSKGTPNLHTLYFKMLFDERNLEDVVYKLNGEAEMFYRPASIKYDKPTHPKNAPIKNKNTLNDKKTSTFPYDLIKDKRYTKWQFSLHFPITMNFKAPDKAMINDDVRNLLKSCNNNFIIGIDRGERNLLYVSVIDSNGAIIYQHSLNIIGNKFKGKTYETNYREKLATREKERTEQRRNWKAIESIKELKEGYISQAVHVICQLVVKYDAIIVMEKLTDGFKRGRTKFEKQVYQKFEKMLIDKLNYYVDKKLDPDKEGGLLHAYQLTNKFESFDKLGTQSGFIFYVRPDFTSKIDPVTGFVNLLYPRYENIDKAKDMISRFDDIRYNAGEDFFEFDIDYDKFPKTASDYRKKWTICTNGERIEAFRNPANNNEWSYRTIILAEKFKELFDNNSINYRDSDDLKAEILSQTKGKFFEDFFKLLRLTLQMRNSNPETGEDRILSPVKDKNGNFYDSSKYDEKSKLPCDADANGAYNIARKGLWIVEQFKKADNVSTVKPVIHNDKWLKFVQENDMANN

SEQ ID NO: 579 - protein, 1245 aa, unidentified
  REGION 1..1245: note = Cas Enzyme sequence
MQERKKISHLTHRNSVKKTIRMQLNPVGKTMDYFQAKQILENDEKLKENYQKIKEIADRFYRNLNEDVLSKTRLDKLKDYAEIYYHCNTDADRKRLDECASELRKEIVKNFKNRDEYNKLFNKKMIEIVLPKHLKNEDEKEVVASFKNFTTYFTGFFTNRKNMYSDGEESTAIAYRCINENLPKHLDNVKAFEKAISKLSKNAIDDLDATYSGLCGTNLYNVFTVDYFNFLLPQSGITEYNKIIGGYTTNDGTKVKGINEYINLYNQQVSKRDKIPNLKILYKQILSESEKVSFIPPKFEDDNELLSAVSEFYTNDETFDGMPLKKAIDETKLLFGNLDNSSLNEIYIQNDRSVTNLSNSMFGSWSVIEDLWNKNYDSVNSNSRIKDIQKREDKRKKAYKAEKKLSLSFLQVLISNSENDEIREKSIVDYYKTSLMQLTDNLSDKYKEAAPLFSENYDNEKGLKNDDKSISLIKNFLDAIKEIEKFIKPLSETNITGEKNDLFYSQFTPLLDNISRIDILYDKVRNYVTQKPFSTDKIKLNFGNSQLLNGWDRNKEKDCGAVWLCKDEKYYLAIIDKSNNSILENIDFQDCDESDCYEKIIYKLLPGPNKMLPKVFFSEKCKKLLSPSDEILKIRKNGTFKKGDKFSLDDCHKLIDFYKESFKKYPNWLIYNFKFKNTNEYNDISEFYNDVASQGYNISKMKIPTSFIDKLVDEGKIYLFQLYNKDFSPHSKGTPNLHTLYFKMLFDERNLEDVVYRLNGEAEMFYRPASIKYDKPTHPKNTPIKNKNTLNDKKASTFPYDLIKDKRYTKWQFSLHFPITMNFKDPDKAMINDDVRNLLKSCNNNFIIGIDRGERNLLYVSVIDSNGAIIYQHSLNIIGNKFKGKTYETNYREKLATREKERTEQRRNWKAIESIKELKEGYISQAVHVICQLVVKYDAIIVMEKLTDGFKRGRTKFEKQVYQKFEKMLIDKLNYYVDKKLDPDEEGGLLHAYQLTNKLDSFDKLGTQSGFIFYVRPDFTSKNDPVTGFVNLLYPRYENIDKAKDMISRFDEIRYNAGEDFFEFDIDYDKFPKTASDYRKKWTICTNGERIETFRNPANNNEWSYRTIILAEKFKELFDNNSINYRDSDNLKAEILSQTKGKFFEDFFKLLRLTLQMRNSNPETGEDRILSPVKDKNGNFYDSSKYDEKSKLPCDADANGAYNIARKGLWIVEQFKKADNVSTVEPVIHNDKWLKFVQENDMANN

SEQ ID NO: 580 - protein, 1245 aa, unidentified
  REGION 1..1245: note = Cas Enzyme sequence
METFSGFTNLYPLSKTLRFRLIPVGETLKHFIDSGILEEDQHRAESYVKVKAIIDDYHRAYIENSLSGFELPLESTGKFNSLEEYYLYHNIRNKTEEIQNLSSKVRTNLRKQVVAQLTKNEIFKRIDKKELIQSDLIDFVKNEPDANEKIALISEFRNFTVYFKGFHENRRNMYSDEEKSTSIAFRLIHENLPKFIDNMEVFAKIQNTSISENFDAIQKELCPELVTLCEMFKLGYFNKTLSQKQIDAYNTVIGGKTTSEGKKIKGLNEYINLYNQQHKQEKLPKMKLLFKQILSDRESASWLPEKFENDSQVVGAIVNFWNTIHDTVLAEGGLKTIIASLGSYGLEGIFLKNDLQLTDISQKATGSWGKISSEIKQKIEVMNPQKKKESYETYQERIDKIFKSYKSFSLAFINECLRGEYKIEDYFLKLGAVNSSSLQKENHFSHILNTYTDVKEVIGLYSESTDTKLIQDNDSIQKIKQFLDAVKDLQAYVKPLLGNGDETGKDERFYGDLIEYWSLLDLITPLYNMVRNYVTQKPYSVDKIKINFQNPTLLNGWDLNKETDNTSVILRRDGKYYLAIMNNKSRKVFLKYPSGTDRNCYEKMEYKLLPGANKMLPKVFFSKSRINEFMPNERLLSNYEKGTHKKSGTCFSLDDCHTLIDFFKKSLDKHEDWKNFGFKFSDTSTYEDMSGFYKEVENQGYKLSFKPIDATYVDQLVDEGKIFLFQIYNKDFSEHSKGTPNMHTLYWKMLFDETNLGDVVYKLNGEAEVFFRKASINVSHPTHPANIPIKKKNLKHKDEERILKYDLIKDKRYTVDQFQFHVPITMNFKADGNGNINQKAIDYLRSASDTHIIGIDRGERNLLYLVVIDGNGKICEQFSLNEIEVEYNGEKYSTNYHDLLNVKENERKQARQSWQSIANIKDLKEGYLSQVVHKISELMVKYNAIVVLEDLNAGFMRGRQKVEKQVYQKFEKKLIEKLNYLVFKKQSSDLPGGLMHAYQLANKFESFNTLGKQSGFLFYIPAWNTSKMDPVTGFVNLFDVKYESVDKAKSFFSKFDSIRYNVERDMFEWKFNYGEFTKKAEGTKTDWTVCSYGNRIITFRNPDKNSQWDNKEINLTENIKLLFERFGIDLSSNLKDEIMQRTEKEFFIELISLFKLVLQMRNSWTGTDIDYLVSPVCNENGEFFDSRNVDETLPQNADANGAYNIARKGMILLDKIKKSNGEKKLALSITNREWLSFAQGCCKNG

SEQ ID NO: 581 - protein, 1245 aa, unidentified
  REGION 1..1245: note = Cas Enzyme sequence
MSLYDSFTGVYPVQKTLRFELIPVGETQEHIEKKGYLVTDEHRADSYKKVKKIIDRYHKDFIESVLGQIQLDGLEEYAKLYYEKQRNDQQEKQFDTIKKGLRKQISDAFKSFDQFKKMFGKEMIEDLLIKYTEDNPDDQKSVLEFESFSTYFQGFYENRKNMYSGEGKSTEVAYRIVDQNLPKYLDNIIIYEKAYQSGLGDKIEKTLKEVNKHYELESIEELFELKGFNSVLSQKGIDMYNCIIGGFSESDRVKVQGINETINLYNQQVNSKDNKKIPKCKSLFKQILSDRENISFIQDQFESDEEVVAAIYDFYDEMQTSLFENSDSLNIDELFSDIGNYNLEGVYIKNCQALTDISQHLYSDWSIINHALESNYDNNQSSKNKNTEKYIEKRKKELKKNKYYAIAFINQILSDYTKEDVAVEKYYSDLFVGEENYLKKITDQKKKLDEVVKSWKESGKSLNKNDEIIEAIKELLDLFKDLQRIIQPLINNDVSSKDFMFYNELERMWNNLDVLTSLYNKVRNYITRKPYSIEKYKLNFNRPTLLAGWDKSKERDCLGILLRKNDLYYLCIMDKNNSKVFMDVPRGNGDSCYEKMEYKQVKPLTDFAHVFFAKKNIKKYNPSEEILKIKKDESYIKNNDNFSLDNCHKLIDFYKECIKINEEYEIFNFKFSDTSSYNDISEFYKEADKYKYAIQFEYVDENYINQLVAEGKIYLFQIYNKDFSVYSKGNPNLHTLYWKMLFYPENLKNIVYKLNGQAEIFYRKSSINKEDIIRHPANIPINNKNELNTKKTSVFDYELIKDKRFTIDKYQFHVPITMNFGALGDNHFNRTVNTVIKNTDDVNVIGIDRGERNLLYLVVINSKGEIIKQKSLNEIINVGKNNIYHKTDYHKLLDYREKENKAARNNWKTINTIKELKEGYLSQVIHVITEWMVKYNAIVVLEDLNFGFKRGRQKFEKQVYQKFEKMLIDKLNYYVDKNADVQSPSGLLKALQLTNKFDSFSNMGKQSGFLYYVPAYLTSKIDPTTGFANLFNGSDLRYSSVETSKEFFNKFKSIIYNPNGINGKDYFEFTFDYLDFTYKAEGTQSVWTVCTFDKRIHHYRNSSKNNEWDTEEIDLTQSVKDLFNKFDVNMEEGNLKEKIINISDKSFYKDLLWLFSLTLQMRNSDADKNIDRLISPVLNEKGFFYDSDLKSDMLPYDADANGAYNIAKKGLWIINQIKSMDDDKVDKLKTISNKEWLQFAQENKL

SEQ ID NO: 582 - protein, 1245 aa, unidentified
  REGION 1..1245: note = Cas Enzyme sequence
MQEHKKISHLTHRNSVQKTIRMQLNPVGKTMDYFQAKQILENDEKLKENYQKIKEIADRFYRNLNEDVLSKTGLDKLKDYAEIYYHCNTDADRKRLNKCASELRKEIVKNFKNRDEYNKLFDKRMIEIVLPKHLKNEDEKEVVASFKNFTTYFKGFFTNRKNMYSDGEESTAIAYRCINENLPKHLDNVKVFEKAISKLSKNAIDDLDTTYSGLCGTNLYDVFTVDYFNFLLPQSGITEYNKIIGGYTTSDGTKVKGINEYINLYNQQVSKRDKIPNLKILYKQILSESEKVSFIPPKFEDDNELLSAVSEFYANDETFDGMPLKKAIDETKLLFGNLDNSSLNGIYIQNDRSVTNLSNSMFGSWSVIEDLWNKNYDSVNLNSRIKDIQKYEDKRKKAYKAEKKLSLSFLQVLISNSENDEIREKSIVDYYKTSLMQLTDNLSDKYKEAAPLFSENYDNEKGLKNDDKSISLIKNFLDAIKEIEKFIKPLSETNITGEKNDLFYSQFTPLLDNISRIDILYDKVRNYVTQKPFSTDKIKLNFGNSQLLNGWDRNKEKDCGAVWLCKDEKYYLAIIDKSNNSILENIDFQDCDESDCYEKIIYKLLPTPNKMLPKVFFSEKCKKLLSPSDEILKIRKNGTFKKGDKFSLDDCHKLIDFYKESFKKYPKWLIYNFKFKKTNEYNDIREFYNDVASQGYNISKMKIPTSFIDKLVDEGKIYLFQLYNKDFSPHSKGTPNLHTLYFKMLFDERNLEDVVYRLNGEAEMFYRPASIKYDKPTHPKNTPIKNKNTLNDKRASTFPYDLIKDKRYTKWQFSLHFPITMNFKAPDKAMINDDVRNLLKSCNNNFIIGIDRGERNLLYVSVIDSNGAIIYQHSLNIIGNKFKGKTYETNYREKLATREKDRTEQRRNWKAIESIKELKEGYISQAVHVICQLVVKYDAIIVMEKLTDGFKRGRTKFEKQVYQKFEKMLIDKLNYYVDKKLDPDEEGGLLHAYQLTNKLESFDKLGTQSGFIFYVRPDFTSKIDPVTGFVNLLYPRYEKTDKAKDMISRFDDIRYNAGEDFFEFDIDYDKFPKTASDYRKKWTICTNGERIEAFRNPANNNEWSYRTIILAEKFKELFDNNSINYRDSDDLKAEILSQTKGKFFEDFFKLLRLTLQMRNSNPETGEDRILSPVKDKNGNFYDSSKYDEKSKLPCDADANGAYNIARKGLWIVEQFKKSDNVSTVEPVIHNDKWLKFVQENDMANN

SEQ ID NO: 583 - protein, 1245 aa, unidentified
  REGION 1..1245: note = Cas Enzyme sequence
MQEHKKISHLTHKNSVQKTIRMQLNPVGKTMDYFQAKQILENDEKLKENYQKIKEIADRFYRNLNEDVLSKTGLDKLKDYAEIYYHCNTDADRKRLNECASELRKEIVKNFKNRDEYNKLFNKKMIEIVLPKHLKNEDEKEVVASFKNFTTYFTGFFTNRKNMYSDGEESTAIAYRCINENLPKHLDNVKAFEKAISKLSKNAIDDLDATYSGLCGTNLYDVFTVDYFDFLLSQSGITEYNKIIGGYTTSDGTKVKGINEYINLYNQQVSKRDKIPNLKILYKQILSESERVSFIPPKFEDDNELLSAVSEFYANDETFDGMPLKKAIDETKLLFGNLDNSSLNGIYIQNDRSVTNLSNSMFGSWSVIEDLWNKNYDSVNSNSRIKDIQKREDKRKKAYKAEKKLSLSFLQVLISNSENDEIREKSIVDYYKTSLMQLTDNLSDKYNEAAPLLNENYSNEKGLKNDDKSISLIKNFLDAIKEIEKFIKPLSETNITGEKNDLFYSQFTPLLDNISRIDILYDKVRNYVTQKPFSTDKIKLNFGNSQLLNGWDRNKEKDCGAVWLCKDEKYYLAIIDKSNNSILENIDFQDCDESDCYEKIIYKLLPGPNKMLPKVFFSEKCKKLLSPSDEILKIYKSGTFKKGDKFSLDDCHKLIDFYKESFKKYPKWLIYNFKFKNTNEYNDISEFYNDVALQGYNISKMKIPTTFIDKLVDEGKIYLFQLYNKDFSPHSKGTPNLHTLYFKMLFDERNLEDVVYKLNGEAEMFYRPASIKYDKPTHPKNTPIKNKNTLNDKKASTFPYDLIKDKRYTKWQFSLHFPITMNFKAPDKAMINDDVRNLLKSCNNNFIIGIDRGERNLLYVSVIDSNGAIIYQHSLNIIGNKFKGKTYETNYQEKLATREKERTEQRRNWKAIESIKELKEGYISQAVHVICQLVVKYDAIIVMEKLTDGFKRGRTKFEKQVYQKFEKMLIDKLNYYVDKKLNPDEEGGLLHAYQLTNKLESFDKLGTQSGFIFYVRPDFTSKIDPVTGFVNLLYPRYENIDKAKDMISRFDDIRYNAGEDFFEFDIDYDKFPKTASDYRKKWTICTNGERIEAFRNPANNNEWSYRTIILAEKFKELFDNNSINYRDSDDLKAEILSQTKGKFFEDFFKLLRLTLQMRNSNPETGEDRILSPVKDKNGNFYDSSKYDEKSKLPCDADANGAYNIARKGLWIVEQFKKADNVSTVEPVIHNDQWLKFVQENDMANN

SEQ ID NO: 584 - protein, 1245 aa, unidentified
  REGION 1..1245: note = Cas Enzyme sequence
MQERKKISHLTHRNSVQKTVRMQLNPVGKTMDYFQAKQILENDEKLKEYYQKIKEIADRFYRNLNEDVLSKTGLDKLKDYADIYYHCNTDADRKRLNECASELRKEIVKNFKNRDEYNKLFNKKMIEIVLPEHLKNEDEKEVVASFKNFTTYFTGFFTNRKNMYSDGEESTAIAYRCINENLPKHLDNVKAFEKAISKLSKNAIDDLDATYSGLCGTNLYDVFTVDYFNFLLPQSGITEYNKIIGGYTTSDGTKVKGINEYINLYNQQVSKRDKIPNLKILYKQILSESEKVSFIPPKFEDDNELLSAVSEFYANDETFDGMPLKKAIDETKLLFGNLDNSSLNGIYIQNDRSVTNLSNSMFGSWSVIEDLWNKNYDSVNSNSRIKDIQKREDKRKKAYKAEKKLSLSFLQVLISNSENNEIRKKSIVDYYKTSLMQLTDNLSDKYKEAAPLFSENYDNEKGLKNDDKSISLIKNFLDAIKEIEKFIKPLSETNITGEKNDLFYSQFTPLLDNISRIDILYDKVRNYVTQKPFSTDKIKLNFGNSQLLNGWDRNKEKDCGAVWLCKDEKYYLAIIDKSNNSILENIDFQDCDESDCYEKIIYKLLPGPNKMLPKVFFSEKCKKLLSPSDEILKIYKSGTFKKGDKFSLDDCHKLIDFYKESFKKYPNWLIYNFKFKKTNEYNDISEFYNDVALQGYNISKIKIPTSFIDKLVDEGKIYLFQLYNKDFSPHSKGTPNLHTLYFKMLFDERNLEDVVYKLNGEAEMFYRPASIKYDKPTHPKNAPIKNKNTLNDKKTSTFPYDLIKDKRYTKWQFSLHFPITMNFKAPDKAMINDDVRNLLKSCNNNFIIGIDRGERNLLYVSVIDSNGAIIYQHSLNIIGNKFKGKTYETNYREKLATREKERTEQRRNWKAIESIKELKEGYISQAVHVICQLVVKYDAIIVMEKLTDGFKRGRTKFEKQVYQKFEKMLIDKLNYYVDKKLDPDEEGGLLHAYQLTNKLESFDKLGTQSGFIFYVRPDFTSKIDPVTGFVNLLYPQYENIDKAKDMISRFDEIRYNAGEDFFEFDIDYDEFPKTASDYRKKWTICTNGERIEAFRNPTNNNEWSYRTIILAEKFKELFDNNSINYRDSDDLKAEILTQTKGKFFEDFFKLLRLTLQMRNSNPETGEDRILSPVKDKNGNFYDSSKYDEKSKLPCDADANGAYNIARKGLWIVEQFKKSDNVSTVEPVIHNDKWLKFVQENDMANN

SEQ ID NO: 585 - protein, 1245 aa, unidentified
  REGION 1..1245: note = Cas Enzyme sequence
MQERKKISHLTHRNSVQKTIRMQLNPVGKTMDYFQAKQILENDEKLKENYQKIKEIADRFYRNLNEDVLSKTGLDKLKDYADIYYHCNTNADRKRLDECASELRKEIVKNFKNRDEYNKLFNKKMIEIVLPKHLKNEDEKEVVASFKNFTTYFTGFFTNRKNMYSDGEESTAIAYRCINENLPKHLDNVKAFEKAISKLSKNAVDDLDATYSGLCGTNLYDVFTVDYFNFLLPQSGITEYNKIIGGYTTSDGKKVKGINEYINLYNQQVSKRDKIPNLKILYKQILSESEKVSFIPPKFEDDNELLSAVSEFYANDETFDGMPLKKAIDETKLLFGNLDNFSLNGIYIQNDRSVTNLSNSMFGSWSVIEDLWNKNYDSVNSNSRIKDIQKREDKRKKAYKAEKKLSLSFLQVLISNSENDEIREKSIVDYYKTSLMQLTDNLSDKYKEAAPLFSENYDNEKGLKNDDKSISLIKNFLDAIKEIEKFIKPLSETNITGEKNDLFYSQFTPLLDNISRIDILYDKVRNYVTQKPFSTDKIKLNFGNSQLLNGWDRNKEKDCGAVWLCKDEKYYLAIIDKSNNRILENIDFQDCDESDCYEKIIYKLLPTPNKMLPKVFFSEKCKKLLSPSDEILKIYKNGTFKKGDKFSLDDCHKLIDFYKESINKYSSWSVYDFKFKNTNEYNDISEFYNDVASQGYNISKMKIPTSFIDKLVDEGKIYLFQLYNKDFSPHSKGTPNLHTLYFKMLFDERNLEDVVYKLNGEAEMFYRPASIKYDKPTHPKNTPIKNKNTLNDKRASTFPYDLIKDKRYTKWQFSLHFSITMNFKVPDKAMINDDVRNLLKSCNNNFIIGIDRGERNLLYVSVIDSNGAIIYQHSLNIIGNKFKGKTYETNYREKLATREKDRTEQRRNWKAIESIKELKEGYISQAVHVICQLVVKYDAIIVMEKLTDGFKRGRTKFEKQVYQKFEKMLIDKLNYYVDKKLDPDEEGGLLHAYQLTNKLESFDKLGMQSGFIFYVRPDFTSKIDPVTGFVNLLYPRYEKIDKAKDMISRFDDIRYNAGEDFFEFDIDYDKFPKTASDYRKKWTICTNGERIEAFRNPANNNEWSYRTIILAEKFKELFDNNSINYRDSDDLKAEILSQTKGKFFEDFFKLLRLTLQMRNSNPETGEDRILSPVKDKNGNFYDSSKYDKKSKLPCDADANGAYNIARKGLWIVEQFKKSDNVSTVEPVIHNDKWLKFVQENDMANN

SEQ ID NO: 586 - protein, 1245 aa, unidentified
  REGION 1..1245: note = Cas Enzyme sequence
MQERKKISHLTHRNSVQKTIRMQLNPVGKTMDYFQAKQILENDEKLKEDYQKIKEIADRFYRNLNEDVLSKTRLDKLKDYADIYYHCNTDADRKRLNECASELRKEIVKNFKNRDEYNKLFNKKMIEIVLPQHLKNGDEKEVVASFKNFTTYFTGFFTNRKNMYSDGEESTAIAYRCINENLPKHLDNVKAFEKAISKLSKNAIDDLDATYSGLCGTNLYDVFTVDYFNFLLPQSGITEYNKIIGGYTTSDGTKVKGINEYINLYNQQVSKRDKIPNLKILYKQILSESEKVSFIPPKFEDDNELLSAVSEFYANDETFDGMPLKKAIDETKLLFGNLDNSSLNGIYIQNDRSVTNLSNSMFGSWSVIEDLWNKNYDSVNSNSRIKDIQKREDKRKKAYKAEKKLSLSFLQVLISNSENDEIREKSIVDYYKTSLMQLTDNLSDKYKEAAPLFSENYDNEKGLKNDDKSISLIKNFLDAIKEIEKFIKPLSETNITGEKNDLFYSQFTPLLDNISRIDILYDKVRNYVTQKPFSTDKIKLNFGNSQLLNGWDRNKEKDCGAVWLCKDEKYYLAIIDKSNNRILENIDFQDCDESDCYEKIIYKLLPGPNKMLPKVFFAKSNIELFAPSDKILKIYKNGTFKKGDKFSLDDCHKLIDFYKESFKKYPKWLIYNFKFKKTNEYNDIREFYNDVALQGYNISKMKIPTSFIDKLVDEGKIYLFQLYNKDFSPHSKGTPNLHTLYFKMLFDERNLEDVVYKLNGEAEMFYRPASIKYDKPTHPKNTPIKNKNTLNDKKTSTFPYDLIKDKRYTKWQFSLHFPITMNFKAPDRAMINDDVRNLLKSCNNNFIIGIDRGERNLLYVSVIDSNGAIIYQHSLNIIGNKFKGKTYETNYREKLATREKERTEQRRNWKAIESIKELKEGYISQAVHVICQLVVKYDSIIVMEKLTDGFKRGRTKFEKQVYQKFEKMLIDKLNYYVDKKLDPDEEGGLLHAYQLTNKLESFDKLGTQSGFIFYVRPDFTSKIDPVTGFVNLLYPRYENIDKAKDMISRFDDIRYNAGEDFFEFDIDYDKFPKTASDYRKRWTICTNGERIEAFRNPANNNEWSYRTIILAEKFKELFDNNSINYRDSDDLKAEILSQTKGKFFEDFFKLLRLTLQMRNSNPETGEDRILSPVKDKNGNFYDSSKYDEKSKLPCDADANGAYNIARKGLWIVEQFKKSDNVSTVEPVIHNDKWLKFVQENDMANN

SEQ ID NO: 587 - protein, 1245 aa, unidentified
  REGION 1..1245: note = Cas Enzyme sequence
MQERKKISHLTHRNSVKKTIRMQLNPVGKTMDYFQAKQILENDEKLKENYQKIKEIADRFYRNLNEDVLSKTRLDKLKDYAEIYYHCNTDADRKRLDECASELRKEIVKNFKNRDEYNKLFNKKMIEIVLPKHLKNEDEKEVVASFKNFTTYFTGFFTNRKNMYSDGEESTAIAYRCINENLPKHLDNVKAFEKAISKLSKNAIDDLDATYSGLCGTNLYNVFTVDYFNFLLPQSGITEYNKIIGGYTTNDGTKVKGINEYINLYNQQVSKRDKIPNLKILYKQILSESEKVSFIPPKFEDDNELLSAVSEFYTNDETFDGMPLKKAIDETKLLFGNLDNSSLNEIYIQNDRSVTNLSNSMFGSWSVIEDLWNKNYDSVNSNSRIKDIQKREDKRKKAYKAEKKLSLSFLQVLISNSENDEIREKSIVDYYKTSLMQLTDNLSDKYKEAAPLFSENYDNEKGLKNDDKSISLIKNFLDAIKEIEKFIKPLSETNITGEKNDLFYSQFTPLLDNISRIDILYDKVRNYVTQKPFSTDKIKLNFGNSQLLNGWDRNKEKDCGAVWLCKDEKYYLAIIDKSNNSILENIDFQDCDESDCYEKIIYKLLPGPNKMLPKVFFSEKCKKLLSPSDEILKIRKNGTFKKGDKFSLDDCHKLIDFYKESFKKYPNWLIYNFKFKNTNEYNDISEFYNDVASQGYNISKMKIPTSFIDKLVDEGKIYLFQLYNKDFSPHSKGTPNLHTLYFKMLFDERNLEDVVYRLNGEAEMFYRPASIKYDKPTHPKNTPIKNKNTLNDKKASTFPYDLIKDKRYTKWQFSLHFPITMNFKDPDKAMINDDVRNLLKSCNNNFIIGIDRGERNLLYVSVIDSNGAIIYQHSLNIIGNKFKGKTYETNYREKLATREKERTEQRRNWKAIESIKELKEGYISQAVHVICQLVVKYDAIIVMEKLTDGFKRGRTKFEKQVYQKFEKMLIDKLNYYVDKKLDPDEEGGLLHAYQLTNKLDSFDKLGTQSGFIFYVRPDFTSKIDPVTGFVNLLYPRYENIDKAKDMISRFDEIRYNAGEDFFEFDIDYDKFPKTASDYRKKWTICTNGERIETFRNPANNNEWSYRTIILAEKFKELFDNNSINYRDSDNLKAEILSQTKGKFFEDFFKLLRLTLQMRNSNPETGEDRILSPVKDKNGNFYDSSKYDEKSKLPCDADANGAYNIARKGLWIVEQFKKADNVSTVEPVIHNDKWLKFVQENDMANN

SEQ ID NO: 588 - protein, 1245 aa, unidentified
  REGION 1..1245: note = Cas Enzyme sequence
METFSGFTNLYPLSKTLRFRLIPVGETLKHFIDSGILEEDQHRAESYVKVKAIIDDYHRAYIENSLSGFELPLESTGKFNSLEEYYLYHNIRNKTEEIQNLSSKVRTNLRKQVVVQLTKNEIFKRIDKKELIQSDLIDFVKNEPDANEKIALISEFRNFTVYFKGFHENRRNMYSDEEKSTSIAFRLIHENLPKFIDNMEVFAKIQNTSISENFDAIQKELCPELVTLCEMFKLGYFNKTLSQKQIDAYNTVIGGKTTSEGKKIKGLNEYINLYNQQHKQEKLPKMKLLFKQILSDRESASWLPEKFENDSQVVGAMVNFWNTIHDTVLAEGGLKTIIASLGSYGLEGIFLKNDLQLTDISQKATGSWSKISSEIKQKIEVMNPQKKKESYESYQERIDKLFKSYKSFSLAFINECLRGEYKIEDYFLKLGAVNSSSLQKENHFSHILNAYTDVKEAIGFYSESTDTKLIQDNDSIQKIKQFLDAVKDLQAYVKPLLGNGDETGKDERFYGDLIEYWSLLDLITPLYNMVRNYVTQKPYSVDKIKINFQNPTLLNGWDLNKETDNTSVILRRDGKYYLAIMNNKSRKVFLKYPSGTDGNCYEKMEYKLLPGANKMLPKVFFSKSRINEFMPNERLLSNYEKGTHKKSGICFSLDDCHTLIDFFKKSLDKHEDWKNFGFKFSDTSTYEDMSGFYKEVENQGYKLSFKPIDATYVDQLVDEGKIFLFQIYNKDFSEHSKGTPNMHTLYWKMLFDETNLGDVVYKLNGEAEVFFRKASINVSHPTHPANIPIKKKNLKHKDEERILKYDLIKDKRYTVDQFQFHVPITMNFKADGNGNINQKAIDYLCSASDTHIIGIDRGERNLLYLVVIDGNGKICEQFSLNEIEVEYNGEKYSTNYHDLLNVKENERKQARQSWQSIANIKDLKEGYLSQVIHKISELMVKYNAIVVLEDLNAGFMRGRQKVEKQVYQKFEKKLIEKLNYLVFKKQSSDLPGGLMHAYQLANKFESFNALGKQSGFLFYIPAWNTSKMDPVTGFVNLFDVKYESVDKAKSFFSKFDSMRYNVERDMFEWKFNYGEFTKKAEGTKTDWTVCSYGNRIITFRNPDKNSQWDNKEINLTENIKLLFERFGIDLSSNLKDEIMQRTEKEFFIELISLFKLVLQMRNSWTGTDIDYLVSPVCNENGEFFDSRNVDETLPQNADANGAYNIARKGMILLDKIKKSNGEKKLALSITNREWLSFAQGCCKNG

SEQ ID NO: 589 - protein, 1245 aa, unidentified
  REGION 1..1245: note = Cas Enzyme sequence
METFSGFTNLYPLSKTLRFRLIPVGETLKHFIDSGILEEDQHRAESYVKVKAIIDDYHRAYIENSLSGFELPLESMGKFNSLEEYYLYHNIRNKTEEIQNLSSKVRTNLRKQVVTQLTKNEIFKRIDKKELIQSDLIDFVKNEPDANEKIALISEFRNFTVYFKGFHENRRNMYSDEEKSTSIAFRLIHENLPKFIDNMEVFAKIQNTSISENFDAIQKELCPELVTLCEMFKLGYFNKTLSQKQIDAYNTVIGGKTTSEGKKIKGLNEYINLYNQQHKQEKLPKMKLLFKQILSDRESVSWLPEKFENDSQVVGAMVNFWNTIHDTVLAEGGLKTIIASLGSYGLEGIFLKNDLQLTDISQKATGSWGKISSEIKQKIEVMNPQKKKESYETYQERIDKIFKSYKSFSLAFINECLRGEYKIEDYFLKLGAVNSSSLQKENHFSHILNAYTDVKEAIGFYSESTDTKLIQDNDSIQKIKQFLDAVKDLQAYVKPLLGNGDETGKDERFYGDLIEYWSLLDLITPLYNMVRNYVTQKPYSIDKIKINFQNPTLLNGWDLNKETDNTSVILRRDGKYYLAIMNNKSRKVFLKYPSGTDRNCYEKMEYKLLPGANKMLPKVFFSKSRINEFMPNERLLSNYEKGTHKKSGTCFSLDDCHTLIDFFKKSLDKHEDWKNFGFKFSDTSTYEDMSGFYKEVENQGYKLSFKPIDATYVDQLVDEGKIFLFQIYNKDFSEHSKGTPNMHTLYWKMLFDETNLGDVVYKLNGEAEVFFRKASINVSHPTHPANIPIKKKNLKHKDEERILKYDLIKDKRYTVDQFQFHVPITMNFKADGNGNINQKAIDYLRSASDTHIIGIDRGERNLLYLVVIDGNGKICEQFSLNEIEVEYNGEKYSTNYHDLLNVKENERRQARQSWQSIANIKDLKEGYLSQVIHKISELMVKYNAIVVLEDLNAGFMRGRQKVEKQVYQKFEKKLIEKLNYLVFKKQSFDLPGGLMHAYQLANKFESFNTLGKQSGFLFYIPAWNTSKMDPVTGFVNLFDVKYESVDKAKSFFSKFDSIRYNVERDMFEWKFNYGEFTKKAEGTKTDWTVCSYGNRIITFRNPDKNSQWDNKEINLTENIKLLFERFGIDFSSNLKDEIMQRTEKEFFIELISLFKLVLQMRNSWTGTDIDYLVSPVCNENGEFFDSRNVDETLPQNADANGAYNIARKGMILLDKIKKSNGEKKLALSITNREWLSFAQGCCKNG

SEQ ID NO: 590 - protein, 1245 aa, unidentified
  REGION 1..1245: note = Cas Enzyme sequence
MQEHKKISHLTHKNSVQKTIRMQLNPVGKTMDYFQAKQILENDEKLKENYQKIKEIADRFYRNLNEDVLSKTGLDKLKDYAEIYYHCNTDADRKRLNECASELRKEIVKNFKNRDEYNKLFNKKMIEIVLPKHLKNEDEKEVVASFKNFTTYFTGFFTNRKNMYSDGEESTAIAYRCINENLPKHLDNVKAFEKAISKLSKNAIDDLDATYSGLCGTNLYDVFTVDYFDFLLSQSGITEYNKIIGGYTTSDGTKVKGINEYINLYNQQVSKRDKIPNLKILYKQILSESERVSFIPPKFEDDNELLSAVSEFYANDETFDGMPLKKAIDETKLLFGNLDNSSLNGIYIQNDRSVTNLSNSMFGSWSVIEDLWNKNYDSVNSNSRIKDIQKREDKRKKAYKAEKKLSLSFLQVLISNSENDEIREKSIVDYYKTSLMQLTDNLSDKYNEAAPLLNENYSNEKGLKNDDKSISLIKNFLDAIKEIEKFIKPLSETNITGEKNDLFYSQFTPLLDNISRIDILYDKVRNYVTQKPFSTDKIKLNFGNSQLLNGWDRNKEKDCGAVWLCKDEKYYLAIIDKSNNSILENIDFQDCDESDCYEKIIYKLLPGPNKMLPKVFFSEKCKKLLSPSDEILKIYKSGTFKKGDKFSLDDCHKLIDFYKESFKKYPKWLIYNFKFKNTNEYNDISEFYNDVALQGYNISKMKIPTTFIDKLVDEGKIYLFQLYNKDFSPHSKGTPNLHTLYFKMLFDERNLEDVVYRLNGEAEMFYRPASIKYDKPTHPKNTPIKNKNTLNDKKASTFPYDLIKDKRYTKWQFSLHFPITMNFKAPDRAMINDDVRNLLKSCNNNFIIGIDRGERNLLYVSVIDSNGAIIYQHSLNIIGNKFKGKTYETNYREKLATREKDRTEQRRNWKAIESIKELKEGYISQAVHVICQLVVKYDAIIVMEKLTDGFKRGRTKFEKQVYQKFEKMLIDKLNYYVDKKLDPDEEGGLLHAYQLTNKLESFDKLGTQSGFIFYVRPDFTSKIDPVTGFVNLLYPRYENIDKAKDMISRFDEIRYNAGEDFFEFDIDYDKFPKTASDYRKKWTICTNGERIEAFRNSTNNNEWSYRTIILAEKFKELFDNNSINYRDSDDLKAEILSQTKGKFFEDFFKLLRLTLQMRNSNPETGEDRILSPVKDKNGNFYDSSKYDEKSKLPCDADANGAYNIARKGLWIVEQFKKSDNVSTVEPVIHNDKWLKFVQENDMANN

SEQ ID NO: 591 - protein, 1245 aa, unidentified
  REGION 1..1245: note = Cas Enzyme sequence
MQEHKKISHLTHKNSVQKTIRMQLNPVGKTMDYFQAKQILENDEKLKENYQKIKEIADRFYRNLNEDVLSKTGLDKLKDYAEIYYHCNTDTDRKRLNECASELRKEIVKNFKNRDEYNKLFNKKMIEIVLPKHLKNEDEKEVVASFKNFTTYFTGFFTNRKNMYSDGEESTAIAYRCINENLPKHLDNVKAFEKAISKLSKNAIDDLDATYSGLCGTNLYDVFTVDYFDFLLSQSGITEYNKIIGGYTTSDGTKVKGINEYINLYNQQVSKRDKIPNLKILYKQILSESERVSFIPPKFEDDNELLSAVSEFYANDETFDGMPLKKAIDETKLLFGNLDNSSLNGIYIQNDRSVTNLSNSMFGSWSVIEDLWNKNYDSVNSNSRIKDIQKREDKRKKAYKAEKKLSLSFLQVLISNSENDEIREKSIVDYYKTSLMQLTDNLSDKYNEAAPLLNENYSNEKGLKNDDKSISLIKNFLDAIKEIEKFIKPLSETNITGEKNDLFYSQFTPLLDNISRIDILYDKVRNYVTQKPFSTDKIKLNFGNSQLLNGWDRNKEKDCGAVWLCKDEKYYLAIIDKSNNSILENIDFQDCDESDCYEKIIYKLLPGPNKMLPKVFFSEKCKKLLSPSDEILKIYKSGTFKKGDKFSLDDCHKLIDFYKESFKKYPKWLIYNFKFKNTNEYNDISEFYNDVALQGYNISKMKIPTTFIDKLVDEGKIYLFQLYNKDFSPHSKGTPNLHTLYFKMLFDERNLEDVVYKLNGEAEMFYRPASIKYDKPTHPKNTPIKNKNTLNDKKASTFPYDLIKDKRYTKWQFSLHFPITMNFKAPDKAMINDDVRNLLKSCNNNFIIGIDRGERNLLYVSVIDSNGAIIYQHSLNIIGNKFKGKTYETNYQEKLATREKERTEQRRNWKAIESIKELKEGYISQAVHVICQLVVKYDAIIVMEKLTDGFKRGRTKFEKQVYQKFEKMLIDKLNYYVDKKLNPDEEGGLLHAYQLTNKLESFDKLGTQSGFIFYVRPDFTSKIDPVTGFVNLLYPRYENIDKAKDMISRFDDIRYNAGEDFFEFDIDYDKFPKTASDYRKKWTICTNGERIEAFRNPANNNEWSYRTIILAEKFKELFDNNSINYRDSDDLKAEILSQTKGKFFEDFFKLLRLTLQMRNSNPETGEDRILSPVKDKNGNFYDSSKYDEKSKLPCDADANGAYNIARKGLWIVEQFKKADNVSTVEPVIHNDQWLKFVQENDMANN

SEQ ID NO: 592 - protein, 1245 aa, unidentified
  REGION 1..1245: note = Cas Enzyme sequence
MQEHKKISHLTHRNSVQKTIRMQLNPVGKTMDYFQAKQILENDEKLKEDYQKIKEIADRFYRNLNEDVLSKTRLDKLKDYAEIYYHCNTDADRKRLNECASELRKEIVKNFKNRDEYNKLFNKKMIEIVLPQHLKNEDEKEVVASFKNFTTYFTGFFTNRKNMYSDGEESTAIAYRCINENLPKHLDNVKVFEKAISKLSKNAIDDLDATYSSLCGTNLYDVFTVDYFNFLLPQSGITEYNKIIGGYTTSDGTKVKGINEYINLYNQQVSKRDKIPNLKILYKQILSESEKVSFIPPKFEDDNELLSAVSEFYANDETFDGMPLKKAIDETKLLFGNLDNSSLNGIYIQNDRPVTNLSNSMFGSWSVIEDLWNKNYDSVNSNSRIKDIQKCEDKRKKAYKAEKKLSLSFLQVLISNSENDEIREKSIVDYYKTSLMQLTDNLSDKYNEAAPLLNENYSNEKGLKNDDKSISLIKNFLDAIKEIEKFIKPLSETNITGEKNDLFYSQFTPLLDNISRIDILYDKVRNYVTQKPFSTDKIKLNFGNSQLLNGWDRNKEKDCGAVWLCKDEKYYLAIIDKSNNSILENIDFQGCDESDCYEKIIYKLLPGPNKMLPKVFFSEKCKKLLSPSDEILKIYKSGTFKKGDKFSLDDCHKLIDFYKESFKKYPNWLIYNFKFKNTNEYNDISEFYNDVASQGYNISKMKIPTSFIDKLVDEGKIYLFQLYNKDFSPHSKGTPNLHTLYFKMLFDERNLEDVVYRLNGEAEMFYRPASIKYDKPTHPKNTPIKNKNTLNDKKASTFPYDLIKDKRYTKWQFSLHFPITMNFKAPDRAMINDDVRNLLKSCNNNFIIGIDRGERNLLYVSVIDSNGAIIYQHSLNIIGNKFKGKTYETNYREKLATREKDRTEQRRNWKAIESIKELKEGYISQAVHVICQLVVKYDAIIVMEKLTDGFKRGRTKFEKQVYQKFEKMLIDKLNYYVDKKLDPDEEGGLLHAYQLTNKLESFDKLGTQSGFIFYVRPDFTSKIDPVTGFVNLLYPRYENIDKAKDMISRFDEIRYNAGEDFFEFDIDYDKFPKTASDYRKKWTICTNGERIEAFRNSTNNNEWSYRTIILAEKFKELFDNNSINYRDSDDLKAEILSQTKGKFFEDFFKLLRLTLQMRNSNPETGEDRILSPVKDKNGNFYDSSKYDEKSKLPCDADANGAYNIARKGLWIVEQFKKADNVSTVEPVIHNDQWLKFVQENDMANN

SEQ ID NO: 593 - protein, 1245 aa, unidentified
  REGION 1..1245: note = Cas Enzyme sequence
MQEHKKISHLTHKNSVQKTIRMQLNPVGKTMDYFQAKQILENDEKLKENYQKIKEIADRFYRNLNEDVLSKTGLDKLKDYAEIYYHCNTDADRKRLNECASELRKEIVKNFKNRDEYNKLFNKKMIEIVLPKHLKNEDEKEVVASFKNFTTYFTGFFTNRKNMYSDGEESTAIAYRCINENLPKHLDNVKAFEKAISKLSKNAIDDLDATYSGLCGTNLYDVFTVDYFDFLLSQSGITEYNKIIGGYTTSDGTKVKGINEYINLYNQQVSKRDKIPNLKILYKQILSESERVSFIPPKFEDDNELLSAVSEFYANDETFDGMPLKKAIDETKLLFGNLDNSSLNGIYIQNDRSVTNLSNSMFGSWSVIEDLWNKNYDSVNSNSRIKDIQKREDKRKKAYKAEKKLSLSFLQVLISNSENDEIRKKSIVDYYKTSLMQLTDNLSDKYKEAAPLFSENYDNEKGLKNDDKSVSLIKNFLDAIKEIEKFIKPLSETNITGEKNDLFYSQFTPLLDNISRIDILYDKVRNYVTQKPFSTDKIKLNFGNSQLLNGWDKDKEREYGAVLLCKDEKYYLAIIDKSNNSILENIDFQDCNESDYYEKIVYKLLTKISGNLPRVFFSEKRKKLLSPSDEILKIYKSGTFKKGDKFSLDDCHKLIDFYKESFKKYPKWLIYNFKFKKTNEYNDISEFYNDVALQGYNISKMKIPTSFIDKLVDEGKIYLFQLYNKDFSPHSKGTPNLHTLYFKMLFDERNLEDVVYRLNGEAEMFYRPASIKYDKPTHPKNTPIKNKNTLNDKKASTFPYDLIKDKRYTKWQFSLHFPITMNFKAPDRAMINDDVRNLLKSCNNNFIIGIDRGERNLLYVSVIDSNGAIIYQHSLNIIGNKFKGKTYETNYREKLATREKDRTEQRRNWKAIESIKELKEGYISQAVHVICQLVVKYDAIIVMEKLTDGFKRGRTKFEKQVYQKFEKMLIDKLNYYVDKKLDPDEEGGLLHAYQLTNKLESFDKLGTQSGFIFYVRPDFTSKIDPVTGFVNLLYPRYENIDKAKDMISRFDEIRYNAGEDFFEFDIDYDKFPKTASDYRKKWTICTNGERIEAFRNSTNNNEWSYRTIILAEKFKELFDNNSINYRDSDDLKAEILSQTKGKFFEDFFKLLRLTLQMRNSNPETGEDRILSPVKDKNGNFYDSSKYDEKSKLPCDADANGAYNIARKGLWIVEQFKKSDNVSTVEPVIHNDKWLKFVQENDMANN

SEQ ID NO: 594 - protein, 1245 aa, unidentified
  REGION 1..1245: note = Cas Enzyme sequence
MQEHKKISHLTHRNSVQKTIRMQLNPVGKTMDYFQAKQILENDEKLKENYQKIKEIADRFYRNLNEDVLSKTRLDKLKDYAEIYYHCNTDTDRKRLNECASELRKEIVKNFKNRDEYNKLFNKKMIEIVLPKHLKNEDEKEVVASFKNFTTYFTGFFTNRKNMYSDGEESTAIAYRCINENLPKHLDNVKAFEKAISKLSKNAVDDLDATYSGLCGTNLYDVFTVDYFNFLLPQSGITEYNKIIGGYTTSDGTKVKGINEYINLYNQQVSKRDKIPNVKILYKQILSESEKVSFIPPKFEDDNELLSAVSEFYANDETFDGMTLKKAIDETKLLFGNLDNSSLNGIYIQNDRSVTNLSNSMFGSWSVIEDLWNKNYDSVNSNSRIKDIQKREDKRKKAYKAEKKLSLSFLQVLISNSENNEIREKSIVDYYKTSLMQLTDNLSDKYKEAAPLFSENYDNEKGLKNDDKSISLIKNFLDAIKEIEKFIKPLSETNITGEKNDLFYSQFTPLLDNISRIDILYDKVRNYVTQKPFSTDKIKLNFGNSQLLNGWDRNKEKDCGAVWLCKDEKYYLAIIDKSNNSILENIDFQDCDESDCYEKIIYKLLPGPNKMLPKVFFSEKCKKLLSPSDEILKIRKNGTFKKGDKFSLDDCHKLIDFYKESFKKYPNWLIYNFKFKKTNEYNDISEFYNDVALQGYNISKMKIPTSFIDKLVDEGKIYLFQLYNKDFSPHSKGTPNLHTLYFKMLFDERNLEDVVYKLNGEAEMFYRPASIKYDKPTHPKNTPIKNKNTLNDKKASTFPYDLIKDKRYTKWQFSLHFPITMNFKAPDKAMINDDVRNLLKSCNNNFIIGIDRGERNLLYVSVIDSNGAIIYQHSLNIIGNKFKGKTYETNYREKLATREKERTEQRRNWKAIESIKELKEGYISQAVHVICQLVIKYDAIIVMEKLTDGFKRGRTKFEKQVYQKFEKMLIDKLNYYVDKKLDPDKEGGLLHAYQLTNKLESFDKLGTQSGFIFYVRPDFTSKIDPVTGFVNLLYPRYENIDKAKDMISRFDDIRYNAGEDFFEFDIDYDKFPKTASDYRKKWTICTNGERIEAFRNPTSNNEWSYRTIILAEKFKELFDNNSINYRDSDDLKAEIFSQTKGKFFEDFFKLLRLTLQMRNSNPETGEDRILSPVKDKNGNFYDSSKYDEKSKLPCDADANGAYNIARKGLWIVEQFKKSDNVSTVEPVIHNDKWLKFVQENDMANN

SEQ ID NO: 595 - protein, 1245 aa, unidentified
  REGION 1..1245: note = Cas Enzyme sequence
MQEHKKISHLTHRNSVQKTIRMQLNPVGKTMDYFQAKQILENDEKLKEDYQKIKEIADRFYRNLNEDVLSKTGLDKLKDYAEIYYHCNTDADRKRLDECASELRKEIVKNFKNRDEYNKLFNKKMIEIVLPQHLKNEDEKEVVASFKNFTTYFTGFFTNRKNMYSDGEESTAIAYRCINENLPKHLDNVKAFEKAISKLSKNAVDDLDTTYSGLCGTNLYDVFTVDYFNFLLPQSGITEYNKIIGGYTTSDGTKVKGINEYINLYNQQVSKRYKIPNLKILYKQILSESEKVSFIPPKFEDDNELLSAVSEFYANDETFDGMPLKKAIDETKLLFGNLDNSSLNGIYIQNDRSVTNLSNSMFGSWSVIEDLWNKNYDSVNSNSRIKDIQKREDKRKKAYKAEKKLSLSFLQVLISNSENDEIREKSIVDYYKTSLMQLTDNLSDKYKEAAPLFNESYANEKGLKNDDKSISLIKNFLDAIKEIEKFIKPLSETNITGEKNDLFYSQFTPLLDNISRIDILYDKVRNYVTQKPFSTDKIKLNFGNSQLLNGWDRNKEKDCGAVWLCKDEKYYLAIIDKSNNSILENIDFQDCDESDCYEKIIYKLLPGPNKMLPKVFFSEKCKKLLSPSDEILKIRKNGTFKKGDKFSLDDCHKLIDFYKESFKKYPNWLIYNFKFKKTNEYNDISEFYNDVASQGYNISKMKIPTSFIDKLVDEGKIYLFQLYNKDFSPHSKGTPNLHTLYFKMLFDERNLEDVVYKLNGEAEMFYRPASIKYDKPTHPKNTPIKNKNTLNDKRASTFPYDLIKDKRYTKWQFSLHFPITMNFKAPDRAMINDDVRNLLKSCNNNFIIGIDRGERNLLYVSIIDSNGAIIYQHSLNIIGNKFKGKTYETNYREKLATREKERTEQRRNWKAIESIKELKEGYISQAVHVICQLVVKYDAIIVMEKLTDGFKRGRTKFEKQVYQKFEKMLIDKLNYYVDKKLDPDEEGGLLHAYQLTNKLESFDKLGMQSGFIFYVRPDFTSKIDPVTGFVNLLYPRYENIDKAKDMISRFDDIRYNAGEDFFEFDIDYDKFPKTASDYRKKWTICTNGERIEAFRNPASNNEWSYRTIILAEKFKELFDNNSINYRDSDNLKAEILSQTKGKFFEDFFKLLRLTLQMRNSNPETGEDRILSPVKDKNGNFYDSSKYDEKSNLPCDADANGAYNIARKGLWIVEQFKKSDNVSTVEPVIHNDKWLKFVQENDMANN

SEQ ID NO: 596 - protein, 1245 aa, unidentified
  REGION 1..1245: note = Cas Enzyme sequence
MQERKKISHLTHRNSVLKTIRMQLNPVGKTMDYFQAKQILENDEKLKEDYQKIKEIADRFYRNLNEDVLSKTRLDKLKDYAEIYYHCNTDADRKRLDECASELRKEIVKNFKNRDEYNKLFNKKMIEIVLPKHLKNDDEKEVVASFKNFTTYFTGFFTNRKNMYSDGEESTAIAYRCINENLPKHLDNVKAFEKAISKLSKNAIDDLDATYSGLCGTNLYDVFTVDYFNFLLPQSGITEYNKIIGGYTTSDGTKVKGINEYINLYNQQVSKRDKIPNLKILYKQILSESEKVSFIPPKFEDDNELLSAVSEFYANDETFDGMLLKKAIDETKLLFGNLDNSSLNGIYIQNDRSVTNLSNSMFGSWSVIEDLWNKNYDSVNLNSRIKDIQKREDKRKKAYKAEKKLSLSFLQVLISNSENDEIRKKSIVDYYKTSLMQLTDNLSDKYKEAAPLFNENYDNEKGLKNDDKSISLIKNFLDAIKEIEKFIKPLSETNITGEKNDLFYSQFTPLLDNISRIDILYDKVRNYVTQKPFSTDKIKLNFGNSQLLNGWDKDKEREYGAVLLCRDEKYYLAIIDKSNNSILENIDFQDCNESDCYEKIVYKLLTKISGNLPRVFFSEKRKKLLSPSDEILKIYKSGTFKKGDKFSLDDCHKLIDFYKESFKKYPNWLIYNFKFKNTNEYNDISEFYNDVALQGYNISKMKIPTSFIDKLVDEGKIYLFQLYNKDFSPHSKGTPNLHTLYFKMLFDERNLEDVVYRLNGEAEMFYRPASIKYDKPTHPKNTPIKNKNTLNDKKASTFPYDLIKDKRYTKWQFSLHFPITMNFKAPDKAMINNDVRNLLKSCNNNFIIGIDRGERNLLYVSVIDSNGAIIYQHSLNIIGNKFKGKTYETNYREKLATREKDRTEQRRNWKAIESIKELKEGYISQAVHVICQLVVKYDAIIVMEKLTDGFKRGRTKFEKQVYQKFEKMLIDKLNYYVDKKLDPDEEGGLLHAYQLTNKLDSFDKLGTQSGFIFYVRPDFTSKIDPVTGFVNLLYPRYENIDKAKDMISRFDDIRYNAGEDFFEFDIDYDKFPKTASDYRKKWTICTNGERIEAFRNPANNNEWSYRTIILAEKFKELFDNNSINYRDSDDLKAEILSQTKGKFFEDFFKLLRLTLQMRNSNPETGEDRILSPVKDKNGNFYDSSKYDEKSKLPCDADANGAYNIARKGLWIAEQFKKADNVSTVEPVIHNDKWLKFVQENDMANN

SEQ ID NO: 597 - protein, 1245 aa, unidentified
  REGION 1..1245: note = Cas Enzyme sequence
MQERKKISHLTHRNSVQKTIRMQLNPVGKTMDYFQAKQILENDEKLKEDYQKIKKIADRFYRNLNEDVLSKTGLDKLKDYAEIYYHCNTDADRKRLDECASELRKEIVKNFKNRDEYNKLFNKKMIEIVLPKHLKNDDEKEVVASFKNFTTYFTGFFTNRKNMYSDGEESTAIAYRCINENLPKHLDNVKAFEKAISKLSKNAIDDLDATYSGLCGTNLYDVFTVDYFNFLLPQSGITEYNKIIGGYTTSDGTKVKGINEYINLYNQQVSKRDKIPNLKILYKQILSESEKVSFIPPKFEDDNELLSAVSEFYANDETFDGMPLKKAIDETKLLFGNLDNSSLNGIYIQNDRSVTNLSNSMFGSWSVIEDLWNENYDSVNSNSRIKDIQKREDKRKKAYKAEKKLSLSFLQVLISNSENDKIREKSVVDYYKTSLMQLTDNLSDKYKEAAPLFSENYDNEKGLKNDDKSISLIKNFLDAIKEIEKFIKPLSETNITGEKNDLFYSQFTPLLDNISRIDILYDKVRNYVTQKPFSTDKVKLNFGNSQLLNGWDRNKEKDCGAVWLCKDEKYYLAIIDKSNNSILENIDFQDCNESDCYEKIIYKLLPGPNKMLPKVFFSEKCKKLLSPSDEILKIRKNGTFKKGDKFSLDDCHKLIDFYKESFKKYPNWLIYNFKFKKTNEYNDIREFYNDVASQGYNISKMKIPTSFIDKLVDEGKIYLFQLYNKDFSPHSKGTPNLHTLYFKMLFDERNLEDVVYKLNGEAEMFYRPASIKYDKPTHPQNTPIKNKNTLNDKKTSTFPYDLIKDKRYTKWQFSLHFPITMNFKAPDRAMINNDVRNLLKSCNNNFIIGIDRGERNLLYVSVIDSNGAIIYQHSLNIIGNKFKGKTYETNYREKLATREKERTEQRRNWKAIESIKELKEGYISQAVHVICQLVIKYDAIIVMEKLNDGFKRGRTKFEKQVYQKFEKMLIDKLNYYVDKKLDPDEEGGLLHAYQLTNKLESFDKLGTQCGFIFYVRPDFTSKIDPVTGFVNLLYPRYERIDKAKDMISRFDDIRYNAGEDFFEFDIDYDKFPKTASDYRKKWTICTNGERIEAFRNPANNNKWSYRTIILAEKFKELFDNNSINYRDSDDLKAEILSQTKGKFFEDFFKLLRLTLQMRNSNPETGEDRILSPVKDKNGNFYDSSKYDEKSKLPCDADANGAYNIARKGLWIVEQFKKADNVSTVEPVIHNDKWLKFVQENDMANN

SEQ ID NO: 598 - protein, 1245 aa, unidentified
  REGION 1..1245: note = Cas Enzyme sequence
MQERKKISHLTHRNSVLKTIRMQLNPVGKTMDYFQAKQILENDEKLKEDYQKIKEIADRFYRNLNEDVLSKTRLDKLKDYAEIYYHCNTDADRKRLDECASELRKEIVKNFKNRDEYNKLFNKKMIEIVLPKHLKNDDEKEVVASFKNFTTYFTGFFTNRKNMYSDGEESTAIAYRCINENLPKHLDNVKAFEKAISKLSKNAIDDLDATYSGLCGTNLYDVFTVDYFNFLLPQSGITEYNKIIGGYTTSDGTKVKGINEYINLYNQQVSKRDKIPNLKILYKQILSESEKVSFIPPKFEDDNELLSAVSEFYANDETFDGMPLKKAIDETKLLFGNLDNSSLNGIYIQNDRSVTNLSNSMFGSWSVIEDLWNKNYDSVNSNSRIKDIQKREDKRKKAYKAEKKLSLSFLQVLISNSENDEIREKSIVDYYKTSLMQLTDNLSDKYNEAAPLLNENYSNEKGLKNDDKSISLIKNFLDAIKEIEKFIKPLSETNITGEKNDLFYSQFTPLLDNISRIDILYDKVRNYVTQKPFSTDKIKLNFGNSQLLNGWDRNKEKDCGAVWLCKDEKYYLAIIDKSNNSILENIDFQDCDESDCYEKIIYKLLPGPNKMLPKVFFSEKCKKLLSPSDEILKIYKSGTFKTGDKFSLDDCHKLIDFYKESFKKYPNWLIYNFKFKKTNEYNDIREFYNDVALQGYNISKMKIPTSFIDKLVDEGKIYLFQLYNKDFSPHSKGTPNLHTLYFKMLFDERNLEDVVYRLNGEAEMFYRPASIKYDKPTHPKNTPIKNKNTLNDKKTSTFPYDLIKDKRYTKWQFSLHFPITMNFKAPDKAMINDDVRNLLKSCNNNFIIGIDRGERNLLYVSVIDSNGAIIYQHSLNIIGNKFKEKTYETNYREKLATREKERTEQRRNWKAIESIKELKEGYISQAVHVICQLVVKYDAIIVMEKLTDGFKRGRTKFEKQVYQKFEKMLIDKLNYYVDKKLDPDEEGGLLHAYQLTNKLESFDKLGMQSGFIFYVRPDFTSKIDPVTGFVNLLYPQYENIDKAKDMISRFDEIRYNAGEDFFEFDIDYDEFPKTASDYRKKWTICTNGERIEAFRNPANNNEWSYRTIILAEKFKELFDNNSINYRDSDDLKAEILSQTKGKFFEDFFKLLRLTLQMRNSNPETGEDRILSPVKDKNGNFYDSSKYDEKSKLPCDADANGAYNIARKGLWIVEQFKKADNVSTVEPVIHNDQWLKFVQENDMANN

SEQ ID NO: 599 - protein, 1245 aa, unidentified
  REGION 1..1245: note = Cas Enzyme sequence
MQEHKKISHLTHRNSVQKTIRMQLNPVGKTMDYFQAKQILENDEKLKENYQKIKEIADRFYRNLNEDVLSKTRLDKLKDYAEIYYHCNTDADRKRLDECASELRKEIVKNFKNRDEYNKLFNKKMIEIVLPKHLKNEDEKEVVASFKNFTTYFTGFFTNRKNMYSDGEESTAIAYRCINENLPKHLDNVKAFEKAISKLSKNAIDDLDATYSGLCGTNLYDVFTVDCFNFLLPQSGITEYNKIIGGYTTNDGTKVKGINEYINLYNQQVSKRDKIPNLKILYKQILSESEKVSFIPPKFEDDNELLSAVSEFYANDETFDGMPLKKAIDETKLLFGNLDNSSLNGIYIQNDRSVTNLSNSMFGSWSVIEDLWNKNYDSVNSNSRIKDIQKREDKRKKAYKAEKKLSLSFLQVLISNSENDEIRKKSIVDYYKTSLMQLTDNLSDKYNEAAPLFSENYDNEKGLKNDDKSISLIKNFLDAIKEIEKFIKPLSETNITGEKNDLFYSQFTPLLDNISRIDILYDKVRNYVTQKPFSTDKIKLNFGNSQLLNGWDRNKEKDCGAVWLCKDEKYYLAIIDKSNNSILENIDFQDCDESDCYEKIIYKLLPGPNKMLPKVFFSEKCKELLSPSDEILKIRKNGTFKKGDKFSLDDCHKLIDFYKESFKKYPNWLIYNFKFKKTNEYNDIREFYNDVASQGYNISKMKIPTSFIDKLVDEGKIYLFQLYNKDFSPHSKGTPNLHTLYFKMLFDERNLEDVVYKLNGEAEMFYRPASIKYDKPTHPKNTPIKNKNTLNDKKASTFPYDLIKDKRYTKWQFSLHFPITMNFKAPDKAIINDDVRNLLKSCNNNFIIGIDRGERNLLYVSVIDSNGAIIYQHSLNIIGNKFKGKTYETNYREKLATKEKERTEQRRNWKAIESIKELKEGYISQAVHVICQLVVKYDAIIVMEKLTDGFKRGRTKFEKQVYQKFEKMLIDKLNYYVDKKLDPDEEGGLLHAYQLTNKLESFDKLGTQSGFIFYVRPDFTSKIDPVTGFVNLLYPRYENIDKAKDMISRFDDIRYNAGEDFFEFDIDYDKFPKTASDYRKKWTICTNGERIEAFRNPASNNEWSYRTIILAEKFKELFDNNSINYRDSDDLKAEILSQTKGKFFEDFFKLLRLTLQMRNSNPETGEDRILSPVKDKNGNFYDSSKYDEKSKLPCDADANGAYNIARKGLWIVEQFKKSDNVSTVEPVIHNDKWLKFVQENDMANN

SEQ ID NO: 600 - protein, 1245 aa, unidentified
  REGION 1..1245: note = Cas Enzyme sequence
METFSGFTNLYPLSKTLRFRLIPVGETLKHFIGSGILEEDQHRAESYVKVKAIIDDYHRTYIENSLSGFELPLESTGKFNSLEEYYLYHNIRNKTEEIQNLSSKVRTNLRKQVVTQLTKNEIFKRIDKKELIQSDLIDFVKNEPDANEKIALISEFRNFTVYFKGFHENRRNMYSDEEKSTSIAFRLIHENLPKFIDNMEVFAKIQNTSISENFDAIQKELCPELVTLCEMFKLGYFNKTLSQKQIDAYNTVIGGKTTSEGKKIKGLNEYINLYNQQHKQEKLPKMKLLFKQILSDRESASWLLEKFENDSQVVGAMVNFWNTIHDTVLAEGGLKTIIASLGSYGLEGIFLKNDLQLTDISQKATGSWSKISSEIKQKIEAMNPQKKKESYESYQERIDKLFKSYKSFSLAFVNECLRGEYKIEDYFLKLGAVNSSLLQKENHFSHILNTYTDVKEVIGFYSESTDTKLIQDNDSIQKIKQFLDAVKDLQAYVKPLLGNSDETGKDERFYGDLIEYWSLLDLITPLYNMVRNYVTQKPYSVDKIKINFQNPTLLNGWDLNKEMDNTSVILRRDGKYYLAIMNNKSRKVFLKYPSGTDRNCYEKMEYKLLPGANKMLPKVFFSKSRINEFMPNERLLSNYEKGTHKKSGTCFSLDDCHTLIDFFKKSLNKHEDWKNFGFKFSDTSTYEDMSGFYKEVENQGYKLSFKPIDATYVDQLVDEGKIFLFQIYNKDFSEHSKGTPNMHTLYWKMLFDETNLGDVVYKLNGEAEVFFRKASINVSHPTHPANIPIKKKNLKHKDEERILKYDLIKDKRYTVDQFQFHVPITMNFKANGNGNINQKAIDYLRSASDTHIIGIDRGERNLLYLVVIDGNGKICEQFSLNEIEVEYNGEKYSTNYHDLLNVKENERKQARQSWQSIANIKDLKEGYLSQVIHKISELMVKYNAIVVLEDLNAGFMRGRQKVEKQVYQKFEKKLIEKLNYLVFKKQSSDLPGGLMHAYQLANKFESFNTLGKQSGFLFYIPAWNTSKMDPVTGFVNLFDVKYESVDKAKSFFSKFDSIRYNVERDMFEWKFNYDEFTKKAEGTKTDWTVCSYGNRIITFRNPDKNSQWDNKEINLTENIKLLFERFGIDLSSNLKDEIMERTEKEFFIELISLFKLVLQMRNSWTGTDIDYLVSPVCNENGEFFDSRNVDETLPQNADANGAYNIARKGMILLDKIKKNNGEKKLTLSITNREWLSFAQGCCKNG

SEQ ID NO: 601 - protein, 1245 aa, unidentified
  REGION 1..1245: note = Cas Enzyme sequence
MQERKKISHLTHRNSVQKTVRMQLNPVGKTMDYFQAKQILENDEKLKENYQKIKEIADRFYRNLNEDVLSKTGLDKLKDYAEIYYHCNTNADRKRLDECASELRKEIVKNFKNRDEYNKLFNKKMIEIVLPEHLKNEDEKEVVASFKNFTTYFTGFFTNRKNMYSDGEESTAIAYRCINENLPKHLDNVKAFEKAISKLSKNAIDDLDATYSGLCGTNLYDVFTVDYFNFLLSQSGITEYNKIIGGYTTSDGTKVKGINEYINLYNQQVSKRDKIPNLKILYKQILSESEKVSFIPPKFEDDNELLSAVSEFYANDETFDGMPLKKAIDETKLLFGNLDNSSLNGIYIQNDRSVTNLSNSMFGSWSVIEDLWNKNYDSVNSNSRIKDIQKREDKRKKAYKAEKKLSLSFLQVLISNSENDEIREKSIVDYYKTSLMQLTDNLSDKYNEVAPLLNENYSNEKGLKNDDKSISLIKNFLDAIKEIEKFIKPLSETNITGEKNDLFYSQFTPLLDNISRIDILYDKVRNYVTQKPFSTDKIKLNFGNSQLLNGWDRNKEKDCGAVWLCKDEKYYLAIIDKSNNSILENIDFQDCDESDCYEKIIYKLLPGPNKMLPKVFFSEKCKKLLSPSDEILKIRKNGTFKKGDKFSLDDCHKLIDFYKESFKKYPNWLIYNFKFKNTNEYNDISEFYNDVASQGYNISKMKIPTSFIDKLVDEGKIYLFQLYNKDFSPHSKGTPNLHTLYFKMLFDERNLEDVVYKLNGEAEMFYRPASIKYDKPTHPKNTPIKNKNTLNDKKASTFPYDLIKDKRYTKWQFSLHFPITMNFKAPDRAMINDDVRNLLKSCNNNFIIGIDRGERNLLYVSVIDSNGAIIYQHSLNIIGNKFKGKTYETNYREKLATREKERTEQRRNWKAIESIKELKEGYISQAVHVICQLVVKYDAIIVMEKLTDGFKRGRTKFEKQVYQKFEKMLIDKLNYYVDKKLDPDEEGGLLHAYQLTNKLESFDKLGMQSGFIFYVRPDFTSKIDPVTGFVNLLYPRYENIDKAKDMISRFDDIRYNAGEDFFEFDIDYDKFPKTASDYRKKWTICTNGERIEAFRNPASNNEWSYRTIILAEKFKELFDNNSINYRDSDDLKAEILSQTKGKFFEDFFKLLRLTLQMRNSNPETGEDRILSPVKDKNGNFYDSSKYDEKSKLPCDADANGAYNIARKGLWIVEQFKKADNVSTVELVIHNDKWLKFVQENDMANN

SEQ ID NO: 602 - protein, 1245 aa, unidentified
  REGION 1..1245: note = Cas Enzyme sequence
MQEHKKISHLTHRNSVQKTIRMQLNPVGKTMDYFQAKQILENDEKLKEDYQKIKKIADRFYRNLNEDVLSKIRLDKLKDYAEIYYHCDTDADRKRLNECASELRKEIVKNFKNRDEYNKLFNKKMIEIVLPKHLKNDDEKEVVASFKNFTTYFTGFFTNRKNMYSDGEESTAIAYRCINENLPKHLDNVKVFEKAISKLSKNAIDDLDATYSGLCGTNLYDVFTVDYFNFLLPQSGITEYNKIIGGYTTSDGTKVKGINEYINLYNQQVSKRDKIPNLKILYKQILSESERVSFIPPKFEDDNELLSAVSEFYANDETFDGMPLKKAIDETKLLFGNLDNSSLNGIYIQNDRSVTNLSNSMFGSWSVIEDLWNKNYDSVNSNSRIKDIQKREDKRKKAYKAEKKLSLSFLQVLISNSENDEIREKSIVDYYKTSLMQLTDNLSDKYNEAAPLLNENYSNEKGLKNDDKSISLIKNFLDAIKEIEKFIKPLSETNITGEKNDLFYSQFTPLLDNISRIDILYDKVRNYVTQKPFSTDKIKLNFGNSQLLNGWDRNKEKDCGAVWLCKDEKYYLAIIDKSNNSILENIDFQDCDESDCYEKIIYKLLPGPNKMLPKVFFSEKCKKLLSPSDEILKIYKSGTFKKGDKFSLDDCHKLIDFYKESFKKYPKWLIYNFKFKNTNEYNDISEFYNDVALQGYNISKMKIPTTFIDKLVDEGKIYLFQLYNKDFSPHSKGTPNLHTLYFKMLFDERNLEDVVYKLNGEAEMFYRPASIKYDKPTHPKNTPIKNKNTLNDKKASTFPYDLIKDKRYTKWQFSLHFPITMNFKAPDKAMINDDVRNLLKSCNNNFIIGIDRGERNLLYVSVIDSNGAIIYQHSLNIIGNKFKGKTYETNYREKLATKEKERTEQRRNWKAIESIKELKEGYISQAVHVICQLVVKYDAIIVMEELTDGFKRGRTKFEKQVYQKFEKMLIDKLNYYVDKKLDPDEEGGLLHAYQLTNKLESFDKLGTQSGFIFYVRPDFTSKIDPVTGFVNLLYPRYEKIDKAKDMISRFDDIRYNAGEDFFEFDIDYDKFPKTASDYRKKWTICTNGERIEAFRNPANNNEWSYRTIILAEKFKELFDNNSINYRDSDDLKAEILSQTNGKFFEDFFKLLRLTLQMRNSNPETGEDRILSPVKDKNGNFYDSSKYDEKSKLPCDADANGAYNIARKGLWIVEQFKKADNVSTVEPVIHNDKWLKFVQENDMANN

SEQ ID NO: 603 - protein, 1245 aa, unidentified
  REGION 1..1245: note = Cas Enzyme sequence
MQEHKKISHLTHRNSVQKTIRMQLNPVGKTMDYFQAKQILENDEKLKEDYQKIKEIADRFYRNLNEDVLSKTGLDKLKDYAEIYYHCNTDADRKRLNECASELRKEIVKNFKNRDEYNKLFNKKMIEIVLPKYLKNEDEKEVVASFKNFTTYFTGFFTNRKNMYSDGEESTAIAYRCINENLPKHLDNVKVFEKAISKLSKNAIDDLDATYSGLCGTNLYDVFTVDYFNFLLPQSGITEYNKIIGGYTTSDGTKVKGINEYINLYNQQVSKRDKIPNLKILYKQILSESEKVSFIPPKFEDDNELLSAVSEFYANDETFDGMPLKKAIDETKLLFGNLDNSSLNGIYIQNDRSVTNLSNSMFGSWSVIEDLWNKNYDSVNSNSRIKDIQKREDKRKKAYKAEKKLSLSFLQVLISNSENDEIREKSIVDYYKTSLMQLTDNLSDKYKEAAPLFSENYDNEKGLKNDDKSISLIKNFLDAIKEIEKFIKPLSETNITGEKNDLFYSQFTPLLDNISRIDILYDKVRNYVTQKPFSTDKSKLNFGNSQLLNGWDRNKEKDCGAVWLCKDEKYYLAIIDKSNNRILENIDFQDCDESDYYEKIVYKLLPGPNKMLPKVFFSEKCKKLLSPSDEILKIRKNGTFKKGDKFSLDDCHKLIDFYKESFKKYPNWLIYNFKFKNTNEYNDISEFYNDVALQGYNISKMKIPTSFIDKLVDEGKIYLFQLYNKDFSPHSKGTPNLHTLYFKMLFDERNLEDVVYKLNGEAEMFYRPASIKYDKPTHPKNTPIKNKNTLNDKKASTFPYDLIKDKRYTKWQFSLHFPITMNFKAPDRAMINDDVRNLLKSCNNNFIIGIDRGERNLLYVSVIDSNGAIIYQHSLNIIGNKFKGKTYETNYREKLATREKDRTEQRRNWKAIESIKELKEGYISQAVHVICQLVVKYDAIIVMEKLTDGFKRGRTKFEKQVYQKFEKMLIDKLNYYVDKKLDPDEEGGLLHAYQLTNKLESFDKLGTQSGFIFYVRPDFTSKIDPVTGFVNLLYPRYENIDKAKDMISRFDDIRYNAGEDFFEFDIDYDKFPKTASDYRKKWTICTNGERIEAFRNPANNNEWSYRTIILAEKFKELFDNNSINYRDSDNLKAEILSQTKGKFFEDFFKLLRLTLQMRNSNPETGEDRILSPVKDKNGNFYDSSKYDEKSKLPCDADANGAYNIARKGLWIVEQFKKADNVSTVEPVIHNDKWLKFVQENDMANN

SEQ ID NO: 604 - protein, 1245 aa, unidentified
  REGION 1..1245: note = Cas Enzyme sequence
MQERKKISHLTHRNSVKKTIRMQLNPVGKTMDYFQAKQILENDEKLKENYQKIKEIAERFYRNLNEDVLSKTGLDKLKDYADIYYHCNTNADRKKLDECASELRKEIVKNFKNRDEYNKLFNKKMIEIVLPKHLKNDDEKEVVASFKNFTTYFTGFFTNRKNMYSDGEESTAIAYRCINENLPKHLDNVKVFEKAISKLSKNAIDDLDATYSGLCGTNLYDVFTVDYFDFLLSQSGITEYNKIIGGYTTSDGTKIKGINEYINLYNQQVSKRDKIPNLKILYKQILSESEKVSFIPPKFEDDNELLSAVSEFYANDETFDGMPLKKAIDETKLLFGNLDNSSLNGIYIQNDRSVTNLSNSMFGSWSVIEDLWNKNYDSVNSNSRIKDIQKCEDKRKKAYKAEKKLSLSFLQVLISNSENDEIRKKSIVDYYKTSLMQLTDNLSDKYKEAAPMFSENYDNEKGLKNDDKSISLIKNFLDAIKEIEKFIKPLSETNITGEKNDLFYSQFTPLLDNISRIDILYDKVRNYVTQKPFSTDKIKLNFGNYQLLNGWDKDKEREYGAVLLCKDEKYYLAIIDKSNNRILENIDFQDCDESDYYEKIVYKLLTKISGNLPRVFFSEKCKKLLSPSDEILKIYKNGTFKKGDKFSLDDCHKLIDFYKESFKKYPKWLIYNFKFKKTNEYNDIREFYNDVALQGYNISKMKIPTSFIDKLVDEGKIYLFQLYNKDFSPHSKGTPNLHTLYFKMLFDERNLEDVVYRLNGEAKMFYRPASIKYDKPTHPKNTPIKNKNTLNDKRASTFPYDLIKDKRYTKWQFSLHFPITMNFKAPDKAMINDDVRNLLKSCNNNFIIGIDRGERNLLYVSVIDSNGAIIYQHSLNIIGNKFKGKTYETNYREKLATREKERTEQRRNWKAIESIKELKEGYISQAVHVICQLVVKYDAIIVMEKLTDGFKRGRTKFEKQVYQKFEKMLIDKLNYYVDKKLDPDEEGGLLHAYQLTNKLESFDKLGTQSGFIFYVRPDFTSKIDPVTGFVNLLYPRYENIDKAKDMISRFDEIRYNAGEDFFEFDIDYDKFPKTASDYRKRWTICTNGERIEAFRNPASNNEWSYRTIILAEKFKELFDNNSINYRDSDDLKAEILSQTKGKFFEDFFKLLRLTLQMRNSNPETGEDRILSPVKDKNGNFYDSSKYDEKSKLPCDADANGAYNIARKGLWIVEQFQKADNVSAVEPVIHNDKWLKFVQENDMANN

SEQ ID NO: 605 - protein, 1245 aa, unidentified
  REGION 1..1245: note = Cas Enzyme sequence
MQEHKKISHLTHRNSVKKTIRMQLNPVGKTMDYFQAKQILENDEKLKENYQKIKEIADRFYRNLNEDVLSKTRLDKLKDYADIYYHCNTDADRKRLNECASELRKEIVKNFKNRDEYNKLFNKKMIEIVLPKHLKNEDEKEVVTSFKNFTTYFTGFFTNRKNMYSDGEESTAIAYRCINENLPKHLDNVKAFEKAISKLSKNAIDDLDATYSGLCGTNLYDVFTVDYFNFLLPQSGITEYNKIIGGYTTSDGTKVKGINEYINLYNQQVSKRDKIPNLKILYKQILSESEKISFIPPKFEDDNELLSAVSEFYANDETLDGMPLKKAIDETKLLFGNLDNSSLNGIYIQNDRSVTNLSNSMFGSWSVIEDLWNKNYDSVNLNSRIKDIQKREDKRKKAYKAEKKLSLSFLQVLISNSENDEIKEKSIVDYYKTSLMQLTDNLSGKYNEAAPLFSENYDNEKGLKNDDKSISLIKNFLDAIKEIEKFIKPLSETNITGEKNDLFYSQFTPLLDNISRIDILYDKVRNYVTQKPFSTDKIKLNFGNSQLLNGWDRNKEKDCGAVWLCKDEKYYLAIIDKSNNRILENIDFQDCDESDCYEKIIYKLLPTPNKMLPKVFFSEKCKKLLSPSDEILKIRKNGTFKKGDKFSLDDCHKLIDFYKESFKKYPNWLIYNFKFKKTNEYNDIREFYNDVASQGYNISKMKIPTSFIDKLVDEGKIYLFQLYNKDFSPHSKETPNLHTLYFKMLFDERNLEDVVYKLNGEAEMFYRPASIKYDKPTHPKNTPIKNKNTLNDKKASTFPYDLIKDKRYTKWQFSLHFPITMNFKAPDKAMINDDVRNLLKSCNNNFIIGIDRGERNLLYVSVIDSNGSIIYQHSLNIIGNKFKGKTYETNYREKLATREKERTEQRRNWKAIESIKELKEGYISQAVHVICQFVVKYDAIIVMEKLTDGFKRGRTKFEKQVYQKFEKMLIDKLNYYVDKKLDPDEEGGLLHAYQLTNKLESFDKLGTQSGFIFYVRPDFTSKIDPVTGFINLLYPRYENIDKAKDMISRFDEIRYNAGEDFFEFDIDYDKFPKTASDYRKKWTICTNGERIEAFRNPANNNEWSYRTIILAEKFKELFDNNSINYRDSDDLKAEILSQTNGKFFEDFFKLLRLTLQMRNSNPETGEDRILSPVKDKNGNFYDSSKHDEKSKLPCDADANGAYNIARKGLWIVEQFKKADNISTVEPVIHNDKWLKFVQENDMANN

SEQ ID NO: 606 - protein, 1245 aa, unidentified
  REGION 1..1245: note = Cas Enzyme sequence
MQEHKKISHLTHRNSVQKTIRMQLNPVGKTMDYFQAKQILENDEKLKEDYQKIKEIADRFYRNLNEDVLSKTRLDKLKDYAEICYHCNTDADRKRLDECASELRKEIVKNFKNRDEYNKLFDKRMIEIVLPKHLKNEDEKEVVASFKNFTTYFTGFFTNRKNMYSDGEESTAIAYRCINENLPKHLDNVKVFEKAISKLSKNTIDDLDATYSGLCGTNLYDVFTVDYFNFLLPQSGITEYNKIIGGYTTSDGTKVKGINEYINLYNQQVSKRDKIPNLKILYKQILSESEKVSFIPPKFEDDNELLSAVSEFYANDETFDGMPLKKAIDETKLLFGNLDNSSLNGIYIQNDRSVTNLSNSMFGSWSVIEDLWNKNYDSVNSNSRIKDIQKREDKRKKAYKAEKKLSLSFLQVLISNSENDEIREKSIVDYYKTSLMQLTDNLSDKYKEAAPLFNESYANEKGLKNDDKSISLIKNFLDAIKEIEKFIKPLSETNITGEKNDLFYSQFTPLLDNISRIDILYDKVRNYVTQKPFSTDKIKLNFGNYQLLNGWDKDKEREYGAVLLCRDEKYYLAIIDKSNNRILENIDFQDCDESDCYEKIIYKLLPTPNKMLPKVFFAKKHKKLLSPSDEILKIYKNGTFKKGDKFSLDDCHKLIDFYKESFKKYPKWLIYNFKFKKTNEYNDIREFYNDVALQGYNISKMKIPTSFIDKLVDEGKIYLFQLYNKDFSPHSKGTPNLHTLYFKMLFDERNLEDVVYRLNGEAEMFYRPASIKYDKPTHPKNTPIKNKNTLNDKKASTFPYDLIKDKRYTKWQFSLHFPITMNFKDPDKAMINDDVRNLLKSCNNNFIIGIDRGERNLLYVSVIDSNGAIIYQHSLNIIGNKFKGKTYETNYREKLATREKDRTEQRRNWKAIESIKELKEGYISQAVHVICQLVVKYDAIIVMEKLTDGFKRGRTKFEKQVYQKFEKMLIDKLNYYVDKKLDPDEEGGLLHAYQLTNKLKSFDKLGTQSGFIFYVRPDFTSKIDPVTGFVNLLYPRYEKIDKAKDMISRFDDIRYNAGEDFFEFDIDYDKFPKTASDYRKKWTICTNGERIEAFRNPAKNNEWSYRTIILAEKFKELFDNNSINYRDSDDLKAEILSQTKGKFFEDFFKLLRLTLQMRNSNPETGEDRILSPVKDKNGNFYDSSKYDEKSKLPCDADANGAYNIARKGLWIVEQFQKADNVSAVEPVIHNDKWLKFVQENDMANN

SEQ ID NO: 607 - protein, 1245 aa, unidentified
  REGION 1..1245: note = Cas Enzyme sequence
METFSGFTNLYPLSKTLRFRLIPVGETLKHFIDSGILEEDQHRAESYVKVKAIIDDYHRAYIENSLSGFELPLESTGKFNSLEEYYLYHNIRNKTEEIQNLSSKVRTNLRKQVVAQLTKNEIFKRIDKKELIQSDLIDFVKNEPDANEKIALISEFRNFTVYFKGFHENRRNMYSDEEKSTSIAFRLIHENLPKFIDNMEVFAKIQNTSISENFDAIQKELCPELVTLCEMFKLGYFNKTLSQKQIDAYNTVIGGKTTSEGKKIKGLNEYINLYNQQHKQEKLPKMKLLFKQILSDRESASWLPEKFENDSQVVGAIVNFWNTIHDTVLAEGGLKTIIASLGSYGLEGIFLKNDLQLTDISQKATGSWGKISSEIKQKIEVMNPQKKKESYETYQERIDKIFKSYKSFSLAFINECLRGEYKIEDYFLKLGAVNSSSLQKENHFSHILNTYTDVKEVIGLYSESTDTKLIQDNDSIQKIKQFLDAVKDLQAYVKPLLGNGDETGKDERFYGDLIEYWSLLDLITPLYNMVRNYVTQKPYSVDKIKINFQNPTLLNGWDLNKETDNTSVILRRDGKYYLAIMNNKSRKVFLKYPSGTDRNCYEKMEYKLLPGANKMLPKVFFSKSRINEFMPNERLLSNYEKGTHKKSGTCFSLDDCHTLIDFFKKSLDKHEDWKNFGFKFSDTSTYEDMSGFYKEVENQGYKLSFKPIDATYVDQLVDEGKIFLFQIYNKDFSEHSKGTPNMHTLYWKMLFDETNLGDVVYKLNGEAEVFFRKASINVSHPTHPANIPIKKKNLKHKDEERILKYDLIKDKRYTVDQFQFHVPITMNFKADGNGNINQKAIDYLRSASDTHIIGIDRGERNLLYLVVIDGNGKICEQFSLNEIEVEYNGEKYSTNYHDLLNVKENERKQARQSWQSIANIKDLKEGYLSQVIHKISELMVKYNAIVVLEDLNAGFMRGRQKVEKQVYQKFEKKLIEKLNYLVFKKQSSDLPGGLMHAYQLANKFESFNTLGKQSGFLFYIPAWNTSKMDPVTGFVNLFDVKYESVDKAKSFFSKFDSIRYNVERDMFEWKFNYGEFTKKAEGTKTDWTVCSYGNRIITFRNPDKNSQWDNKEINLTENIKLLFERFGIDLSSNLKDEIMQRTEKEFFIELISLFKLVLQMRNSWTGTDIDYLVSPVCNENGEFFDSRNVDETLPQNADANGAYNIARKGMILLDKIKKSNGEKKLALSITNREWLSFAQGCCKNG

SEQ ID NO: 608 - protein, 1245 aa, unidentified
  REGION 1..1245: note = Cas Enzyme sequence
MQEHKKISHLTHRNSVQKTIRMQLNPVGKTMDYFQAKQILENDEKLKEDYQKIKEIADRFYRNLNEDVLSKTRLDKLKDYAEIYYHCNTDADRKRLNECASELRKEIVKNFKNRDEYNKLFNKKMIEIVLPQHLKNEDEKEVVASFKNFTTYFTGFFTNRKNMYSDGEESTAIAYRCINENLPKHLDNVKVFEKAISKLSKNAIDDLDATYSSLCGTNLYDVFTVDYFNFLLPQSGITEYNKIIGGYTTSDGTKVKGINEYINLYNQQVSKRDKIPNLKILYKQILSESEKVSFIPPKFEDDNELLSAVSEFYANDETFDGMPLKKAIDETKLLFGNLDNSSLNGIYIQNDRSVTNLSNSMFGSWSVIEDLWNKNYDSVNSNSRIKDIQKREDKRKKAYKAEKKLSLSFLQVLISNSENDEIREKSIVDYYKTSLMQLTDNLSDKYKEAAPLFSENYDNEKGLKNDDKSISLIKNFLDAIKEIEKFIKPLSETNITGEKNDLFYSQFTPLLDNISRIDILYDKVRNYVTQKPFSTDKIKLNFGNSQLLNGWDRNKEKDCGAVWLCKDEKYYLAIIDKSNNSILENIDFQDCDESDCYEKIIYKLLPGPNKMLPKVFFSEKCKKLLSPSDEILKIRKNGTFKKGDKFSLDDCHKLIDFYKESFKKYPNWLIYNFKFKNTNEYNDIREFYNDVASQGYNISKMKIPTSFIDKLVDEGKIYLFQLYNKDFSPHSKGTPNLHTLYFKMLFDERNLEDVVYKLNGEAEMFYRPASIKYDKPTHPKNTPIKNKNTLNDKKASTFPYDLIKDKRYTKWQFSLHFPITMNFKAPDRAMINDDVRNLLKSCNHNFIIGIDRGERNLLYVSVIDSNGAIIYQHSLNIIGNKFKGKTYETNYREKLATKEKERTEQRRNWKAIESIKELKEGYISQAVHVICQLVVKYDAIIVMEKLTDGFKRGRTKFEKQVYQKFEKMLIDKLNYYVDKKLDPDEEGGLLHAYQLTNKLESFDKLGMQSGFIFYVRPDFTSKIDPVTGFVNLLYPRYENIDKAKDMISRFDDIRYNAGEDFFEFDIDYDKFPKTASDYRKKWTICTNGERIEAFRNPANNNEWSYRTIILAEKFKELFDNNSINYCDSDDLKAEILSQTKGKFFEDFFKLLRLTLQMRNSNPETGEDRILSPVKDKNGNFYDSSKYDEKSKLPCDADANGAYNIARKGLWIVEQFKKADNVSAVEPVIHNDKWLKFVQENDMANN

SEQ ID NO: 609 - protein, 1245 aa, unidentified
  REGION 1..1245: note = Cas Enzyme sequence
MQEHKKISHLTHRNSVQKTVRMQLNPVGKTMDYFQAKQILENDEKLKEDYQKIKEIADRFYRNLNEDVLSKTGLDKLKDYAEIYYHCNTDADRKRLNECASELRKEIVKNFKNRDEYNKLFNKKMIEIVLPKHLKNDDEKEVVASFKNFTTYFTGFFTNRKNMYSDGEESTAIAYRCINENLPKHLDNVKAFEKAISKLSKNAVDDLDATYSGLCGTNLYDVFTVDYFNFLLPQSGITEYNKIIGGYTTSDGTKVKGINEYINLYNQQVSKRDKIPNLKILYKQILSESEKVSFIPPKFEDDNELLSAVSEFYANDETFDGMPLKKAIDETKLLFGNLDNSSLNGIYIQNDRSVTNLSNSMFGSWSVIEDLWNKNYDSVNLNSRIKDIQKREDKRKKAYKAEKKLSLSFLQVLISNSENDEIRKKSIVDYYKTSLMQLTDNLSDKYNEAAPLLNESYDNEKGLKNDDKSISLIKNFLDVIKEIEKFIKPLSETNITGEKNDLFYSQFTPLLDNISRIDILYDKVRNYVTQKPFSTDKIKLNFGNSQLLNGWDRNKEKDCGAVWLCKDEKYYLAIIDKSNNSILENIDFQDCDESDCYEKIIYKLLPGPNKMLPKVFFSEKCKELLSPSDEILKIRKNGTFKKGDKFSLDDCHKLIDFYKESFKKYPNWLIYNFKFKNTNEYNDISEFYNDVASQGYNISKMKIPTSFIDKLVDEGKIYLFQLYNKDFSPHSKGTPNLHTLYFKMLFDERNLEDVVYKLNGEAEMFYRPASIKYDKPTHPKNTPIKNKNTLNDKKASTFPYDLIKDKRYTKWQFSLHFPITMNFKAPDKAMINDDVRNLLKSCNNNFIIGIDRGERNLLYVSVIDSNGAIIYQHSLNIIGNKFKGKTYETNYREKLATREKERTEQRRNWKAIESIKELKEGYISQAVHAICQLVVKYDAIIVMEKLTDGFKRGRTKFEKQVYQKFEKMLIDKLNYYVDKKLDPDEEGGLLHAYQLTNKLESFDKLGTQSGFIFYVRPDFTSKIDPVTGFVNLLYPQYENIDKAKDMISRFDEIRYNAGEDFFEFDIDYDEFPKTASDYRKKWTICTNGERIEAFRNPANNNEWSYRTIILAEKFKELFDNNSINYRDSDDLKAEILTQTKGKFFEDFFKLLRLTLQMRNSNPETGEDRILSPVKDKNGNFYDSSKYDEKSKLPCDADANGAYNIARKGLWIVEQFKKSDNVSTVEPVIHNDKWLKFVQENDMANN

SEQ ID NO: 610 - protein, 1245 aa, unidentified
  REGION 1..1245: note = Cas Enzyme sequence
MQEHKKISHLTHRNSVQKTIRMQLNPVGKTMDYFQAKQILENDEKLKEDYQKIKEIADRFYRNLNEDVLSKTGLDKLKDYAEIYYHCNTDADRKRLNECASELRKEIVKNFKNRDEYNKLFNKKMIEIVLPQHLKNEDEKEVVASFKNFATYFTGFFTNRKNMYSDGEESTAIAYRCINENLPKHLDNVKAFEKAISKLSKNAIDDLEATYSGLCGTNLYDVFTVDYFNFLLPQSGITEYNKIIGGYTTSDGTKVKGINEYINLYNQQVSKRDKIPNLKILYKQILSESEKVSFIPPKFEDDNELLSAVSEFYANDETFDGMPLKKAIDETKLLFGNLDNSSLNGIYIQNDRSVTNLSNSMFGSWSVIEDLWNKNYDSVNLNSRIKDIQKYEDKRKKAYKAEKKLSLSFLQVLISNSENDEIREKSIVDYYKTSLMQLNDNLSDKYKEAAPLLSENYDNKKGLKNDDKSISLIKNFLDAIKEIEKFIKPLSETNITGEKNDLFYSQFTPLLDNISRIDILYDKVRNYVTQKPFSTDKIKLNFGNSQLLNGWDRNKEKDCGAVWLCKDEKYYLAIIDKSNNSILENIDFQDCDESDCYEKIIYKLLPGPNKMLPKVFFSEKCKKLLSPSDEILKIYKNGTFKKGDKFSLDDCHKLIDFYKESFKKYPKWLIYNFKFKKTNEYNDIREFYNDVALQGYNISKMKIPTSFIDKLVDEGKIYLFQLYNKDFSPHSKGTPNLHTLYFKMLFDERNLEDVVYRLNGEAEMFYRPASIKYDKPTHPKNTPIKNKNTLNDKKASTFPYDLIKDKRYTKWQFSLHFPITMNFKAPDRAMINDDVRNLLKSCNNNFIIGIDRGERNLLYVSVIDSNGAIIYQHSLNIIGNKFKGKTYETNYREKLATREKERTEQRRNWKAIESIKELKEGYISQAVHVICQLVVKYDAIIVMEKLTDGFKRGRTKFEKQVYQKFEKMLIDKLNYYVDKKLDPDEEGGLLHAYQLTNKLESFDKLGTQSGFIFYVRPDFTSKIDPVTGFVNLLYPRYEKIDKAKDMISRFDDIRYNAGEDFFEFDIDYDKFPKTASDYRKKWTICTNGERIEAFRNPANNNEWSYRTIILAEKFKELFDNNSINYRDSDDLKAEILSQTKGKFFEDFFKLLRLTLQMRNSNPETGEDRILSPVKDKNGNFYDSSKYDEKSKLPCDADANGAYNIARKGLWIVEQFKKADNVSTVEPVIHNDKWLKFVQENDMANN

SEQ ID NO: 611 - protein, 1245 aa, unidentified
  REGION 1..1245: note = Cas Enzyme sequence
MQERKKISHLTHRNSVLKTIRMQLNPVGKTMDYFQAKQILENDEKLKEDYQKIKEIADRFYRNLNEDVLSKTRLDKLKDYAEIYYHCNTDADRKRLNECASELRKEIVKNFKNRDEYNKLFNKKMIEIVLPKHLKNEDEKEVVASFKNFTTYFTGFFTNRKNMYSDGEESTAIAYRCINENLPKHLDNVKAFEKAISKLSKNAIDDLDTTYSGLCGTNLYDVFTVDYFNFLLPQSGITEYNKIIGGYTTSDGTKVKGINEYINLYNQQVSKRDKIPNLKILYKQILSESEKVSFIPPKFEDDNELLSAVSEFYANDETFDGMPLKKAIDETKLLFGNLDNSSLNGIYIQNDRSVTNLSNSMFGSWSVIEDLWNKNYDSVNLNSRVKDIQKYEDKRKKAYKAEKKLSLSFLQVLISNSENDEIRKKSIVDYYKTSLMQLTDNLSDKYNEATPLFSENYDNEKGLKNDDKSISLIKNFLDAIKEIEKFIKPLSETNITGEKNDLFYSQFTPLFDNISRIDILYDKVRNYVTQKPFSTDKIKLNFGNSQLLNGWDRNKEKDCGAVWLCKDEKYYLAIIDKSNNSILENIDFQDCDESDCYEKIIYKLLPGPNKMLPKVFFSEKCRKLLSPSDEILKIRKNGTFKKGDKFSLDDCHKLIDFYKESFKKYPNWLIYNFKFKSTNEYNDISEFYNDVASQGYNISKMKIPTSFIDKLVDEGKIYLFQLYNKDFSPHSKGTPNLHTLYFKMLFDERNLEDVVYKLNGEAEMFYRPASIKYDKPTHPKNTPIKNKNTLNDKKASTFPYDLIKDKRYTKWQFSLHFPITMNFKAPDRAMINDDVRNLLKSCNNNFIIGIDRGERNLLYVSVIDSNGAIIYQHSHNIIGNKFKGKTYETNYREKLATREKDRTEQRRNWKAIESIKELKEGYISQAVHVICQLVVKYDAIIVMEKLTDGFKRGRTKFEKQVYQKFEKMLIDKLNYYVDKKLDPDEEGGLLHAYQLTNKLDSFDKLGTQSGFIFYVRPDFTSKIDPVTGFVNLLYPRYENIDKAKDMISRFDDIRYNAGEDFFEFDIDYDKFPKTASDYRKKWTICTNGERIEAFRNPANNNEWSYRTIILAEKFKELFDNNSINYRDSDDLKAEILSQTKGKFFEDFFKLLRLTLQMRNSNPETGEDRILSPVKDKNGNFYDSSKYDEKSKLPCDADANGAYNIARKGLWIAEQFKKADNVSTVEPVIHNDKWLKFVQENDMANN

SEQ ID NO: 612 - protein, 1245 aa, unidentified
  REGION 1..1245: note = Cas Enzyme sequence
MQEHKKISHLTHRNSVKKTIRMQLNPVGKTMDYFQAKQILENDEKLKENYQKIKEIADRFYRNLNEDVLSKTGLDKLKDYAEIYYHCNTDADRKRLDECASELRKEIVKNFKNRDEYNKLFDKRMIEIVLPQHLKNEDEKEVVASFKNFTTYFTGFFTNRKNMYSDGEESTAIAYRCINENLPKHLDNVKAFEKAISKLSKNAIDDLDATYSGLCGTNLYDVFTVDYFNFLLPQSGITEYNKIIGGYTTSDGTKVKGINEYINLYNQQVSKRDKIPNLQILYKQILSESEKVSFIPPKFEDDNELLSAVSEFYANDETFDGMPLKKAIDETKLLFGNLDNSSLNGIYIQNDRSVTNLSNSMFGSWSVIEDLWNKNYDSVNSNSRIKDIQKREDKRKKAYKAEKKLSLSFLQVLISNSENDEIRKKSIVDYYKTSLMQLTNNLSDKYNEAAPLFSENYDNEKGLKNDDKSISLIKNFLDAIKEIEKFIKPLSETNITGEKNDLFYSQFTPLLDNISRIDILYDKVRNYVTQKPFSTDKIKLNFDNYQLLNGWDKDKEREYGAVLLCKDEKYYLAIIDKSNNRILENIDFQDCDESDCYEKIIYKLLPTPNKMLPKVFFAKKHKKLLSPSDEILKIYKSGTFKKGDKFSLDDCHKLIDFYKESFKKYPKWLIYNFKFKKTNEYNDIREFYNDVALQGYNISKMKIPTSFIDKLVDEGKIYLFQLYNKDFSPHSKGTPNLHTLYFKMLFDERNLEDVVYRLNGEAEMFYRPASIKYDKPTHPKNTPIKNKNTLNDKKASTFPYDLIKDKRYTKWQFSLHFPITMNFKAPDRAMINDDVRNLLKSCNNNFIIGIDRGERNLLYVSVIDSNGAIIYQHSLNIIGNKFKGKTYETNYQEKLATREKERTEQRRNWKAIESIKELKEGYISQAVHVICQLVVKYDAIIVMEKLTDGFKRGRTKFEKQVYQKFEKMLIDKLNYYVDKKLDPDEEGGLLHAYQLTNKLESFDKLGTQSGFIFYVRPDFTSKIDPVTGFVNLLYPRYENIDKAKDMISRFDDIRYNAGEDFFEFDIDYDKFPKTASDYRKKWTICTNGERIEAFRNPANNNEWSYRTIILAEKFKELFDNNSINYRDSDDLKAEILSQTKGKFFEDFFKLLRLTLQMRNSNPETGEDRILSPVKDKNGNFYDSSKYDEKSKLPCDADANGAYNIARKGLWIVEQFKKSDNVSTVEPVIHNDKWLKFVQENDMANN

SEQ ID NO: 613 - protein, 1245 aa, unidentified
  REGION 1..1245: note = Cas Enzyme sequence
MQERKKISHLTHRNSVQKTIRMQLNPVGKTMDYFQAKQILENDEKLKENYQKIKDIADRFYRNLNEDVLSKTGLDKLKDYAEIYYHCNTDADRKRLDECASELRKEIVKNFKNRDEYNKLFNKKMIEIVLPKHLKNEDEKEVVASFKNFTTYFTGFFTNRKNMYSDGEESTAIAYRCINENLPKHLDNVKAFEKAISKLSKNAIDDLDATYSGLCGTNLYDVFTVDYFDFLLSQSGITEYNKIIGGYTTSDGTKVKGINEYINLYNQQVSKRDKIPNLKILYKQILSESEKVSFIPPKFEDDNELLSAVSEFYANNETLDGMPLKKAIDETKLLFGNLDNSSLNGIYIQNDRSVTNLSNSMFGSWSVIEDLWNKNYDSVNSNSRIKDIQKREDKRKKAYKAEKKLSLSFLQVLISNSENDEIREKSIVDYYKTSLMQLTDNLSDKYNEAAPLLNENYSNEKGLKNDDKSISLIKNFLDAIKEIEKFIKPLSETNITGEKNDLFYSQFTPLLDNISRIDILYDKVRNYVTQKPFSTDKIKLNFGNSQLLNGWDKDKEREYGAVLLCRDEKYYLAIIDKSNNSILENIDFQDCDESNYYEKIVYKLLTKISGNLPRVFFSEKRKKLLSPSDEILKIYKSGTFKKGDKFSLDDCHKLIDFYKESFKKYPNWLIYNFKFKKTNEYNDISEFYNDVALQGYNISKMKIPTSFIDKLVDEGKIYLFQLYNKDFSPHSKGTPNLHTLYFKMLFDERNLEDVVYRLNGEAEMFYRPASIKYDKPTHPKNTPIKNKNTLNDKKASTFPYDLIKDKRYTKWQFSLHFPITMNFKAPDKAMINDDVRNLLKSCNNNFIIGIDRGERNLLYVSVIDSNGAIIYQHSLNIIGNKFKGKTYETNYREKLATREKERTEQRRNWKAIESIKELKEGYISQAVHVICQLVVKYDAIIVMEKLTDGFKRGRTKFEKQVYQKFEKMLIVKLNYYVDKKLDPDEEGGLLHAYQLTNKLESFDKLGTQSGFIFYVRPDFTSKIDPVTGFVNLLYPRYENIDKAKDMISRFDDIRYNAGEDFFEFDIDYDKFPKTASDYRKKWTICTNGERIEAFRNPANNNEWSYRTIILAEKFKELFDNNSINYRDSDDLKAEIFSQTKGKFFEDFFKLLRLTLQMRNSNPETGEDRILSPVKDKNGNFYDSSKYDEKSKLPCDADANGAYNIARKGLWIVEQFKKADNVSTVEPVIHNDKWLKFVQENDMANN

SEQ ID NO: 614 - protein, 1245 aa, unidentified
  REGION 1..1245: note = Cas Enzyme sequence
MQERKKISHLTHRNSVQKTIRMQLNPVGKTMDYFQAKQILENDEKLKENYQKIKEIADRFYRNLNEDVLSKTRLDKLKDYADIYYHCNTDADRKRLDECASELRKEIVKNFKNRDEYNKLFNKKMIEIVLPKHLKNEDEKEVVASFKNFTTYFTGFFTNRKNMYSDGEESTAIAYRCINENLPKHLDNVKAFEKAISKLSKNAIDDLDAIYSGLCGTNLYDVFTVDYFNFLLPQSGITEYNKIIGGYTTNDGTKVKGINEYINLYNQQVSKRDKIPNLKILYKQILSESEKVSFIPPKFEDDNELLSAVSEFYANDETFDGMPLKKAIDETKLLFGNLDNSSLNGIYIQNDRSVTNLSNSMFGSWSVIEDLWNKNYDSVNSNSRIKDIQKREDKRKKAYKAEKKLSLSFLQVLISNSENDEIREKSIVDYYKTSLMQLTDNLSDKYNEAAPLLSENYDNEKGLKNDDKSISLIKNFLDAIKEIEKFIKPLSETNITGEKNDLFYSQFTPLLDNISRIDILYDKVRNYVTQKPFSTDKIKLNFGNSQLLNGWDRNKEKDCGAVWLCKDEKYYLAIIDKSNNSILENIDFQDCDESDCYEKIIYKLLPGPNKMLPKVFFSEKCKKLLSPSDEILKIYKSGTFKKGDKFSLDDCHKLIDFYKESFKKYPNWLIYNFKFKKTNEYNDISEFYNDVASQGYNISKMKIPTSFIDKLVDEGKIYLFQLYNKDFSPHSKGTPNLHTLYFKMLFDERNLEDVVYKLNGEAEMFYRPASIKYDKPTHPKNTPIKNKNTLNDKKASTFPYDLIKDKRYTKWQFSLHFPITMNFKAPDRAMINNDVRNLLKSCNNNFIIGIDRGERNLLYVSVIDSNGAIIYQHSLNIIGNKFKGKTYETNYREKLATREKDRTEQRRNWKAIESIKELKEGYISQAVHVICQLVVKYDAIIVMEKLTDGFKRGRTKFEKQVYQKFEKMLIDKLNYYVDKKLDPDEEGGLLHAYQLTNKLESFDKLGTQSGFIFYVRPDFTSKIDPVTGFVNLLYPRYENIDKAKDMISRFDEIRYNAGEDFFEFDIDYDKFSKTASDYRKKWTICTNGERIEAFRNPASNNEWSYRTIILAEKFKELFDNNSINYRDSDDLKAEILSQTKGKFFEDFFKLLRLTLQMRNSNPETGEDRILSPVKDKNGNFYDSSKYDEKSKLPCDADANGAYNIARKGLWIVKQFKKSDNVSTVEPVIHNDKWLKFVQENDMANN

SEQ ID NO: 615 - protein, 1245 aa, unidentified
  REGION 1..1245: note = Cas Enzyme sequence
METFSGFTNLYPLSKTLRFRLIPVGETLKHFIDSGILEEDQHRAESYVKVKAIIDDYHRAYIENSLSGFELPLESMGKFNSLEEYYLYHNIRNKTEEIQNLSSKVRTNLRKQVVTQLTKNEIFKRIDKKELIQSDLIDFVKNEPDANEKIALISEFRNFTVYFKGFHENRRNMYSDEEKSTSIAFRLIHENLPKFIDNMEVFAKIQNTSISENFDAIQKELCPELVTLCEMFKLGYFNKILSQKQIDAYNTVIGGKTTSEGKKIKGLNEYINLYNQQHKQEKLPKMKLLFKQILSDRESVSWLPEKFENDSQVVGAMVNFWNTIHDTVLAEGGLKTIIASLGSYGLEGIFLKNDLQLTDISQKATGSWGKISSEIKQKIEVMNPQKKKESYETYQERIDKIFKSYKSFSLAFINECLRGEYKIEDYFLKLGAVNSSSLQKENHFSHILNAYTDVKEAIGFYSESTDTKLIQDNDSIQKIKQFLDAVKDLQAYVKPLLGNGDETGKDERFYGDLIEYWSLLDLITPLYNMVRNYVTQKPYSIDKIKINFQNPTLLNGWDLNKETDNTSVILRRDGKYYLAIMNNKSRKVFLKYPSGTDRNCYEKMEYKLLPGANKMLPKVFFSKSRINEFMPNERLLSNYEKGTHKKSGTCFSLDDCHTLIDFFKKSLDKHEDWKNFGFKFSDTSTYEDMSGFYKEVENQGYKLSFKPIDATYVDQLVDEGKIFLFQIYNKDFSEHSKGTPNMHTLYWKMLFDETNLGDVVYKLNGEAEVFFRKASINVSHPTHPANIPIKKKNLKHKDEERILKYDLIKDKRYTVDQFQFHVPITMNFKADGNGNINQKAIDYLRSASDTHIIGIDRGERNLLYLVVIDGNGKICEQFSLNEIEVEYNGEKYSTNYHDLLNVKENERRQARQSWQSIANIKDLKEGYLSQVIHKISELMVKYNAIVVLEDLNAGFMRGRQKVEKQVYQKFEKKLIEKLNYLVFKKQSFDLPGGLMHAYQLANKFESFNTLGKQSGFLFYIPAWNTSKMDPVTGFVNLFDVKYESVDKAKSFFSKFDSIRYNVERDMFEWKFNYGEFTKKAEGTKTDWTVCSYGNRIITFRNPDKNSQWDNKEINLTENIKLLFERFGIDFSSNLKDEIMQRTEKEFFIELISLFKLVLQMRNSWTGTDIDYLVSPVCNENGEFFDSRNVDETLPQNADANGAYNIARKGMILLDKIKKSNGEKKLALSITNREWLSFAQGCCKNG

SEQ ID NO: 616 - protein, 1245 aa, unidentified
  REGION 1..1245: note = Cas Enzyme sequence
MRERKKISHLTHRNSVQKTIRMQLNPVGKTMDYFQAKQILENDEKLKENYQKIKEIADRFYRNLNEDVLSKTRLDKLKDYAEIYYHCNTDADRKRLNECASELRKEIVKNFKNRDEYNKLFNKKMIEIVLPQHLKNEDEKEVVASFKNFTTYFTGFFTNRKNIYSDGEESTAIAYRCINENLPKHLDNVKAFEKAISKLSKNAVDDLDVTYSGLCGTNLYDVFTVDYFNFLLPQSGITEYNKIIGGYTTSDGTKVKGINEYINLYNQQVSKRDKIPNLKILYKQILSESEKVSFIPPKFEDDNELLSAVSEFYANDETFDGMPLKKAIDETKLLFGNLDNSSLNGIYIQNDRSVTNLSNSMFGSWSVIEDLWNKNYDSVNSNSRIKDIQKREDKRKKAYKAEKKLSLSFLQVLISNSENDEIREKSIVDYYKTSLMQLTDNLSDKYKEAAPLFSENYDNEKGLKNDDKSISLIKNFLDAIKEIEKFIKPLSETNITGEKNDLFYSQFTPLLDNISRIDILYDKVRNYVTQKPFSTDKIKLNFGNSQLLNGWDRNKEKGCGAVWLCKDEKYYLAIIDKSNNSILENIDFQDCDESDCYEKIIYKLLPGPNKMLPKVFFSEKCKELLSPSDEILKIRKNGTFKKGDKFSLDDCHKLIDFYKESFKKYPNWLIYNFKFKNTNEYNDISEFYNDVASQGYNISKMKIPTSFIDKLVDEGKIYLFQLYNKDFSPHSKGTPNLHTLYFKMLFDERNLEDAVYKLNGEAEMFYRPASIKYDKPTHPKNTPIKNKNTLNDKKTSTFPYDLIKDKRYTKWQFSLHFPITMNFKAPDKAMINDDVRNLLKSCNNNFIIGIDRGERNLLYVSVIDSNGAIIYQHSLNIIGNKFKGKTYETNYREKLATREKERTEQRRNWKAIESIKELKEGYISQAVHAICQLVVKYDAIIVMEKLTDGFKRGRTKFEKQVYQKFEKMLIDKLNYYVDKKLDPDEEGGLLHAYQLTNKLESFDKLGTQSGFIFYVRPDFTSKIDPVTGFVNLLYPRYENIDKAKDIISRFDDIRYNAGEDFFEFDIDYDKFPKTASDYRKKWTICTNGERIEAFRNPANNNEWSYRTIILAEKFKELFDNNSINYRDYDDLKAEILSQTKGKFFEDFFKLLILTLQMRNSNPETGEDRILSPVKDKNGNFYDSSKYDEKSKLPCDADANGAYNIARKGLWIVEQFKKSDNVSTVEPVIHNDKWLKFVQENDMANN

SEQ ID NO: 617 - protein, 1245 aa, unidentified
  REGION 1..1245: note = Cas Enzyme sequence
METFSGFTNLYPLSKTLRFRLIPVGETLKHFIGSGILEEDQHRAESYVKVKAIIDDYHRTYIENSLSGFELPLESTGKFNSLEEYYLYHNIRNKTEEIQNLSSKVRTNLRKQVVTQLTKNEIFKRIDKKELIQSDLIDFVKNEPDANEKIALISEFRNFTVYFKGFHENRRNMYSDEEKSTSIAFRLIHENLPKFIDNMEVFAKIQNTSISENFDAIQKELCPELVTLCEMFKLGYFNKTLSQKQIDAYNTVIGGKTTSEGKKIKGLNEYINLYNQQRKQEKLPKMKLLFKQILSDRESASWLLEKFENDSQVVGAMVNFWNTIHDTVLAEGGLKTIIASLGSYGLEGIFLKNDLQLTDISQKATGSWSKISSEIKQKIEAMNPQKKKESYESYQERIDKLFKSYKSFSLAFVNECLRGEYKIEDYFLKLGAVNSSLLQKENHFSHILNTYTDVKEVIGFYSESTDTKLIQDNDSIQKIKQFLDAVKDLQAYVKPLLGNSDETGKDERFYGDLIEYWSLLDLITPLYNMVRNYVTQKPYSVDKIKINFQNPTLLNGWDLNKEMDNTSVILRRDGKYYLAIMNNKSRKVFLKYPSGTDRNCYEKMEYKLLPGANKMLPKVFFSKSRINEFMPNERLLSNYEKGTHKKSGTCFSLDDCHTLIDFFKKSLNKHEDWKNFGFKFSDTSTYEDMSGFYKEVENQGYKLSFKPIDATYVDQLVDEGKIFLFQIYNKDFSEHSKGTPNMHTLYWKMLFDETNLGDVVYKLNGEAEVFFRKASINVSHPTHPANIPIKKKNLKHKDEERILKYDLIKDKRYTVDQFQFHVPITMNFKANGNGNINQKAIDYLRSASDTHIIGIDRGERNLLYLVVIDGNGKICEQFSLNEIEVEYNGEKYSTNYHDLLNVKENERKQARQSWQSIANIKDLKEGYLSQVIHKISELMVKYNAIVVLEDLNAGFMRGRQKVEKQVYQKFEKKLIEKLNYLVFKKQSSDLPGGLMHAYQLANKFESFNTLGKQSGFLFYIPAWNTSKMDPVTGFVNLFDVKYESVDKAKSFFSKFDSIRYNVERDMFEWKFNYDEFTKKAEGTKTDWTVCSYGNRIITFRNPDKNSQWDNKEINLTENIKLLFERFGIDLSSNLKDEIMERTEKEFFIELISLFKLVLQMRNSWTGTDIDYLVSPVCNENGEFFDSRNVDETLPQNADANGAYNIARKGMILLDKIKKNNGEKKLTLSITNREWLSFAQGCCKNG

SEQ ID NO: 618 - protein, 1245 aa, unidentified
  REGION 1..1245: note = Cas Enzyme sequence
MENSNLFTNKYQVSKTLRFRLEPTGGTDDLLRQAQIIEGDERRNKEAITMKQILDNCHKQIIERVLSDFNFKEHSLEEFFKVYTRNDDDREKDIENLQSKMRKEIADTFTKQDVTKLFSSKFKDFVERGLIKYASNEKERNIVSRFKGFATYFTGFNTNRLNMYSEEAKSTAISFRLINQNLIKFIDNILVYKKVSQTLPSDVLSNIYIDFKAIINTSSLEEFFSINNYNNILTQKQIEIFNAVIGGKKDKDEKIITKGFNQYINEYNQTNKNIRLPKMMRLFNQILSDREGVSARPEPFNNANETISSVRDCFTNEISKQITILSETTSKIESFDIDRIYIKGGEDLRALSNSIYGYFNYIHDRIADKWKHNNPQGKKSPESYQKNLNAYLKGIKSVSLHSIANICGDNKVIEYFRNLGAENTVDFQRENVVSLIDNKYNCASNLLSDAQITDEELRTNSRSIKDLLDAVKSAQRFFRLLCGSGNEPDKDHSFYDEYTPAFEALENSINPLYNKVRSFVTKKDFSTDKFKLNFDSSSFLSGWATKSEYEKSSAFIFIRDNQYYLGINRCLSKEDIAYLEDSTSSSDAKRAVYLFQKVDAKNIPRIFIRSKGSNLAPAVNEFQLPIETILDIYDNKFFTTSYQKKDRTKWKESLTKLIDYYKLGFSQHKSYADFDLKWKASSEYNDINDFLADVQKSCYRIEFININWDKLIEFTEDGKFYLFRIANKDLSGNSTGLPNLHTIYWKMLFDESNLKDIVYKMSGNAEVFMRYNSLKNPIVHKAGVEIKNKCPFTEKKTSIFDYDIIKDRRYTKDQLELHVPILMNFKSPSAAKGNVFNKECLEYIKNNGIKHIIGIDRGERNLLYMVITDLDGNIVEQKSLNQIASNPKLPLFRQDYNKLLKTKADANAQARRDWETINTVKEIKFGFLSQIVHEIAMSIIKYDAIVVLENLNRGFMQKRGLENNVYQKFEQMLLDKLSYYVDKTKHPEEAGGALHAYQLSDTYANFNSLSKNAMVRQSGFVFYIPAWLTSKIDPVTGFASFLKFHRDDSMATIKSTISKFDCFKYDKECDMFHIRIDYNKFSTSCSGGQRKWDLFTFGDRILAERNTMQNSRYVYQTVNLTSEFKNLFATKDIDFSGNLKDSICKIEDVGFFRKLSQLLSLTLQLRNSNAETGEDFLISPVADKDGNFFDSRNCPDSLPKDADANGAYNIARKGLMLVEQLKRCKDVSKFKPAIKNEDWLDYVQR

SEQ ID NO: 619 - protein, 1245 aa, unidentified
  REGION 1..1245: note = Cas Enzyme sequence
MQKRKKISHLTHRNSVQKTIRMQLNPVGKTMDYFQAKQILENDEKLKEDYQKIKEIADRFYRNLNEDVLSKTGLDKLKDYAEIYYHCNTDADRKRLDECASELRKEIVKNFKNRDEYNKLFNKKMIEIVLPNHLKNDDEKEVVASFKNFTTYFTGFFTNRKNMYSDGEESTAIAYRCINENLPKHLDNVKAFEKAISKLSKNAIDDLDATYSGLCGTNLYDVFTVDYFNFLLPQSGITEYNKIIGGYTTSDGTKVKGINEYINLYNQQVSKRDKIPNLKILYKQILSESEKVSFIPPKFEDDNELLSAVSEFYANDETFDGMPLKKAIDETKLLFGNLDNSSLNGIYIQNDRSVTNLSNSMFGSWSVIEDLWNKNYDSVNSNSRIKDIQKREDKRKKAYKAEKKLSLSFLQVLISNSENDEIREKSIVDYYKTSLMQLTDNLSDKYNEAAPLLNENYDNEKGLKNDDKSISLIKNFLDAIKEIEKFIKPLSETNITGEKNDLFYSQFTPLLDNISRIDILYDKVRNYVTQKPFSTDKIKLNFGNSQLLNGWDRNKEKDCGAVWLCKDEKYYLAIIDKSNNSILENIDFQDCDESDCYEKIIYKLLPGPNKMLPKVFFSEKCKKLLSPSDEILKIYKNGTFKKGDKFSLDDCHKLIDFYKESFKKYPKWLIYNFKFKKTNEYNDIREFYNDVASQGYNISKMKIPTSFIDKLVDEGKIYLFQLYNKDFSPHSKGTPNLHTLYFKMLFDERNLEDVVYKLNGEAEMFYRPASIKYDKPTHPKNAPIKNKNILNNKKTSTFPYDLIKDKRYTKWQFSLHFPITMNFKAPDKAMINDDVRNLLKSCNNNFIIGIDRGERNLLYVSVIDSNGAIIYQHSLNIIGNKFKGKTYETNYREKLATREKERTEQRRNWKAIESIKELKEGYISQAVHVICQLVVKYDAIIVMEKLTDGFKRGRTKFEKQVYQKFEKMLIDKLNYYVDKKLDPDKEGGLLHAYQLTNKLESFDKLGTQSGFIFYVRPDFTSKIDPVTGFVNLLYPRYENIDKAKDMISRFDEIRYNAGEDFFEFDIDYDKFPKTASDYRKKWTICTNGERIEAFRNPANNNEWSYRTIILAEKFKELFDNNSINYRDSDDLKAEILSQTKGKFFEDFFKLLRLTLQMRNSNPDTGEDRILSPVKDKNGNFYDSSKYDEKSKLPCDADANGAYNIARKGLWIVEQFKKSDNVSTVEPVIHNDKWLKFVQENDMANN

SEQ ID NO: 620 - protein, 1245 aa, unidentified
  REGION 1..1245: note = Cas Enzyme sequence
MQERKKISHLTHRNSVQKTIRMQLNPVGKTMDYFQAKQILENDEKLKENYQKIKEIADRFYRNLNEDVLSKTRLDKLKDYAEIYYHCNTDADRKRLDECASELRKEIVKNFKNRDEYNKLFNKKMIEIVLPKHLKNEDEKEVVASFKNFTTYFTGFFTNRKNMYSDGEESTAIAYRCINENLPKHLDNVKAFEKAISKLSKNAVDDLDATYSGLCGTNLYDVFTVDYFNFLLPQSGITEYNKIIGGYTTNDGTKVKGINEYINLYNQQVYKRDKIPNLKILYKQILSESEKVSFIPPKFEDDNELLSAVSEFYANDKTFDGMPLKKAIDETKLLFGNLDNSSLNGIYIQNDRAVTNLSNSMFGSWSVIEDLWNKNYDSVNSNSRIKDIQKREDKRKKAYKAEKKLSLSFLQVLISNSENNEIRKKSIVDYYKTSLMQLTDNLSDKYKEAAPLLNENYSNEKGLKNDDKSISLIKNFLDAIKEIEKFIKPLSETNITGEKNDLFYSQFTPLLDNISRIDILYDKVRNYVTQKPFSTDKIKLNFGNSQLLNGWDRNKEKDCGAVWLCKDEKYYLAIIDKSNNSILENIDFQDCDESDCYEKIIYKLLPGPNKMLPKVFFSEKCKKLLSPSDEILKIRKNGTFKKGDKFSLDDCHKLIDFYKESFKKYPNWLIYNFKFKKTNEYNDIREFYNDVASQGYNISKMKIPTSFIDKLVDEGKIYLFQLYNKDFSPHSKGTPNLHTLYFKMLFDERNLEDVVYKLNGEAEMFYRPASIKYDKPTHPKNTPIKNKNTLNDKRASTFPYDLIKDKRYTKWQFSLHFPITMNFKAPDKAMINDDVRNLLKSCNNNFIIGIDRGERNLLYVSVIDSNGAIIYQHSLNIIGNKFKGKTYETNYREKLATREKDRTEQRRNWKAIESIKELKEGYISQAVHVICQLVVKYDAIIVMEKLTDGFKRGRTKFEKQVYQKFEKMLIDKLNYYVDKKLDPDEEGGLLHAYQLTNKLESFDKLGTQSGFIFYVRPDFTSKIDPVTGFVNLLYPRYEKTDKAKDMISRFDDIRYNAGEDFFEFDIDYDKFPKTASDYRKKWTICTNGERIEAFRNPANNNEWSYRTIILAEKFKELFDNNSINYRDSDDLKAEILSQTKGKFFEDFFKLLRLTLQMRNSNPETGEDRILSPVKDKNGNFYDSSKYDEKSKLPCDADANGAYNIARKGLWIVEQFKKSDNVSTVEPVIHNDKWLKFVQENDMANN

SEQ ID NO: 621 - protein, 1245 aa, unidentified
  REGION 1..1245: note = Cas Enzyme sequence
MQEHKKISHLTHRNSVQKTIRMQLNPVGKTMDYFQAKQILENDEKLKENYQKIKEIADRFYRNLNEDVLSKTGLDKLKDYAEIYYHCNTDADRKRLNKCASELRKEIVKNFKNRDEYNKLFNKKMIETVLPKHLKNEDEKEVVASFKNFTTYFTGFFTNRKNMYSDGEESTAIAYRCINENLPKHLDNVKAFEKAISKLSKNAIDDLDATYSGLCGTNLYDVFTVDYFNFLLPQSGITEYNKIIGGYTTSDGTKVKGINEYINLYNQQVSKRDKIPNLKILYKQILSESEKVSFIPPKFEDDNELLSAVSEFYANDETFDGMPLKKAIDETKLLFGNLDNSSLNGIYIQNDRSVTNLSNSMFGSWSVIEDLWNKNYDSVNLNSRIKDIQKYEDKRKKAYKAEKKLSLSFLQVLISNSENDEIREKSIVDYYKTSLMQLNDNLSDKYKEAAPLLSENYDNKKGLKNDDKSISLIKNFLDAIKEIEKFIKPLSETNITGEKNDLFYSQFTPLLDNISRIDILYDKVRNYVTQKPFSTDKIKLNFGNSQLLNGWDRNKEKDCGAVWLCKDEKYYLAIIDKSNNSILENIDFQDCDESDCYEKIIYKLLPGPNKMLPKVFFSEKCKKLLSPSDEILKIRKNGTFKKGDKFSLDDCHKLIDFYKESFKKYPNWLIYNFKFKKTNEYNDIREFYNDVASQGYNISKMKIPTSFIDKLVDEGKIYLFQLYNKDFSPHSKGTPNLHTLYFKMLFDERNLEDVVYKLNGEAEMFYRPASIKYDKPTHPKNTPIKNKNTLNDKKASTFPYDLIKDKRYTKWQFSLHFPITMNFKAPDRAIINDDVRNLLKSCNNNFIIGIDRGERNLLYVSVIDSNGAIIYQHSLNIIGNKFKGKTYETNYREKLATREKERTEQRRNWKAIESIKELKEGYISQAVHVICQLVVKYDAIIVMEKLTDGFKRGRTKFEKQVYQKFEKMLIDKLNYYVDKKLDPDEEGGLLHAYQLTNKLESFDKLGTQSGFIFYVRPDFTSKIDPVTGFVNLLYPRYEKIDKAKDMISRFDDIRYNAGEDFFEFDIDYDKFPKTASDYRKKWTICTNGERIEAFRNPANNNEWSYRTIILAEKFKELFDNNSINYRDSDDLKAEILSQTKGKFFEDFFKLLRLTLQMRNSNPETGEDRILSPVKDKNGNFYDSSKYDEKSKLPCDADANGAYNIARKGLWIVEQFKKADNVSTVEPVIHNDKWLKFVQENDMANN

SEQ ID NO: 622 - protein, 1245 aa, unidentified
  REGION 1..1245: note = Cas Enzyme sequence
MQEHKKISHLTHRNSVQKTIRMQLNPVGKTMDYFQAKQILENDEKLKENYQKIKEIADRFYRNLNEDVLSKIRLDKLKDYADIYYHGNTDADRKRLDECASELRKEIVKNFKNRDEYNKLFNKKMIEIVLPQHLKNEDEKEVVASFKNFTTYFTGFFTNRKNMYSDGEESTAIAYRCINENLPKHLDNVKAFEKAISKLSKNAIDDLDATYSGLCGTNLYDVFTVDYFNFLLPQSGITEYNKIIGGYTTSDGTKVKGINEYINLYNQQVSKRDKIPNLKILYKQILSESEKVSFIPPKFEDDNELLSAVSEFYANDETFDGMPLKKAIDETKLLFGNLDNSSLNGIYIQNDRSVTNLSNSMFGSWSVIEDLWNKNYDSVNSNSRIKDIQKREDKRKKAYKAEKKLSLSFLQVLISNSENDEIREKSIVDYYKTSLMQLTDNLSDKYNEAAPLFSENYDNEKGLKNDDKSISLIKNFLDAIKEIEKFIKPLSETNITGEKNDLFYSQVTPLLDNISRIDILYDKVRNYVTQKPFSTDKIKLNFGNSQLLNGWDRNKEKSCGAVWLCKDEKYYLAIIDKSNNSILENIDFQDCDESDCYEKIIYKLLPGPNKMLPKVFFSEKCKKLLSPSDEILKIRKNGTFKKGDKFNLDDCHKLIDFYKESFKKYPNWLIYNFKFKNTNEYNDISEFYNDVASQGYNISKMKIPTSFIDKLVDEGKIYLFQLYNKDFSPHSKGTPNLHTLYFKMLFDERNLEDVVYKLNGEAEMFYRPASIKYDKPTHPKNTPIKNKNTLNEKKASTFPYDLIKDKRYSKWQFSLHFPITMNFKAPDRAMINDDVRNLLKSCNNNFIIGIDRGERNLLYVSIIDSNGAIIYQHSLNIIGNKFKGKTYETNYREKLATREKERTEQRRNWKAIESIKELKEGYISQAVHVICQLVVKYDAIIVMEKLTDGFKRGRTKFEKQVYQKFEKMLIDKLNYYVDKKLDPDEEGGLLHAYQLTNKLESFDKLGTQSGFIFYVRPDFTSKIDPVTGFVNLLYPRYENIDKAKDMISRFDDIRYNAGEDFFEMDIDYDKFPKTASDYRKKWTICTNGERIEAFRNPANNNEWSYRTIILAEKFKELFDNNSINYRDSDDLKAEILSQTKGKFFEDFFKLLRLTLQMRNSNPETGEDRILSPVKDKNGNFYDSSKYDEKSKLPCDADANGAYNIARKGLWIVEQFKKADNVSTVEPVIHNDKWLKFVQENDMANN

SEQ ID NO: 623 - protein, 1245 aa, unidentified
  REGION 1..1245: note = Cas Enzyme sequence
MQEHKKISHLTHRNSVQKTIRMQLNPVGKTMDYFQAKQILENDEKLKEDYQKIKEIADRFYRNLNEDVLSKTGLDKLKDYAEIYYHCNTDADRKRLDECASELRKEIVKNFKNRDEYNKLFNKKMIEIVLPQHLKNEDEKEVVASFKNFTTYFTGFFTNRKNMYSDGEESTAIAYRCINENLPKHLDNVKAFEKAISKLSKNAVDDLDTTYSGLCGTNLYDVFTVDYFNFLLPQSGITEYNKIIGGYTTSDGTKVKGINEYINLYNQQVSKRYKIPNLKILYKQILSESEKVSFIPPKFEDDNELLSAVSEFYANDETFDGMPLKKAIDETKLLFGNLDNSSLNGIYIQNDRSVTNLSNSMFGSWSVIEDLWNKNYDSVNSNSRIKDIQKLEDKRKKAYKAEKKLSLSFLQVLISNSENDEIREKSIVDYYKTSLMQLTDNLSDKYKEAAPLFNESYANEKGLKNDDKSISLIKNFLDAIKEIEKFIKPLSETNITGEKNDLFYSQFTPLLDNISRIDILYDKVRNYVTQKPFSTDKIKLNFGNSQLLNGWDRNKEKDCGAVWLCKDEKYYLAIIDKSNNSILENIDFQDCDESDCYEKIIYKLLPGPNKMLPKVFFSEKCKKLLSPSDEILKIRKNGTFKKGDKFSLDDCHKLIDFYKESFKKYPNWLIYNFKFKKTNEYNDISEFYNDVASQGYNISKMKIPTSFIDKLVDEGKIYLFQLYNKDFSPHSKGTPNLHTLYFKMLFDERNLEDVVYKLNGEAEMFYRPASIKYDKPTHPKNTPIKNKNTLNDKRASTFPYDLIKDKRYTKWQFSLHFPITMNFKAPDRAMINDDVRNLLKSCNNNFIIGIDRGERNLLYVSVIDSNGAIIYQHSLNIIGNKFKGKTYETNYREKLATREKDRTEQRRNWKAIESIKELKEGYISQAVHVICQLVVKYDAIIVMEKLTDGFKRGRTKFEKQVYQKFEKMLIDKLNYYVDKKLDPDEEGGLLHAYQLTNKLDSFDKLGMQSGFIFYVRPDFTSKIDPVTGFVNLLYPRYENIDKAKDMISRFDEIRYNACEDFFEFDIDYDKFPKTASDYRKKWTICTNGERIETFRNPANNNEWSYRTIILAEKFKELFDNNSINYRDSDDLKAEILSQTKGKFFEDFFKLLRLTLQMRNSNPETGEDRILSPVKDKNGNFYDSSKYDEKSKLPCDADANGAYNIARKGLWIVEQFQKADNVSAVEPVIHNDKWLKFVQENDMANN

SEQ ID NO: 624 - protein, 1245 aa, unidentified
  REGION 1..1245: note = Cas Enzyme sequence
MQERKKISHLTHRNSVQKTIRMQLNPVGKTMDYFQAKQILENDEKLKEDYQKIKEIADRFYRNLNEDVLSKTGLDKLKDYAEIYYHGNTDADRKRLNECASELRKEIVKNFKNRDEYNKLFNKKMIETVLPKHLKNEDEKEVVASFKNFTTYFTGFFTNRKNMYSDGEESTAIAYRCINENLPKHLDNVKAFEKAISKLSKNAIDDLDATYSGLCGTNLYDVFTVDYFNFLLPQSGITEYNKIIGGYTTSDGTKVKGINEYINLYNQQVSKRDKIPNLKILYKQILSESEKVSFIPPKFEDDNELLSAVSEFYANDETFDGMPLKKAIDETKLLFGNLDNSSLNGIYIQNDRSVTNLSNSMFGSWSVIEDLWNKNYDSVNSNSRIKDIQKREDKRKKAYKAEKKLSLSFLQVLISNSENDEIREKSIVDYYKTSLMQLTDNLSDKYNEAAPLLNENYSNEKGLKNDDKSISLIKNFLDAIKEIEKFIKPLSETNITGEKNDLFYSQFTPLLDNISRIDILYDKVRNYVTQKPFSTDKIKLNFGNYQLLNGWDKDKEREYGAVLLCRDEKYYLAIIDKSNNRILENIDFQDCDESDCYEKIIYKLLPTPNKMLPKVFFAKKHKKLLSPSDEILKIYKNGTFKKGDKFSLDDCHKLIDFYKESFKKYPKWLIYNFKFKKTNEYNDIREFYNDVALQGYNISKMKIPTSFIDKLVDEGKIYLFQLYNKDFSPHSKGTPNLHTLYFKMLFDERNLEDVVYKLNGEAEMFYRPASIKYDKPTHPKNTPIKNKNTLNDKKASTFPYDLIKDKRYTKWQFSLHFPITMNFKAPDKAMINDDVRNLLKSCNNNFIIGIDRGERNLLYVSVIDSNGAIIYQHSLNIIGNKFKGKTYETNYREKLATREKERTEQRRNWKAIESIKELKEGYISQAVHVICQLVVKYDAIIVMEKLTDGFKRGRTKFEKQVYQKFEKMLIDKLNYYVDKKLDPDEEGGLLHAYQLTNKLESFDKLGTQSGFIFYVRPDFTSKIDPVTGFVNLLYPRYENIDKAKDMISRFDDIRYNAGEDFFEFDIDYDKFPKTASDYRKKWTICTNGERIEAFRNPANNNEWSYRTIILAEKFKELFDNNSINYRDSDDLKAEILSQTKGKFFEDFFKLLRLTLQMRNSNPETGEDRILSPVKDKNGNFYDSSKYDEKSKLPCDADANGAYNIARKGLWIVEQFKKADNVSTVEPVIHNDKWLKFVQENDMANN

SEQ ID NO: 625 - protein, 1245 aa, unidentified
  REGION 1..1245: note = Cas Enzyme sequence
MQEHKKISHLTHRNSVQKTIRMQLNPVGKTMDYFQAKQILENDEKLKEDYQKIKEIADRFYRNLNEDVLSKTGLDKLKDYAEIYYHCNTDADRKRLDECASELRKEIVKNFKNRDEYNKLFNKKMIEIVLPQHLKNEDEKEVVASFKNFTTYFTGFFTNRKNMYSDGEESTAIAYRCINENLPKHLDNVKAFEKAISKLSKNAVDDLDTTYSGLCGTNLYDVFTVDYFNFLLPQSGITEYNKIIGGYTTSDGTKVKGINEYINLYNQQVSKRDKIPNLKILYKQILSESEKVSFIPPKFEDDNELLSAVSEFYANDETFDGMPLKKAIDETKLLFGNLDNSSLSGIYIQNDRSVTNLSNSMFGSWSVIEDLWNKNYDSVNSNSRIKDIQKREDKRKKAYKAEKKLSLSFLQVLISNSENDEIREKSIVDYYKTSLMQLTDNLSDKYNEAAPLLNENYSNEKGLKNDDKSISLIKNFLDAIKEIEKFIKPLSETNITGEKNDLFYSQFTPLLDNISRIDILYDKVRNYVTQKPFSTDKIKLNFGNSQLLNGWDRNKEKDCGAVWLCKDEKYYLAIIDKSNNSILENIDFQDCDESDCYEKIIYKLLPGPNKMLPKVFFSEKCKELLSPSDEILKIRKNGTFKKGDKFSLDDCHKLIDFYKESFKKYPNWLIYNFKFKKTNEYNDISEFYNDVASQGYNISKMKIPTSFIDKLVDEGKIYLFQLYNKDFSPHSKGTPNLHTLYFKMLFDERNLEDVVYKLNGEAEMFYRPASIKYDKPTHPKNAPIKNKNTLNDKKASTFPYDLIKDKRYTKWQFSLHFPITMNFKALDRAMINDDVRNLLKSCNNNFIIGIDRGERNLLYVSVIDSNGAIIYQHSLNIIGNKFKGKTYETNYREKLATREKDRTEQRRNWKAIESIKELKEGYISQAVHVICQLVVKYDAIIVMEKLTDGFKRGRTKFEKQVYQKFEKMLIDKLNYYVDKKLDPDEEGGLLHAYQLTNKLESFDKLGTQSGFIFYVRPDFTSKIDPVTGFVNLLYPRYENIDKAKDMISRFDDIRYNAGEDFFEFDIDYDKFPKTASDYRKKWTICTNGERIEAFRNPASNNEWSYRTIILAEKFKELFDNNSINYRDSDDLKAEILSPTKGKFFEDFFKLLRLTLQMRNSNPETGEDRILSPVKDKNGNFYDSSKYDEKSKLPCDADANGAYNIARKGLWIVEQFKKSDNVSTVEPVIHNDKWLKFVQENDMANN

SEQ ID NO: 626 - protein, 1245 aa, unidentified
  REGION 1..1245: note = Cas Enzyme sequence
MQERKKISHLTHRNSVQKTIRMQLNPVGKTMDYFQAKQILENDEKLKEDYQKIKKIADRFYRNLNEDVLSKTRLDKLKDYADIYYHCNTDADRKRLNECASELRKEIVKNFKNRDEYNKLFNKKMIEIVLPQHLKNEDEKEVVASFKNFTTYFTGFFTNRKNMYSDGEESTAIAYRCINENLPKHLDNVKAFEKAISKLSKNAIDDLDATYSGLCGTNLYDVFTVDYFNFMLPQSGITEYNKIIGGYTTSDGTKVKGINEYINLYNQQVSKRDKIPNLKILYKQILSESEKVSFIPPKFEDDNELLSAVSEFYANDETFDGMPLKKAIDETKLLFGNLDNSSLNGIYIQNDRSVTNLSNSMFGSWSVIEDLWNKNYDSVNSNSRIKDIQKREDKRKKAYKAEKKLSLSFLQVLISNSENDEIREKSIVDYYKTSLMQLTDNLSDKYKEAAPLFSENYDNEKGLKNDDKSISLIKNFLDAIKEIEKFIKPLSETNITGEKNDLFYSQFTPLLDNISRIDILYDKVRNYVTQKPFSTDKIKLNFGNSQLLNGWDRNKEKDCGAVWLCKDEKYYLAIIDKSNNSILENIDFQDCDESDCYEKIIYKLLPGPNKMLPKVFFSEKCKKLLSPSDEILKIRKNGTFKKGDKFSLDDCHKLIDFYKESFKKYPNWLIYNFKFKNTNEYNDISEFYNDVASQGYNISKMKIPTSFIDKLVDEGKIYLFQLYNKDFSPHSKGTPNLHTLYFKMLFDERNLEDVVYRLNGEAEMFYRPASIKYDKPTHPKNTPIKNKNTLNDKKASTFPYDLIKDKRYTKWQFSLHFPITMNFKAPDRAMINNDVRNLLKSCNNNFIIGIDRGERNLLYVSVIDSNGAIIYQHSLNIIGNKFKGKTYETNYREKLATREKERTEQRRNWKAIESIKELKEGYISQAVHVICQLVVKYDAIIVMEKLTDGFKRGRTKFEKQVYQKFEKMLIDKLNYYVDKKLDPDEEGGLLHAYQLTNKLESFDKLGTQSGFIFYVRPDFTSKIDPVTGFVNLLYPRYENIDKAKDMISRFDDIRYNAGEDFFEFDIDYDKFPKTASDYRKKWTICTNGERIEAFRNPANNNEWSYRTIILAEKFKELFDNNSINYRDSDDLKAEILSQTKGKFFEDFFKLLRLTLQMRNSNPETGEDRILSPVKDKNGNFYDSSKYDEKSKLPCDADANGGYNIARKGLWIVEQFKKADNVSTVEPVIHNDQWLKFVQENDMANN

SEQ ID NO: 627 - protein, 1245 aa, unidentified
  REGION 1..1245: note = Cas Enzyme sequence
MQEHKKISHLTHRNSVQKTIRMQLNPVGKTMDYFQAKQILENDEKLKENYQKIKEIADRFYRNFNEDVLSKTGLDKLKDYADIYYHCNTDADRKRLNECASELRKEIVKNFKNRDEYNKLFNKKMIEIVLPKHLKNEDEKEVVASFKNFTTYFTGFFTNRKNMYSDGEESTAIAYRCINENLPKHLDNVKVFEKAISKLSKNAIDDLDATYSGLCGTNLYDVFTVDYFNFLLPQSGITEYNKIIGGYTTNDGTKVKGINEYINLYNQQVSKRDKIPNLKILYKQILSESEKVSFIPPKFEDDNELLSAVSEFYANDETFDGMPLKKAIDETKLLFGNLDNSSLNGIYIQNDRSVTNLSNSMFGSWSVIEDLWNKNYDSVNSNSRIKDIQKREDKRKKAYKAEKKLSLSFLQVLISNSENDEIREKSIVDYYKTSLMQLTDNLSDKYKEAAPLFNESYANEKGLKNDDKSISLIKNFLDAIKEIEKFIKPLSETNITGEKNDLFYSQFTPLLDNISRIDILYDKVRNYVTQKPFSTDKIKLNFGNSQLLNGWDRNKEKDCGAVWLCKDEKYYLAIIDKSNNSILENIDFQDCDESDCYEKIIYKLLPGPNKMLPKVFFSEKCKKLLSPSDEILKIRKNGTFKKGDKFSLDDCHKLIDFYKESFKKYPNWLIYNFKFKKTNEYNDISEFYNDVASQGYNISKMKIPTSFIDKLVDEGKIYLFQLYNKDFSPHSKGTPNLHTLYFKMLFDERNLEDVVYKLNGEAEMFYRPASIKYDKPTHPKNTPIKNKNTLNDKRASTFPYDLIKDKRYTKWQFSLHFPITMNFKAPDKAMINDDVRNLLKSCNNNFIIGIDRGERNLLYVSVIDSNGAIIYQHSLNIIGNKFKGKTYETNYREKLATREKERTEQRRNWKAIENIKELKEGYISQAVHVICQLVVKYDAIIVMEKLTDGFKRGRTKFEKQVYQKFEKMLIDKLNYYVDKKLDPDEEGGLLHAYQLTNKLESFDKLGTQSGFIFYVRPDFTSKIDPVTGFVNLLYPRYENIDKAKDMISRFDDIKYNAGEDFFEFDIDYDKFPKTASDYRKKWTICTNGERIEAFRNPASNNEWSYRTIILAEKFKELFDNNSINYRDSDDLKAEILSQTKGKFFEDFFKLLRLTLQMRNSNPETGEDRILSPVKDKNGNFYDSSKYDEKSKLPCDADANGAYNIARKGLWIVEQFKKADNVSAVEPVIHNDKWLKFVQENDMANN

SEQ ID NO: 628 - protein, 1245 aa, unidentified
  REGION 1..1245: note = Cas Enzyme sequence
MQERKKISHLTHRNSVQKTIRMQLNPVGKTMDYFQAKQILENDEKLKEDYQKIKEIADRFYRNLNEDVLSKTGLDKLKDYAEIYYHCNTDADRKRLDECASELRKEIVKNFKNRDEYNKLFNKKMIEIVLPNHLKNEDEKEVVASFKNFTTYFTGFFTNRKNMYSDGEESTAIAYRCINENLPKHLDNVKAFEKAISKLSKNAIDDLDATYSGLCGTNLYDVFTVDYFNFLLPQSGITEYNKIIGGYTTSDGTKVKGINEYINLYNQQVSKRDKIPNLKILYKQILSESEKVSFIPPKFEDDNELLSAVSEFYANDETFDGMPLKKAIDETKLLFGNLDNSSLNGIYIQNDRSVTNLSNSMFGSWSVIEDLWNKNYDSVNSNSRIKDIQKREDKRKKAYKAEKKLSLSFLQVLISNSENDEIREKSIVDYYKTSLMQLTDNLSDKYNEAAPLLNENYSNEKGLKNDDKSISLIKNFLDAIKEIEKFIKPLSETNITGEKNDLFYSQFTPLLDNISRIDILYDKVRNYVTQKPFSTDKIKLNFGNSQLLNGWDRNKEKDCGAVWLCKDEKYYLAIIDKSNNSILENIDFQDCDESDCYEKIIYKLLPGPNKMLPKVFFSEKCKKLLSPSDEILKIYKSGTFKKGDKFSLDDCHKLIDFYKESFKKYPNWLIYNFKFKKTNEYNDISEFYNDVASQGYNISKMKIPTSFIDKLVDEGKIYLFQLYNKDFSPHSKGTPNLHTLYFKMLFDERNLEDVVYKLNGEAEMFYRPASIKYDKPTHPKNTPIKNKNTLNDKKASTFPYDLIKDKRYTKWQFSLHFSITMNFKAPDKAMINDDVRNLLKSCNNNFIIGIDRGERNLLYVSVIDSNGAIIYQHSLNIIGNKFKGKTYETNYREKLATREKERTEQRRNWKAIESIKELKEGYISQAVHVICQLVVKYDAIIVMEKLTDGFKRGRTKFEKQVYQKFEKMLIDKLNYYVDKKLDPDEEGGLLHAYQLTNKLESFDKLGTQSGFIFYVRPDFTSKIDPVTGFVNLLYPRYENIDKAKDMISRFDDIRYNAGEDFFEFDIDYDKFPKTASDYRKRWTICTNGERIEAFRNPANNNEWSYRTIILAEKFKELFDNNSINYRDSDDLKAEILSQTKGKFFEDFFKLLRLTLQMRNSNPETGEDRILSPVKDKNGNFYDSSKYDEKSKLPCDADANGAYNIARKGLWIVEQFKKADNVSTVEPVIHNDKWLKFVQENDMANN

SEQ ID NO: 629 - protein, 1245 aa, unidentified
  REGION 1..1245: note = Cas Enzyme sequence
MQEHKKISHLTHRNSVQKTIRMQLNPVGKTMDYFQAKQILENDEKLKENYQKIKEIADRFYRNLNEDVLSKTRLDKLKDYAEIYYHCNTDTDRKRLNECASELRKEIVKNFKNRDEYNKLFNKKMIEIVLPKHLKNEDEKEVVASFKNFTTYFTGFFTNRKNMYSDGEESTAIAYRCINENLPKHLDNVKAFEKAISKLSKNAVDDLDATYSGLCGTNLYDVFTVDYFNFLLPQSGITEYNKIIGGYTTSDGTKVKGINEYINLYNQQVSKRDKIPNVKILYKQILSESEKVSFIPPKFEDDNELLSAVSEFYANDETFDGMTLKKAIDETKLLFGNLDNSSLSGIYIQNDRSVTNLSNSMFGSWSVIEDLWNKNYDSVNSNSRIKDIQKREDKRKKAYKAEKKLSLSFLQVLISNSENDEIREKSIVDYYKTSLMQLTDNLSDKYNEAAPLLNENYSNEKGLKNDDKSISLIKNFLDAIKEIEKFIKPLSETNITGEKNDLFYSQFTPLLDNISRIDILYDKVRNYVTQKPFSTDKIKLNFGNSQLLNGWDRNKEKDCGAVWLCKDEKYYLAIIDKSNNSILENIDFQDCDESDCYEKIIYKLLPGPNKMLPKVFFSEKCKKLLSPSDEILKIRKNGTFKKGDKFSLDDCHKLIDFYKESFKKYPNWLIYNFKFKKTNEYNDISEFYNDVASQGYNISKMKIPTSFIDKLVDEGKIYLFQLYNKDFSPHSKGTPNLHTLYFKMLFDERNLEDVVYKLNGEAEMFYRPASIKYDKPTHPKNTPIKNKNTLNDKKTSTFPYDLIKDKRYSKWQFSLHFPITMNFKAPDKAMINDDVRNLLKSCNNNFIIGIDRGERNLLYVSVIDSNGAIIYQHSLNIIGNKFKGKTYETNYREKLATREKDRTEQRRNWKAIESIKELKEGYISQAVHVICQLVVKYDAIIVMEKLTDGFKRGRTKFEKQVYQKFEKMLIDKLNYYVDKKLDPDEEGGLLHAYQLTNKLESFDKLGTQSGFIFYVRPDFTSKIDPVTGFVNLLYPRYENIDKSKDMISRFDDIRYNAGEDFFEFDIDYDKFPKTASDYRKRWTICTNGERIEAFRNPANNNEWSYRTIILAEKFKELFDNNSINYRDSDDLKAEILSQTKGKFFEDFFKLLRLTLQMRNSNPGTGEDRILSPVKDKNGNFYDSSKYDEKSKLPCDADANGAYNIARKGLWIVEQFKKADNVSTVEPVIHNDKWLKFVQGNYMANN

SEQ ID NO: 630 - protein, 1245 aa, unidentified
  REGION 1..1245: note = Cas Enzyme sequence
MENSNLFTNKYQVSKTLRFRLEPTGGTDDLLRQAQIIEGDERRNKEAITMKQILDNCHKQIIERVLSDFNFKEHSLEEFFKVYTRNDDDREKDIENLQSKMRKEIADAFTKQDVTKLFSSKFKDFVERGLIKYASNEKERNIVSRFKGFATYFTGFNTNRLNMYSEEAKSTAISFRLINQNLIKFIDNILVYKKVSQTLPSDMLSNIYIDFKAIINTSSLEEFFSINNYNNILTQKQIEIFNAVIGGKKDKDEKIITKGFNQYINEYNQTNKNIRLPKMMRLFNQILSDREGVSARPEPFNNANETISSVRDCFTNEISKQITILSETTSKIESFDIDRIYIKGGEDLRTLSNSIYGYFNYIHDRIADKWKHNNPQGKKSPESYQKNLNAYLKGIKSVSLHSIANICGDNKVIEYFRNLGAENTVDFQRENVVSLIDNKYNCASNLLSDAQITDEELRTNSRSIKDLLDAVKSAQRFFRLLCGSGNEPDKDHSFYDEYTPAFEALENSINPLYNKVRSFVTKKDFSTDKFKLNFDSSSFLSGWATKSEYEKSSAFIFIRDNQYYLGINRCLSKEDIAYLEDSTSSSDAKRAVYLFQKVDAKNIPRIFIRSKGSNLAPAVNEFQLPIETILDIYDNKFFTTSYQKKDRTKWKESLTKLIDYYKLGFSQHKSYADFDLKWKASSEYNDINDFLADVQKSCYRIEFININWDKLIEFTEYGKFYLFRIANKDLSGNSTGLPNLHTIYWKMLFDESNLKDIVYKMSGNAEVFMRYNSLKNPIVHKAGVEIKNKCPFTEKKTSIFDYDIIKDRRYTKDQLELHVPILMNFKSPSAAKGNVFNKECLEYIKNNGIKHIIGIDRGERNLLYMVITDLDGNIVEQKSLNQIASNPKLPLFRQDYNKLLKTKADANAQARRDWETINTVKEIKFGFLSQIVHEIAMSIIKYDAIVVLENLNRGFMQKRGLENNVYQKFEQMLFDKLSYYVDKTKHPEEAGGALHAYQLSDTYANFNSLSKNAMVRQSGFVFYIPAWLTSKIDPVTGFASFLKFHRDDSMATIKSTISKFDCFKYDKECDMFHIRIDYNKFSTSCSGGQRKWDLFTFGDRILAERNTMQNSRYVYQTVNLTSEFKNLFATKDIDFSGNLKDSICKIEDVGFFRKLSQLLSLTLQLRNSNAETGEDFLISPVADKDGNFFDSRNCPDSLPKDADANGAYNIARKGLMLVEQLKRCKDVSKFKPAIKNEDWLDYVQR

SEQ ID NO: 631 - protein, 1245 aa, unidentified
  REGION 1..1245: note = Cas Enzyme sequence
MQERKKISHLTHRNSVQKTIRMQLNPVGKTMDYFQAKQILENDEKLKEDYQKIKEIADRFYRNLNEDVLSKTRLDKLKDYAEIYYHCNTDADRKRLDECASELRKEIVKNFKNRDEYNKLFNKKMIEIVLPKHLKNEDEKEVVASFKNFTTYFTGFFTNRKNMYSDGEESTAIAYRCINENLPKHLDNVKAFEKAISKLSKNAVDDLDATYSGLCGTNLYDVFTVDYFNFLLPQSGITEYNKIIGGYTTSDGTKVKGINEYINLYNQQVSKRDKIPNLKILYKQILSESEKVSFIPPKFEDDNELLSAVSEFYANDETFDGMPLKKAIDETKLLFGNLDNSSLNGIYIQNDRSVTNLSNSMFGSWSVIEDLWNKNYDSVNSNSRIKDIQKREDKRKKAYKAEKKLSLSFLQVLISNSENDEIREKSIVDYYKTSLMQLTDNLSDKYNEAAPLLNENYSNEKGLKNDDKSISLTKNFLDAIKEIEKFIKPLSETNITGEKNDLFYSQFTPLLDNISRIDRLYDKVRNYVTQKPFSTDKIKLNFGNSQLLNGWDRNKEKDCGAVWLCKDEKYYLAIIDKSNNSILENIDFQDCDESDCYEKIIYKLLPGPNKMLPKVFFSEKCKKLLSPSDEILKIRKNGTFKKGDKFSLDDCHKLIDFYKESFKKYPNWLIYNFKFKKTNEYNDIREFYNDVASQGYNISKMKIPTSFIDKLVDEGKIYLFQLYNKDFSPHSKGTPNLHTLYFKMLFDERNLEDVVYKLNGEAEMFYRPASIKYDKPIHPKNTPIKNKNTLNDKKASTFPYDLIKDKRYTKWQFSLHFPITMNFKAPDRAMINDDVRNLLKLCNNNFIIGIDRGERNLLYVSVIDSNGAIIYQHSLNIIGNKFKGKTYETNYREKLATREKERTEQRRNWKAIESIKELKEGYISQAVHVICQLVVKYDAIIVMEKLTDGFKRGRTKFEKQVYQKFEKMLIDKLNYYVDKKLDPDEEGGLLHAYQLTNKLESFDKLGTQSGFIFYVRPDFTSKIDPVTGFVNLLYPRYENIDKAKDMISRFDEIRYNACEDFFEFDIDYDKFPKTASDYRKKWTICTNGERIEAFRNPANNNEWSYRTIILAEKFKELFDNNSINYRDSDDLKAEILSQSKGKFFEDFFKLLRLTLQMRNSNPETGEDRILSPVKDKNGNFYDSSKYDEKSKLPCDADANGAYNIARKGLWIVEQFKKSDNVSTVEPVIHNDKWLKFVQENDMANN

SEQ ID NO: 632 - protein, 1245 aa, unidentified
  REGION 1..1245: note = Cas Enzyme sequence
MQERKKISHLIHRNSVQKTIRMQLNPVGKTMDYFQAKQILENDEKLKENYQKIKEIADRFYRNLNEDVLSKTGLDKLKDYAEIYYHCNTDADRKRLDECASELRKEIVKNFKNRDEYNKLFNKKMIEIVLPEHLKNEDEKEVVASFKNFTTYFTGFFTNRKNMYSDGEESTAIAYRCINENLPKHLDNVKAFEKAISKLSKNAIDDLDATYYGLCGTNLYDVFTVDYFNFLLPQSGITEYNKIIGGYTTSDGTKVKGINEYINLYNQQVSKRDKIPNLKILYKQILSESEKVSFIPPKFEDDNELLSAVSEFYANDETFDGMPLKKAIDETKLLFGNLDNSSLNGIYIQNDRSVTNLSNSMFGSWSVIEDLWNKNYDSVNSNSRIKDIQKREDKRKKAYKAEKKLSLSFLQVLISNSENDEIREKSIVDYYKTSLMQLTDNLSDKYNEAAPLFSENYSNEKGLKNDDKSISLIKNFLDAIKEIEKFIKPLSETNITGEKNDLFYSQFTPLLDNISRIDILYDKVRNYVTQKPFSTDKIKLNFGNSQLLNGWDRNKEKDCGAVWLCKDEKYYLAIIDKSNNSILENIDFQDCDESDCYEKIIYKLLPGPNKMLPKVFFSEKCKKLLSPSDEILKIRKNGTFKKGDKFSLDDCHKLIDFYKESFKKYPNWLIYNFKFKNTNEYNDISEFYNDVASQGYNISKMKITTTFIDKLVDEGKIYLFQLYNKDFSPHSKGTPNLHTLYFKMLFDERNLEDVVYKLNGEAEMFYRPASIKYDKPTHPKNTPIKNKNTLNDKKASTFPYDLIKDKRYTKWQFSLHFPITMNFKAPDRAMINDDVRNLLKSCNNNFIIGIDRGERNLLYVSVIDSNGAIIYQHSLNIIGNKFKGKTYETNYREKLATREKDRTEQRRNWKAIESIKELKEGYISQAVHVICQLVVKYDAIIVMEKLTDGFKRGRTKFEKQVYQKFEKMLIDKLNYYVDKKLDPDEEGGLLHAYQLTNKLESFDKLGTQSGFIFYVRPDFTSKIDPVTGFVNLLYPRYENIDKGKDMISRFDEIRYNAGEDFFEFDIDYDKFPKTASDYRKKWTICTNGERIETFRNPANNNEWNYRTIILAEKFKELFDNNSINYRDSDDLKAEILSQTKGKFFEDFFKLLRLTLQMRNSNPETGEDRILSPVKDKNGNFYDSSKYDEKSKLPCDADANGAYNIARKGLWIVEQFKKSDNVSTVEPVIHNDKWLKFVQENDMANN

SEQ ID NO: 633 - protein, 1245 aa, unidentified
  REGION 1..1245: note = Cas Enzyme sequence
MQERKKISHLTHRNSVKKTIRMQLNPVGKTMDYFQAKQILENDEKLKENYQKIKEIADRFYRNLNEDVLSKTRLDKLKDYAEIYYHCNTDADRKRLDECASELRKEIVKNFKNRDEYNKLFNKKMIEIVLPKHLKNEDEKEVVASFKNFTTYFTGFFTNRKNMYSDGEESTAIAYRCINENLPKHLDNVKAFEKAISKLSKNAIDDLDATYSGLCGTNLYNVFTVDYFNFLLPQSGITEYNKIIGGYTTNDGTKVKGINEYINLYNQQVSKRDKIPNLKILYKQILSESEKVSFIPPKFEDDNELLSAVSEFYTNDETFDGMPLKKAIDETKLLFGNLDNSSLNEIYIQNDRSVTNLSNSMFGSWSVIEDLWNKNYDSVNSNSRIKDIQKREDKRKKAYKAEKKLSLSFLQVLISNSENDEIREKSIVDYYKTSLMQLTDNLSDKYKEAAPLFSENYDNEKGLKNDDKSISLIKNFLDAIKEIEKFIKPLSETNITGEKNDLFYSQFTPLLDNISRIDILYDKVRNYVTQKPFSTDKIKLNFGNSQLLNGWDRNKEKDCGAVWLCKDEKYYLAIIDKSNNSILENIDFQDCDESDCYEKIIYKLLPTPNKMLPKVFFSEKCKKLLSPSDEILKIRKNGTFKKGDKFSLDDCHKLIDFYKESFKKYPKWLIYNFKFKKTNEYNDIREFYNDVASQGYNISKMKIPTSFIDKLVDEGKIYLFQLYNKDFSPHSKGTPNLHTLYFKMLFDERNLEDVVYKLNGEAEMFYRPASIKYDKPTHPKNTPIKNKNTLNDKKASTFPYDLIKDKRYSKWQFSLHFPITMNFKAPDRAMINDDVRNLLKSCNNNFIIGIDRGERNLLYVSVIDSNGAIIYQHSLNIIGNKFKGKTYETNYREKLATREKERTEQRRNWKAIESIKELKEGYISQAVHVICQLVVKYDAIIVMEKLTDGFKRGRTKFEKQVYQKFEKMLIDKLNYYVDKKLDPDEEGGLLHAYQLTNKLDSFDKLGTQSGFIFYVRPDFTSKIDPVTGFVNLLYPRYENIDKAKDMISRFDEIRYNAGEDFFEFDIDYDKFPKTASDYRKKWTICTNGERIETFRNPANNNEWSYRTIILAEKFKELFDNNSINYRDSDNLKAEILSQTKGKFFEDFFKLLRLTLQMRNSNPETGEDRILSPVKDKNGNFYDSSKYDEKSKLPCDADANGAYNIARKGLWIVEQFKKADNVSTVEPVIHNDKWLKFVQENDMANN

SEQ ID NO: 634 - protein, 1245 aa, unidentified
  REGION 1..1245: note = Cas Enzyme sequence
MQEHKKISHLTHRNSVQKTIRMQLNPVGKTMDYFQAKQILENDEKLKEDYQKIKEIADRFYRNLNEDVLSKTGLDKLKDYAEIYYHCNTNADRKRLDECASELRKEIVKNFKNRDEYNKLFNKKMIEIVLPKHLKNEDEKEVVASFKNFTTYFTGFFTNRKNMYSDGEESTAIAYRCINENLPKHLDNVKAFEKAISKLSKNAIDDLDATYSGLCGTNLYDVFTVDYFNFLLPQSGITEYNKIIGGYTTSDGTKVKGINEYINLYNQQVSKRDKIPNLKILYKQILSESEKVSFIPPKFEDDNELLLAVSEFYANDETFDGMPLKKAIDETKLLFGNLDNSSLNGIYIQNDRSVTNLSNSMFGSWSVIEDLWNKNYDSVNSNSRIKDIQNREDKRKKAYKAEKKLSLSFLQVLISNSENDEIREKSIVDYYKTSLMQLTDNLSDKYKEAAPLLNENYSNEKGLKNDDKSISLIKNFLDAIKEIEKFIKPLSETNITGEKNDLFYSQFTPLLDNISRIDILYDKVRNYVTQKPFSTDKIKLNFGNSQLLNGWDRNKEKDCGAVWLCKDEKYYLAIIDKSNNSILENIDFQDCDESDCYEKIIYKLLPGPNKMLPKVFFSEKCKELLSPSDEILKIRKNGTFKKGDKFSLDDYHKLIDFYKESFKKYPNWLIYNFKFKNTNEYNDIREFYNDVASQGYNISKMKIPTSFIDKLVDEGKIYLFQLYNKDFSPHSKGTPNLHTLYFKMLFDERNLEDVVYKLNGEAEMFYRPASIKYDKPTHPKNTPIKNKNTLNDKKASTFPYDLIKDKRYTKWQFSLHFPITMNFKAPDKAMINDDVRNLLKSCNNNFIIGIDRGERNLLYVSVIDSNGAIIYQHSLNIIGNKFKGKTYETNYREKLATREKDRTEQRRNWKAIESIKELKEGYISQAVHVICQLVVKYDAIIVMEKLTDGFKRGRTKFEKQVYQKFEKMLIDKLNYYVDKKLDPDEEGGLLHAYQLTNKLESFDKLGTQSGFIFYVRPDFTSKIDPVTGFVNLLYPRYENIDKAKDMISRFDDIRYNAGEDFFEMDIDYDKFPKTASDYRKKWTICTNGERIEAFRNPANNNEWSYRTIILAEKFKELFDNNSINYRDSDDLKAEILSQTKGKFFEDFFKLLRLTLQMRNSNPETGEDRILSPVKDKNGNFYDSSKYDEKSKLPCDADANGAYNIARKGLWIVEQFKKADNVSTVEPVIHNDKWLKFVQANDMANN

SEQ ID NO: 635 - protein, 1245 aa, unidentified
  REGION 1..1245: note = Cas Enzyme sequence
MENSNLFTNKYQVSKTLRFRLEPTGGTDDLLRQAQIIEGDERRNKEAITMKQILDNCHKQIIERVLSDFNFKEHSLEEFFKVYTRNDDDREKDIENLQSKMRKEIADAFTKQDVTKLFSSKFKDFVERGLIKYASNEKERNIVSRFKGFATYFTGFNTNRLNMYSEEAKSTAISFRLINQNLIKFIDNILVYKKVSQTLPSDMLSNIYIDFKAIINTSSLEEFFSINNYNNILTQKQIEIFNAVIGGKKDKDEKIITKGFNQYINEYNQTNKNIRLPKMMRLFNQILSDREGVSARPEPFNNANETISSVRDCFTNEISKQITILSETTSKIESFDIDRIYIKGGEDLRALSNSIYGYFNYIHDRIADKWKHNNPQGKKSPESYQKNLNAYLKGIKSVSLHSIANICGDNKVIEYFRNLGAENTVDFQRENVVSLIDNKYNCASNLLSDAQITDEELRTNSRSIKDLLDAVKSAQRFFRLLCGSGNEPDKDHSFYDEYTPAFEALENSINPLYNKVRSFVTKKDFSTDKFKLNFDSSSFLSGWATKSEYEKSSAFIFIRDNQYYLGINRCLSKEDIAYLEDSTSSSDAKRAVYLFQKVDAKNIPRIFIRSKGSNLAPAVNEFQLPIETILDIYDNKFFTTSYQKKDRTKWKQSLTKLIDYYKLGFSQHKSYADFDLKWKASSEYNDINDFLADVQKSCYRIEFININWDKLIEFTEDGKFYLFRIANKDLSGNSTGLPNLHTIYWKMLFDESNLKDIVYKMSGNAEVFMRYNSLKNPIVHKAGVEIKNKCPFTEKKTSIFDYDIIKDRRYTKDQLELHVPILMNFKSPSAAKGNVFNKECLEYIKNNGIKHIIGIDRGERNLLYMVITDLDGNIVEQKSLNQIASNPKLPLFRQDYNKLLKTKADANAQARRDWETINTVKEIKFGFLSQIVHEIAMSIIKYDAIVVLENLNRGFMQKRGLENNVYQKFEQMLLDKLSYYVDKTKHPEEAGGALHAYQLSDTYANFNSLSKNAMVRQSGFVFYIPAWLTSKIDPVTGFASFLKFHRDDSMATIKSTISKFDCFKYDKECDMFHIRIDYNKFSTSCSGGQRKWDLFTFGDRILAERNTMQNSRYVYQTVNLTSEFKNLFATKDIDFSGNLKDSICKIEDVGFFRKLSQLLSLTLQLRNSNAETGEDFLISPVADKDGNFFDSRNCPDSLPKDADANGAYNIARKGLMLVEQLKRCKDVSKFKPAIKNEDWLDYVQR

SEQ ID NO: 636 - protein, 1245 aa, unidentified
  REGION 1..1245: note = Cas Enzyme sequence
MQERKKISHLTHRNSVQKTIRMQLNPVGKTMDYFQAKQILENDEKLKENYQKIKEIADRFYRNLNEDVLSKTGLDKLKDYADIYYHCNTDADRKRLNECASELRKEIVKNFKNRDEYNKLFNKKMIEIVLPEHLKNEDEKEVVASFKNFTTYFTGFFTNRKNMYSDGEESTAIAYRCINENLPKHLDNVKAFEKAISKLSKNAIDDLDATYSGLCGTNLYDVFTVDYFNFLLPQSGITEYNKIIGGYTTSDGTKVKGINEYINLYNQQVSKRDKIPNLKILYKQILSESEKVSFIPPKFEDDNELLSAVSEFYANDETFDGMPLKKAIDETKLLFGNLDNSSLNGIYIQNDRSVTNLSNSMFGSWSVIEDLWNKNYDSVNSNSRIKDIQKREDKRKKAYKAEKKLSLSFLQVLISNSENDKIREKSIVDYYKTSLMQLTDNLSDKYKEAAPLLNESYANEKGLKNDDKSISLIKNFLDAIKEIEKFIKPLSETNITGEKNDLFYSQFTPLLDNISRIDILYDKVRNYVTQKPFSTDKIKLNFGNSQLLNGWDRNKEKDCGAVLLCKDEKYYLAIIDKSNNSILENIDFQDCDESNYYEKIVYKLLTKISGNLPRVFFSEKRKKLLSPSDEILKIYKSGTFKKGDKFSLDDCHKLIDFYKESFKKYPNWLIYNFKFKKTNEYNDISEFYNDVALQGYNISKMKIPTSFIDKLVDEGKIYLFQLYNKDFSPHSKGTPNLHTLYFKMLFDERNLEDVVYRLNGEAEMFYRPASIKYDKPTHPKNTPIKNKNTLNDKKASTFPYDLIKDKRYTKWQFSLHFPITMNFKAPDRAMINDDVRNLLKSCNNNFIIGIDRGERNLLYVSVIDSNGAIIYQHSLNIIGNKFNGKTYETNYQEKLATREKERTEQRRNWKAIESIKELKEGYISQAVHVICQLVVKYDAIIVMEKLTDGFKRGRTKFEKQVYQKFEKMLIDKLNYYVDKKLDPDEEGGLLHAYQLTNKLESFDKLGMQSGFIFYVRPDFTSKIDPVTGFVNLLYPRYEKIDKAKDMISRFDDIRYNAGEDFFEFDIDYDKFPKTASDYRKKWTICTNGERIEAFRNPANNNEWSYRTIILAEKFKELFDNNSINYRDSDDLKAEILSQTKGKFFEDFFKLLRLTLQMRNSNPETGEDRILSPVKDKNGNFYDSSKYDEKSKLPCDADANGAYNIARKGLWIVEQFKKSDNVSTVEPVIHNDKWLKFVQENDMANN

SEQ ID NO: 637 - protein, 1245 aa, unidentified
  REGION 1..1245: note = Cas Enzyme sequence
MKDLKQFIGLYPVSKTLRFELRPVGRTQEWMEKNHVLEHDGKRAEDYPKVKELIDAYHKICISNSLKVSDINWTPLRDAIERNRQEKSDESKKALEEEQTKMRLEICKKLAKFEHYQELVKADTPSKLINGILPHEEVLDTFNKFAVYFEGFQENRRNIYSSEAISTGVAYRLVHDNFPKFLANIEVFENIKEICPEVIQQVATEMAPFLEGVMIEDVFTVSYYNAVLTQNGIDYYNQILGGVAKDNQKYRGINEFVNLYRQAHPELAAKKKSLTMVPLFKQILSDRETLSDIARPIESEKQLIEVINNFYQRITNFDINGKNVNVVKELIDLVLSLDTYNPEGIFISAKSITDVSHSLYGQWNRINEKLYDRAVEEVGGIQTAKNKKKVEAYMKKDAYSLSEITFGDDVSITQYFSALTNSDDSINSLWLQFQSWCKSAEKPQFVHNEVGTEYVKMLLDAIMLVLHKCGALLVSLENELDSDFYNKLLPLYAELENVILVYTRVRNFLTKKLSDTGKIKLKFDTPSLGAGWGINKEKTNKAVLLFKDGLSYLGIMNVKGTLDFNCKVEANEPTFKKMVCRNYSKPYMDLPNSFFSQNGINKFHPSERIQKIYFAFKQDSKSVDIKKVHELIDYYKDAISRHEDWGSFGFKYSPTESYETINDFYTEVAAQSYKLSFIEVPQKQVDEWVEAGKLYLFLLYNKDYAEGAHGRKNLHTLYWESLFSEENLSNLFIKLGGQAELFYRPQSIKKPVSHKVGTKMLNRRAKDGKPIPDAIYRSLYQYFNGKKTEAELTTEEKAYISQVIVKDVHHEIIKDRRYTKQFFYQFHVPIVFNANAPKRPKINERVLEYITENPDVNIIGIDRGERHLVYLTLINQRGEILKQKTFNVVGDYNYQEKLKQRENERDQARKSWQSVGKIKDLKEGFLSAVVHEIAKMMIDYNAIVVLEDLNWGFKRGRFKVERQVYQKFEKMLIDKLNYLSFKDVDTSDEGGILRGYQLTEPVANYTDIGKQTGFLFYIPAAYTSKIDPVTGFVNHFNFNDITNAEKRKDFFMKMERIEMKNGNVEFEFDYRKFKTYQTDFQNVWTVNTSGKRIVFDTEKREHKAVYPTQEFVQAFGNKGITLEEGMDIKAFIGGIEADVKNASFYSTLFYAFKTTLQMRNSNADTREDYILSPVVHDGRQFCTTDEVEKAKDADGNWISKLPVDADANGAYHIALKGLYLLLNPQTKKIENEKWLQFMVEKPYKA

SEQ ID NO: 638 - protein, 1245 aa, unidentified
  REGION 1..1245: note = Cas Enzyme sequence
MQERKKISHLTHRNSVQKTIRMQLNPVGKTMDYFQAKQILENDEKLKEDYQKIKEIADRFYRNLNEDVLSKTRLDKLKDYAEIYYHCNTDADRKRLDECASELRKEIVKNFKNRDEYNKLFNKKMIEIVLPKYLKNEDEKEVVTSFKNFTTYFTGFFTNRKNMYSDGEESTAIAYRCINENLPKHLDNVKVFEKAISKLSKNAIDDLDTTYSGLCGTNLYDVFTVDYFNFLLPQSGITEYNKIIGGYTTSDGTKVKGINEYINLYNQQVSKRDKIPNLKILYKQILSESEKISFIPPKFEDDNELLSAVSEFYANDETFDGIPLKKAIDETKLLFGNLDNSSLNGIYIQNDRSVTNLSNSMFGSWSVIEDLWNKNYDSVNSNSRIKDIQKREDKRKKAYKAEKKLSLSFLQVLISNSENDEIREKSIVDYYKTSLMQLTDNLSDKYNEAAPLLNESYANEKGLKNDDKSISLIKNFLDAIKEIEKFIKPLSETNITGEKNDLFYSQFTPLLDNISRIDILYDKVRNYVTQKPFSTDKIKLNFGNSQLLNGWDRNKEKDCGAVWLCKDEKYYLAIIDKSNNSILENIDFQDCIESDCYEKIIYKLLPGPNKMLPKVFFSEKCKKLLSPSDEILKIRKNGTFKKGDKFSLDDCHKLIDFYKESFKKYPNWLIYNFKFKKTNEYNDIREFYNDVASQGYNISKMKIPTSFIDKLVDEGKVYLFQLYNKDFSPHSKGTPNLHTLYFKMLFDERNLEDVVYKLNGEAEMFYRPASIKYDKPTHPKNTPIKNKNTLNDKKASTFPYDLIKDKRYTKWQFSLHFPITMNFKAPDRAMINDDVRNLLKSCNNNFIIGIDRGERNLLYVSVIDSNGAIIYQHSLNIIGNKFKGKTYETNYREKLATREKERTEQRRNWKAIESIKELKEGYISQAVHVICQLVVKYDAIIVMEKLTDGFKRGRTKFEKQVYQKFEKMLIDKLNYYVDKKLDPDEEGGLLHAYQLTNKLESFDKLGTQSGFIFYVRPDFTSKIDPVTGFVNLLYPRYENIDKAKDMISRFDEIRYNAGEDFFEFDIDYDKFPKTASDYRKRWTICTNGERIEAFRNPANNNEWSYRTIILAEKFKELFDNNSINYRDSDDLKAEILSQTKGKFFEDFFKLLRLTLQMRNSNPETGEDRILSPVKNKNGNFYDSSKYDEKSKLPCDADANGAYNIARKGLWIVEQFKKSDNVSTVEPVIHNDKWLKFVQENDMSNN

SEQ ID NO: 639 - protein, 1245 aa, unidentified
  REGION 1..1245: note = Cas Enzyme sequence
MQEHKKISHLTHRNSVQKTIRMQLNPVGKTMDYFQAKQILENDEKLKENYQKIKEIADRFYRNLNEDVLSKTMLDKLKDYAEIYYHCNTDADRKRLDECASELRKEIVKNFKNRDEYNKLFNKKMIEIVLPEHLKNEDEKEVVASFKNFTTYFTGFFTNRKNMYSDGEESTAIAYRCINENLPKHLDNVKAFEKAISKLSKNAIDDLDATYSGLCGINLYDVFTVDYFNFLLPQSGITEYNKIIGGYTTSDGTKVKGINEYINLYNQQVSKRDKIPNLKILYKQILSESEKVSFIPPKFEDDNELLSAVSEFYANDETFDGMPLKKAIDETKLLFGNLDNSSLNGIYIQNDRSVTNLSNSMFGSWSVIEDLWNKNYDSVNSNSRIKDIQKREDKRKKAYKAEKKLSLSFLQVLISNSENDEIREKSIVDYYKTSLMQLTDNLSDKYKEAAPLFSENYDNEKGLKNDDKSISLIKNFLDAIKEIEKFIKPLSETNITGEKNDLFYSQFTPLLDNISRIDILYDKVRNYVTQKPFSTDKIKLNFGNSQLLNGWDRNKEKDCGAVWLCKDEKYYLAIIDKSNNSILENIDFQDCDKSDCYEKIIYKLLPGPNKMLPKVFFSEKCKKLLSPSDEILKIRKNGTFKKGDKFSLDDCHKLIDFYKESFKKYPNWLIYNFKFKNTNEYNDISEFYNDVASQGYNISKMKIPTSFIDKLVDEGKIYLFQLYNKDFSPHSKGTPNLHTLYFKMLFDERNLEDVVYKLNGEAEMFYRPASIKYDKPTHPKNTPIKNKNTLNDKKASTFPYDLIKDKRYTKWQFSLHFPITMNFKAPDKAMINDDVRNLLKSCNNNFIIGIDRGERNLLYVSVIDSNGAIIYQHSLNIIGNKFKGKTYETNYREKLATREKDRTEQRRNWKAIESIKELKEGYISQAVHVICQLVVKYDAIIVMEKLTDGFKRGRTKFEKQVYQKFEKMLIDKLNYYVDKKLDPDEEGGLLHAYQLTNKLESFDKLGTQSGFIFYVRPDFTSKIDPVTGFVNLLYPRYENIDKAKDMISRFDDIRYNAGEDFFEFDIDYDKFPKTASDYRKKWTICTNGERIEAFRNPASNNEWSYRTIILAEKFKELFDNNSINYRDSDDLKAEILSQTKGKFFEDFFKLLRLTLQMRNSNPETGEDRILSPVKDKNGNFYDSSKYDEKSKLPCDADANGAYNIARKGLWIVEQFKKADNVSTVEPVIHNDKWLKFVQENYMANN

SEQ ID NO: 640 - protein, 1245 aa, unidentified
  REGION 1..1245: note = Cas Enzyme sequence
MNEQKSLSTFTNLYSLSKTLRFELIPQGRTLENIQVHGLLVKDENRAESYKKVKKIIDEYHKDFINNALDGLILTGLESFQSYYTKSVRTDEDKKEMGLLQSIMRKQISDRFSKHPNESINIRFKNLFAKELIKIDLKEFVKDEDKTLIAEFDNFTTYFTGFHENRKNIYTSEDISTAIGYRLAHQNLLYFLDNLKTFEKVTASIISDDFAEIIKELEMIVQVNTIDEVFTISYFNKTLTQIGIEKYNTILGGYISEDNKTKIKGLNEYINLYNQQQTDKANKIGKLKPLYKQILSDRGSASFLPEAFESDNEVLEGVETMYQELNTTIQHIKKLVADLNLFDLDKVFIKNDLGLTGISQKVFGDWGAIQLAIEKRFELNVPKGLKEGQEKYEEKKKKWYRNNDSFSIAYINDCIALSNSENTIKIEKFLEGFGSNNDSPDLLSLISSNYDAIKDLLNQNYSVDKNLGRDKLNIEKIKVLLDSIKSFQHFVKPLCGKGDEADKDERFYGEFLPLFETLDSINLLYNKVRNYVTQKPYSIEKYKLNFDNSTLLNGWDENKEPDNTSVILRKDNLYYLAIMNKKNNKVFENKFTNVTDGYYEKMVYKLLPGANKMLPRVFFSNSRIKEFNPSEELLKNYKNESHKKGETFNIKHCHALIDFFKASILKHEDWKHFNFKFSDTSSYQDISGFYREVEHQGYKINFSNIPDVYINELVEEGKIYLFKIYNKDFSPFSKGTPNLHTIYWKMLFDEHNLKNVVYKLNGQAEVFFRKESLKQDSIVIHKADAAILNKNPNNTKKQSTFNYDIIKDRRFTVDKFQFHVPITMNFKANGSDRINAEVCQFLQNNPDIHIIGIDRGERHLLYLSLINRNGEIIKQFSFNEIVNEYQGIQHKVDYHSLLDRKEGNRDDARKNWSTIETIKELKEGYLSQVIHIIAKLMVERKAIVVLEDLNFGFMRGRQKVEKQVYQKFEKMLIDKLNYLVDKSKGMNELGGISNALQLTNKFESFQKMGKQSGFLFYVPAWNTSKIDPVTGFVNLFSNKYENISQAKSFFGKFTSIKFNTNEQCFEFSFDYKNFTEKGEGSRTKWTLIADNQDRYSFNKHLNNGSGGQEHYSVAQRLELLFGEHQINYESGANIISQIEAQTSADFFKTLMKLLNVTLSLRHNNGEKGDKEQDYILSPIKSNEGIFFDSRKASSKQPKDADANGAYNIARKGLWVLEQIDKAEEFKSLKLAISNKEWLAFVQKLL

SEQ ID NO: 641 - protein, 1245 aa, unidentified
  REGION 1..1245: note = Cas Enzyme sequence
MSNLNQFTGLYPVSKTLCFELKPQGRTLEHIKNKGIIKQDEHRAESYIKVKKIIDDYHKLFIDKALQGCNLTLLQDYLVLYKITKRDDAQNKKFEETQENLRIQIASRFIKHDKFKTLFSKELIKIDLKTFVKTEEELDLLSEFDNFTTYFTGFHENRSNMYSSEDKSTAIAYRLIHQNLPKFIDNIDSFIKVSNSAIKENFGIILSELESIVQVKAIEDVFTLNYFNETLTQLGIDKYNILIGGYTSEDGKVKIKGLNEYINIYNQKAKKEDKLPKLKPLYKQILSDRVTASYIPEEFKNDSEVLTAINKFYQELNENVINKKELSLKTILQNLSDYDLTKIYLKNDSGLTDLSKKMFGEWDIFTRAMNVWYRDNYLGRLKLGTMKYEEEQKKYFRNQDSFSIKFLDDCLLLLDGVFHKKVEDYFRLLGVKDGEKIPDLIKRVESNYQAIQNLLNSVYPDSKTLSQDQKSVDGIKDFLDSIKDLQQFIKPMLGKGTESEKDNRFYSEFLKLWEILNQITVLYDKVRNYVTKKPYSTEKIKLNFENSTLMAGWDVNKETDNTAVIFRKYGLYYLGIMDKKHNRIFSKDLGEDSNGHYYEKMNYKLLPGANKMLPHVFLSNSGIEKFKPNSSLLINYKDETHKRGDKFNLQHCHDLIDYFKKSINAHEDWKNFNFEFSDTDSYSDLSEFYKEVEIQGYKITYRKISESYINQMVDEGKLYLFQLYSKDFSVYGKGTPNMHTIYWKMLFDPENLENVVYKLSGEAEIFYRKASIKESDKIVHRANQPINNKNSLNAKEQSTFGYDIIKDRRYTVDKFLFHVPVVANFKAPKINNINNEVNTFIKNSDDLHIIGIDRGERNLLYLTLIDLKGNIKQQFSLNEIINECHGNTYKTNYHDLLDRRETERDESRKNWKSIESIKDLKDGYLSQVIHKISELMIKYNAIVVLEDLELGFIQGRQKIEKQVYQKFEKMLIDKLNYLVVDKNIEASEFGGALKAYQLTNKFESFQKMGKQSGFLFYVPAWNTSKIDPVTGFVNMFDTRYENIEKAKAFFNKFESIRYNKDKDYFEFSVTDYSKFNPKAIGTKQNWLICTNGNRIETFRNNKKSDQWDNREIVLSYEFKKIFKEFNVDIGSDIKDAISNQTDKRFFENLLHLFKLTLQIRNSISGTEIDYLISPVMNDSGVSYDSRVAENIFPKDADANGAYNTARKGLMAVNRIKGIIDLKKLDLYIKNKEWLVFAQNFSGNKG

SEQ ID NO: 642 - protein, 1245 aa, unidentified
  REGION 1..1245: note = Cas Enzyme sequence
MKDLKQFIGLYPVSKTLRFELRPVGRTQEWMEKNHVLEHDGKRAEDYPKVKELIDAYHKICISNSLKVSDINWTPLRDAIERNRQEKSDESKKALEEEQTKMRLEICKKLAKFEHYQELVKADTPSKLINGILPHEEVLDTFNKFAVYFEGFQENRRNIYSSEAISTGVAYRLVHDNFPKFLANIEVFENIKEICPEVIQQVATEMAPFLEGVMIEDVFTVSYYNAVLTQNGIDYYNQILGGVAKDNQKYRGINEFVNLYRQAHPELAAKKKSLTMVPLFKQILSDRETLSDIARPIESEKQLIEVINNFYQRITNFDINGKNVNVVKELIDLVLSLDTYNPEGIFISAKSITDVSHSLYGQWNRINEKLYDRAVEEVGGIQTAKNKKKVEAYMKKDAYSLSEITFGDDVSITQYFSALTNSDDSINSLWLQFQSWCKSAEKPQFVHNEVGTEYVKMLLDAIMLVLHKCGALLVSLENELDSDFYNKLLPLYAELENVILVYTRVRNFLTKKLSDTGKIKLKFDTPSLGAGWGINKEKTNKAVLLFKDGLSYLGIMNVKGTLDFNCKVEANEPTFKKMVCRNYSKPYMDLPNSFFSQNGINKFHPSERIQKIYFAFKQDSKSVDIKKVHELIDYYKDAISRHEDWGSFGFKYSPTESYETINDFYTEVAAQSYKLSFIEVPQKQVDEWVEAGKLYLFLLYNKDYAEGAHGRKNLHTLYWESLFSEENLSNLFIKLGGQAELFYRPQSIKKPVSHKVGTKMLNRRAKDGKPIPDAIYRSLYQYFNGKKTEAELTTEEKAYISQVIVKDVHHEIIKDRRYTKQFFYQFHVPIVFNANAPKRPKINERVLEYITENPDVNIIGVDRGERHLVYLTLINQRGEILKQKTFNVVGDYNYQEKLKQRENERDQARKSWQSVGKIKDLKEGFLSAVVHEIAKMMIDYNAIVVLEDLNWGFKRGRFKVERQVYQKFEKMLIDKLNYLSFKDVDTSDEGGILRGYQLTEPVANYTDIGKQTGFLFYIPAAYTSKIDPVTGFVNHFNFNDITNAEKRKDFFMKMERIEMKNGNVEFEFDYRKFKTYQTDFQNVWTVNTSGKRIVFDTEKREHKAVYPTQEFVQAFGNKGITLEEGMDIKAFIGGIEADVKNASFYSTLFYAFKTTLQMRNSNADTREDYILSPVVHDGRQFCTTDEVEKAKDADGNWISKLPVDADANGAYHIALKGLYLLLNPQTKKIENEKWLQFMVEKPYKA

SEQ ID NO: 643 - protein, 1245 aa, unidentified
  REGION 1..1245: note = Cas Enzyme sequence
MRERKKISHLTHRNSVQKTIRMQLNPVGKTMDYFQAKQILENDEKLKENYQKIKEIADRFYRNLNEDVLSKTRLDKLKDYAEIYYHCNTDADRKRLNECASELRKEIVKNFKNRDEYNKLFNKKMIEIVLPQHLKNEDEKEVVASFKNFTTYFTGFFTNRKNIYSDGEESTAIAYRCINENLPKHLDNVKAFEKAISKLSKNAVDDLDVTYSGLCGTNLYDVFTVDYFNFLLPQSGITEYNKIIGGYTTSDGTKVKGINEYINLYNQQVSKRDKIPNLKILYKQILSESEKVSFIPPKFEDDNELLSAVSEFYANDETFDGMPLKKAIDETKLLFGNLDNSSLNGIYIQNDRSVTNLSNSMFGSWSVIEDLWNKNYDSVNSNSRIKDIQKREDKRKKAYKAEKKLSLSFLQVLISNSENDEIREKSIVDYYKTSLMQLTDNLSDKYKEAAPLFSENYDNEKGLKNDDKSISLIKNFLDAIKEIEKFIKPLSETNITGEKNDLFYSQFTPLLDNISRIDILYDKVRNYVTQKPFSTDKIKLNFGNSQLLNGWDRNKEKGCGAVWLCKDEKYYLAIIDKSNNSILENIDFQDCDESDCYEKIIYKLLPGPNKMLPKVFFSEKCKELLSPSDEILKIRKNGTFKKGDKFSLDDCHKLIDFYKESFKKYPNWLIYNFKFKNTNEYNDISEFYNDVASQGYNISKMKIPTSFIDKLVDEGKIYLFQLYNKDFSPHSKGTPNLHTLYFKMLFDERNLEDAVYKLNGEAEMFYRPASIKYDKPTHPKNTPIKNKNTLNDKKTSTFPYDLIKDKRYTKWQFSLHFPITMNFKAPDKAMINDDVRNLLKSCNNNFIIGIDRGERNLLYVSVIDSNGAIIYQHSLNIIGNKFKGKTYETNYREKLATREKERTEQRRNWKAIESIKELKEGYISQAVHAICQLVVKYDAIIVMEKLTDGFKRGRTKFEKQVYQKFEKMLIDKLNYYVDKKLDPDEEGGLLHAYQLTNKLESFDKLGTQSGFIFYVRPDFTSKIDPVTGFVNLLYPRYENIDKAKDIISRFDDIRYNAGEDFFEFDIDYDKFPKTASDYRKKWTICTNGERIEAFRNPANNNEWSYRTIILAEKFKELFDNNSINYRDYDDLKAEILSQTKGKFFEDFFKLLILTLQMRNSNPETGEDRIFSPVKDKNGNFYDSSKYDEKSKLPCDADANGAYNIARKGLWIVEQFKKSDNVSTVEPVIHNDKWLKFVQENDMANN

SEQ ID NO: 644 - protein, 1245 aa, unidentified
  REGION 1..1245: note = Cas Enzyme sequence
MNEQKSLSTFTNLYSLSKTLRFELIPQGRTLENIQVHGLLVKDENRAESYKKVKKIIDEYHKDFINKALDGLILTGLESFQSYYTKSVRTDEDKKEMGLLQAIMRKQISDRFSKHPNESINIRFKNLFAKELIKIDLKEFVKDEDKTLIAEFDNFTTYFTGFHENRKNIYTSEDISTAIGYRLAHQNLLYFLDNLKTFEKVAASTISDDFAEIIKELEMIVQVNTIDEVFTISYFNETLTQIGIEKYNTLLGGYTSEDNKTKIKGLNEYINLYNQQQTDKANKIGKLKPLYKQILSDRGSSSFLPEAFESDNEVLEGIETMYHELDTTIQHIKKLVSDLNLFDLDKVYIKNDLGLTDISQKVFGDWGAIQLAIEKAFEIEVPKGSKEGQEKYEEKKKKWYRNNDSFSISYINKCIEQPGLDKSINIEKYLIGFGSNNDSPDLFILINTNYDAIKDLLNQQYRTDKNLGQDKLNIEKIKVLLDSIKSFQHFVKPLCGKGDEADKDERFYGEFLPLFETLDSINLLYNKVRNYVTQKPYSIEKYKLNFDNSTLLNGWDENKEPDNTSVILRKDNLYYLAIMNKKNNKVFENKFTNVTDGYYEKMVYKLLPGANKMLPKVFFSNSRIKEFNPSEELLKNYKNESHKKGETFNIKHCHALIDFFKASIQKHEDWKHFNFKFSDTSSYQDLSGFYREVEHQGYKINFSNITDAYINELVEEGKIYLFKIYNKDFSPFSKGTPNLHTIYWKMLFDEHNLKNVVYKLNGQAEVFFRKESLKNDSIVIHKADAAILNKNPNNTKKQSTFNYDIIKDRRFTVDKFQFHVPITMNFKANGSDRINAEVCQFVQNNPDIHIIGIDRGERHLLYLSLINRSGEIIKQFSLNEIVNEYQGIQHKVDYHSLLDRKEGNRDEARKNWSTIETIKELKEGYLSQVIHIIAKLMVERKAIVVLEDLNFGFMRGRQKVEKQVYQKFEKMLIDKLNYLVDKSKGVNELGGISNALQLTNKFESFQKMGKQSGFLFYVPAWNTSKIDPITGFVNLFSNKYENISQAKSFFGKFTSIKFNTNEQCFEFSFDYKNFTEKGEGSRTKWTLIADNQDRYSFNKHLNNGSGGQEHYSVAQRLELLFGEHQITYGSGENLIPQIEAQTSADFFKILMKLLNVTLSLRHNNGEKGDKEQDYILSPIKSTEGIFFDSRKASSKQPKDADANGAYNIARKGLWVLEQIDKAEEFKSLKLAISNKEWLAFVQKLL

SEQ ID NO: 645 - protein, 1245 aa, unidentified
  REGION 1..1245: note = Cas Enzyme sequence
MKDLKQFIGLYPVSKTLRFELRPVGKTQEWMEKNHVLEHDGKRAEDYPRVKELIDAYHKICISESLKGVALDWCPLRDAIERNRQEKSDESKTALEEAQTKMRLEICKKLAKFEHYQELVKADTPSKLINGILPHDKALDTFNKFAVYFEGFQENRRNIYSSEAISTGVAYRLVHDNFPKFLANIEVFENIKEICPEVIQQVATEMAPFLEGVMIEDVFTVSYYNAVLTQNGIDYYNQILGGVAKDGQNYRGINEFVNSYRQAHPELAAKKKSLTMVPLFKQILSDRETLSDIARPIESEKQLIEVINHFYHRITNLDINGKNVNVVKELTGLVLSIDTYNPEGVFISAKSITDVSHSLYGHWNRINENLYDKVAEAIGGIQTAKNRNKVEAYLKKESYSLSELSFSDDVSITQYFSALTNSADSINSLWLQFQCWCKSAEKPQFVHNEVGTEYVKMLLDAIMLVLHKCGALLVSLENELDSDFYNKFLPLYAELENVILVHTRVRNFLTKKLSDTGKIKLKFDTPSLGAGWGINKEKTNKAVLLFKDGLSYLGIMNVKGTLDFNCKIEADEPTFKKMVCRNYSKPYMDLPNSFFSQNGISKFHPSERIQKIYLAFKENSKNVDIKKVHELIDYYKDAISRHEDWGSFGFKYSPTESYENINDFYMEVAAQSYKLSFIEVPQKQVDEWVETGKLYLFQLYNKDYAEGAHGRKNLHTMYWECLFSEENLSNLFIKLGGQAELFYRPQSIKKPVSHKVGTKMLNRRNKEGKPIPDAIYRSLYQYFNGKKTEAELTAEEKAYISQVIVKDVHHEIIKDRRYTKQFFYQFHVPIVFNANAPKRPKINEKVLEYIKENPDVNIIGIDRGERHLVYLTLINQHGEILKQKTFNVVGNYDYQEKLKQRENERDQARKSWQSVGKIKDLKEGFLSTVVHEIAKMMIEHNAIVVLEDLNRGFKRGRFKVERQVYQKFEKMLIDKLNYLSFKDVDTANEGGILRGYQLTEPVANYTDIGKQTGFLFYIPAAYTSKIDPVTGFVNHFNFNDITNAEKRKEFFMKMERIEMKDGNIEFEFDYRKFKTYQTDFQNVWTVNTYGKRIVFDTDKKEPKNIYPTQEIVQAFGNKGITLEEGMDIKAFIGGIEADIKNASFYSTLFYAFKTTLQMRNSNADTREDYILSPVVHDGRQFCTTDEVEKGKDADGNWISKLPVDADANGAYHIALKGLCLLMNPQTKKIENEKWLQFMVEKPYKA

SEQ ID NO: 646 - protein, 1245 aa, unidentified
  REGION 1..1245: note = Cas Enzyme sequence
MKDLKQFIGLYPVSKTLRFELRPVGRTQEWIEKNHVLEHDGKRAEDYPRVKELIDAYHKICISESLKGVALDWCPLRDAIERNRQEKSDESKTALEEEQAKMRKKICEKLSKFEHYQELVKADTPSKLINGILPHEEALDTFNKFAVYFEGFQENRRNIYSSEAISTGVAYRLVHDNFPKFLANIEVFENIKEICPEVIQQVATEMAPFLEGVMIEDVFTVSYYNAVLTQNGIDYYNQILGGVAKDDQKYRGINEFVNLYSQAHPELAAKKKSLTMVPLFKQILSDRETLSDIARPIESEKQLIEVLTHFYHRITNLDINGKNVNVVKELIDLALSLDTYNPEGIFISAKSITDVSHSLYGQWNRINEKLYDKAVEAIGGVQTAKNKKKVEAYLKKDAYSLSELSFDDDVSITQYFFALTNSTDSINSLWLQVQSWCKSAEKPQLAHNEVGTEYVKMLLDAIMLVLHKCGALLVSLENELDSDFYNKFLPLYAELENVILVYTRVRNFLTKKLSDTGKIKLKFDKPSLAACWGINKEKTSKAVLMFRNGLSYLGIMNVKGTLEFNCKIEAGEPTFKKMVLTNHSKPYMDLPNSFFSQNGINKFHPSERIQKIYEMFKKDSKSVDIKKVRELIDYYKDAITRNEDWNAIDYVFSPTESYENINDFYMEVAAQSYKLSFIDVPKKQVDEWIETGKLYLFQLYNKDYAEGAHGRKNLHTMYWESLFSEENLSNLFIKLGGQAELFYRPQSIKKPVSHKVGTKMLNRRNKEGKPIPDAIYRSLYQYFNGKKAEAELTTEEKAYISQVIVKDVHHEIIKDRRYTKQFFYQFHVPIVFNANAPKRPKINERVLEYITENPDVNIIGIDRGERHLVYLTLINQHGVILKQKTFNVIGDYDYQEKLKQRENERDQARKSWQSVGKIKDLKEGFLSAVVHEIAKMMIEYNAIVVLEDLNWGFKRGRFKVERQVYQKFEKMLIDKLNYLSFKDVDTANEGGILRGYQLTEPVANYTDIGKQTGFLFYIPAAYTSKIDPATGFVNHFNFNDITNAEKRKDFFMKMERIEMKKGNVEFEFDYRKFKTYQTDFQNVWTINTSGKRIVFDTEKREHKAVYPTHEIVQAFGNKGITLEEGTDIKALIEGIEADVKNASFFSSFFYAFKTTLQMRNSNADTREDYILSPVVRDGKQFCTTDEVNKGKDADGNWISRLPVDADANGAYHIALKGLYLLMNPQTKKIENEKWLRFMVEKPYME

SEQ ID NO: 647 - protein, 1246 aa, unidentified
  REGION 1..1246: note = Cas Enzyme sequence
MQEHKKISHLTHRNSVQKTIRMQLNPVGKTMDYFQAKQILENDEKLKEDYQKIKEIADRFFRNLNEDVLSKTGLDKLKDYAEIYYHCNTDADRKRLNECASELRKEIVKNFKNRDEYNKLFDNKKMIEIVLPKHLKNDDEKEVVASFKNFTTYFKGFFTNRKNMYSDGEESTAIAYRCINENLPKHLDNVKVFEKAISKLSKNAIDDLDATYSGLCGTNLYDVFTVDYFDFLLSQSGITEYNKIIGGYTTSDGTKIKGINEYINLYNQQVSKRDKIPNLKILYKQILSESEKVSFIPPKFEDDNELLSAVSEFYANDETFDGMPLKKAIDETKLLFGNLDNSSLNGIYIQNDRSVTNLSNSMFGSWSVIEDLWNKNYDSVNSSSRIKDIQKREDKRKKAYKAEKKLSLSFLQVLISNSENNEIREKSIVDYYKTSLMQLTDNLSDKYKEAAPLFNENYSNEKGLKNDDKSISLIKNFLDAIKEIEKFIKPLYETNITGEKNDLFYSQFTPLLDNISRIDILYDKVRNYVTQKPFSTDKIKLNFGNSQLLNGWDRNKEKDCGAVWLCKDEKYYLAIIDKSNNSILENIDFQDCDESDCYEKIIYKLLPGPNKMLPKVFFSEKCKKLLSPSDEILKIRKNGTFKKGDKFSLDDCHKLIDFYKESFKKYPNWLIYNFKFKNTTEYNDISEFYNDVALQGYNISKMKIPTSFIDKLVDEGKIYLFQLYNKDFSPHSKGTPNLHTLYFKMLFDERNLEDVVYRLNGEAEMFYRPASIKYDKPTHPKNTPIKNKNTLNDKKASTFPYDLIKDKRYTKWQFSLHFPITMNFKAPDRAMINDDVRNLLKSCNNNFIIGIDRGERNLLYVSVIDSNGAIIYQHSLNIIGNKFKGKTYETNYREKLATREKDRTEQRRNWKAIESIKELKEGYISQAVHVICQLVVKYDAIIVMEKLTDGFKRGRTKFEKQVYQKFEKMLIDKLNYYVDKKLDPDEEGGLLHAYQLTNKLESFDKLGMQSGFIFYVRPDFTSKIDPVTGFVNLLYPRYENIDKAKDMISRFDDIRYNAGEDFFEFDIDYDKFPKTASDYRKKWTICTNGERIEAFRNPASNNEWSYRTIILAEKFKELFDNNSINYRDSDNLKAEILSQTKGKFFEDFFKLLRLTLQMRNSNPETGEDRILSPVKDKNGNFYDSSKYDEKSNLPCDADANGAYNIARKGLWIVEQFKKSDNVSTVEPVIHNDKWLKFVQENDMANN

SEQ ID NO: 648 - protein, 1246 aa, unidentified
  REGION 1..1246: note = Cas Enzyme sequence
MMETFSDFTNLYPLSKTLRFRLIPVGKTLRHFIDSGILEEDQHRAESYVKVKAIIDDYHRSYIESSLSGFELPVESMGKSNSLEEYYLYHNIRNKTEDIQNALSKVRNNLRKQIVAQLTKNEMFKRIDKKELIQNDLIDFVKNEPDANEKIALISEFRNFTVYFKGFHENRKNMYSDEEKSTSIAFRLIHENLPKFIDNMEVFAKIQNTSISEKFDAIQKELCPDSVAFVDMFKLGYFNRTLSQKQIDAYNTVISGRTTAEGEKIKGLNEYINLYNQQHKQEKLPKMKLLFKQILSDRESASWLPEKLENDKQVVGALVDFWNTIHDTVLAEGGLKTVISLLVSYSLEGIFLKNDLQLTDVSQKATGSWSKIPTAIKQKLKAMNPQKKKESYEGYQERIDKIFKSYKSFSLAFINECLHGEYKIEDYFIKLGAINTDLLQKENHFSHILNTYTDIKEVIESYSESTDTKLIRDNGSIQKIKQFLDSVKDLQAYVKPLLGNGDETGKDERFYGDFVEYWNLLDLITPLYNMIRNYVTQKPYSVEKIKINFQNPTLLNGWDLNKETDNTSVILRRDDKYYLAIMTSKFRKVFLEYPSGSDRSCYEKMEYKLLPGANKMLPKVFFSKSRIQEFMPDERLLSNYEKGTHKKTGNCFSLTDCHALIDFFKKSLNKHEDWRNFGFKFSDTSTYTDMSGFYKEVENQGYKLSFKPIDAVYVDQLVDEGKIFLFQIYNKDFSEHSKGTPNMHTLYWKMLFDETNLGDVVYKLNGEAEVFFRKASIKVSSPTHPASVPIKKKNPKHMDEERILKYDLIKDKRYTVDQFQFHVPITMNFKSDGNGNINQKVVEYLRSASNIHIIGIDRGERNLLYLVVIDGSGKICEQFSLNEIKVEHNGETYSTNYHDLLDIKENERKQARQSWQSIANIKELKEGYLSQVIHKISELMVKYNAIVVLEDLNTGFMRGRQKVEKQVYQKFEKMLIEKLNYLVFKKQSLNLCGGLMHAYQLTNKFEGFNKLGKQSGFLFYIPAWNTSKMDPVTGFVNLFDLKYESIDKAKSFFSKFDSIRYNVERDMFEWKFNYDKFTKKAEGTKTNWTVCSYGNRIITFRNPNKNSQWDNKEINLTENIKLLFERFGIDLSSNLKDEIIQRTEKEFFIELISLFKLVLQMRNSWTGTDIDYLVSPVCNEKGEFFDSRNVDKALPQNADANGAYNIARKGLIFLDRIKESTSDKKLNCSITNKEWLLFVQNCCKNG

SEQ ID NO: 649 - protein, 1246 aa, unidentified
  REGION 1..1246: note = Cas Enzyme sequence
MMETFSDFTNLYPLSKTLRFRLIPVGKTLRHFIDSGILEEDQHRAESYVKVKAIIDDYHRSYIESSLSAFELPVESMGKSNSLEEYYLYHNIRNKTEDIQNALSKVRNNLRKQIVAQLTKNEMFKRIDKKELIQNDLIDFVKNEPDANEKIALISEFRNFTVYFKGFHENRKNMYSDEEKSTSIAFRLIHENLPKFIDNMEVFAKIQNTSISEKFDAIQKELCPDSVAFVDMFKLGYFNRTLSQRQIDAYNTVISGRTTAEGEKIKGLNEYINLYNQQHKQEKLPKMKLLFKQILSDRESASWLPEKLENDKQVVGALVDFWNAIHDTVLAEGGLKTVISSLVSYSLEGIFLKNDLQLTDVSQKATGSWSKIPAAIKQKLEAMNPQKKKESYEGYQERIDKIFKSYKSFSLAFINECLHGEYKIEDYFIKLGAINTDLLQKENHFSHILNTYTDIKEVIESYSESTDTKLIRDNGSIQKIKQFLDAVKDLQSYVKPLLGNGDETGKDERFYGDFVEYWNQLDLITPLYNMVRNYVTQKNYSIEKIKINFQNPTLLNGWDLNKETDNTSVILRRDGKYYLAIMNSKFRKVFLKYPSGSDRNCYEKMEYKLLPGANKMLPKVFFSKSRIQEFMPDERLLSNYEKGTHKKTGNCFSLTDCHALIDFFKKSLNKHEDWKNFGFKFSNTSTYTDMSGFYKEVENQGYKLSFKPVDAVYVDQLVDEGKIFLFQIYNKDFSEHSKGTPNMHTLYWKMLFDETNLGDVVYKLNGEAEVFFRKASIKVSSPTHPANVPIKKKNPKHKDEERLLKYDLIKDKRYTVDQFQFHVPITMNFKSDGNGNINQKVVEYLRSASNIHIIGIDRGERNLLYLVVIDGSGKICEQFSLNEIKVEHNGETYSTNYHDLLDIKENERKQARQSWQSIANIKELKEGYLSQVIHKISELMVKYNAIVVLEDLNTGFMRGRQKVEKQVYQKFEKMLIEKLNYLVFKKQPSDSCGGLMHAYQLTNKFEGFNKLGKQSGFLFYIPAWNTSKMDPMTGFVNLFDLKYESIDKAKSFFSKFDSIRYNVERDMFEWKFNYDEFTKKAEGTKTNWTVCSYGNRIITFRNPNKNSQWDNKEINLTENIKLLFERFGIDLSSNLKDEIMQRTEKEFFIELISLFKLVLQMRNSWTGTDIDYLVSPVCNEKGEFFDSRNVDKALPQNADANGAYNIARKGLILLDRIKESTSDKKLNFSITNKEWLSFVQGCCKNG

SEQ ID NO: 650 - protein, 1246 aa, unidentified
  REGION 1..1246: note = Cas Enzyme sequence
MKKNFANLTNLYSLTKTLKFELKPVLGTKSLQDVIKNDREIDRLYEKEMKPMFDRMHEQFIMESLDGADISIKLLQQIEDELFKMKDYKSCENSKDKMRIFEKNIEGIQEKLRKDVIRVFNNKGNEWKNRYPDIKFKKNGYQILFENNILLMLKDLNPEKEDIIKKFDKFFTYFSGFNKNRENYYSDEDKATSIANRIINENLIRFLDNKYEFRLLSNKINELKKYDEYFELFYYSKCLNSGDIDLYNKKLGIVNEIVNKFFQQNKGILPKLVRLKLLYKQIGCDKTKFGIFQIEEGKEWVSIEELYAKQKDLLKNIENLYQNFFADIDDFDLDSIYFNKASINTVSSRWFVAWDVLSELLLENKIIKNKDRNKGGDFRIPQSISLFDFSVVLKNNVDVINLFRLGAKDQSGKGEYEKLYKNNAWDTFLAIWKHEIKKNFEEFNNELERFNQEKKRKFDIRDEEDKKLIKDFCDTMLSIERMIKYHTVKEFNIKDNSFYEVIDQYCEKSNLNEYYNAFRNYLTKKLYNTNKFKLNFNQSTLASGFDIDKELSNLVVILRGAGIYYLAVIDKNNKNCFSKDKNKDLYSNASDEWEKLNYKYFPSASKMIPKCSTQLKNVIGHFKKNKDEYLLFNASFNKKLTITRRIFDLNNVKYSEDDLNKIVQDSEKGVKLFQKDYLKNGGNKKVYRAALTDWINFCKDFLESYKSCEYFDYSSIKDADDYEYLEDFYVDVDRASYFTEFVGINKGMLERLINDGKIYLFSIYNKDFAEHKTGKDNLETIILKNLFSSDIIKLNGGAELFFRDKSIDKKVDSDRSKKKKFSIIKNKRYSEEKIFFHFSVTLNFGLEDLSYKKFNINFNSSINENYKILGIDRGEKNLLYYSLINQDGVINKQGSLNIINGKDYNSLLTDRSRDMMEARRSWSTIGSIKELKEGYLSQAIHEIYKLSVDNNAIIVLEDLNPYFKAKRTARVEKSIYKKFEVALAKKLNYLSMKDKGANELGGILNAYQLTPLINAGGLRYFESSKQWGVIFYVNPSYTSAIDPLTGWRKTKYISNSISEEIAREEFGINSIKIDFDKKYNCFKFNYDDWNLFAYDGIERFYWNKNEKDENGKFGKMKKYNLFEELEKLFLGLDKNRNINEQIITQKEFDWKSLVFYWNLLNQIRNTNREKQGNENDFLQSPVWSNKINDFYDSRKKYKINLPDNGDANGAYNIARKGMILLDRIKNNPDSPDLFIRNDDWDKFVQR

SEQ ID NO: 651 - protein, 1246 aa, unidentified
  REGION 1..1246: note = Cas Enzyme sequence
MILDNIHENNLTGLKNFTNQYPISKTLRFELRPCGVTMENIRKSNFLEEDEKRAIDYELIKKAIDDFHRKFIDSSLQDIRLNWQPLADALTKYNVQKDVADKKIVESEQKKLRKDIVDIFKKDPRFDDLFSEKLLSKYIFEDLASTDNPENLDAIESFRKFSGYFIGFHENRKNVYSSEDITTSISNRTVNINFSKHIENCDRYTEAKRIMPDAIESFKIEPFNEGIDLDKVFSVDGFNEVILQDGIERYNRVLGGFRPEIGNKIRGLNEFLNLGYQNGLSKQKIRMVPLHKQILSIENTASFVPWAFESDAELLHVISTFYDDLIQNKIFEHAVELLSRYREYDLESIFIRQMDLTSISRELFGEWDTLGGMIQTFYADERGDPLQEKTRKPVNKKLSLKYHRLSDVIGAIQLSGSEVKFEKYISNVSECHSRILDCREKACLSPEVILSDSETSHVPIKNLLDSIQKFMHMFSPFNIKDEAKGDGSFYSDFNEIFDALFRVVPLYDKTRNYFTKKNLSTKKIKLNFGNPTLASGWDLNKEFDNTAIIFTRGEKYYLGVMNPKDKIKTWTYDGDLAPYKKMVYKLLPGPNKMLPKVFFSKKNIDYYAPSTEILDGYEKGIHKKGDDFDLKFCHKLIDFFKDSIEKHPDWKEFNFKFSPTNSYEDISGFYREVEEQGYKITFVDVSPSLIDEYIGCGKLFLFQLYTKDFSERSTGTPNMHTMYWKSAFSEENLKDIVIKLNGEAELFYRKKSDIRKIVVHKKGDVLIGRTTLDNEPIPEETYQEILSYEKGLTKTLSENARSYESRIRRSIANYDIIKDRRYTEDRMYFHVPLTFNFKSKREDNINRKAIDYAMTQKDLHIIGIDRGERNLVYVAIINSKGEIVKQKSFNTIEKFNYQEKLNQREKERDQARKNWNSIEKIADLKEGYLSGVVHEICKLIIEYNAIVVMEDLNFGFKRGRFKVEKQVYQKFENMLIDKLNYLVFKNASPKDLGGTLNAYQLTNVLESFSKLGKQSGILFYVPAAYTSKIDSDTGFINAFNLSGITNDENKVKFIQKMDSIVYDSRTDSFAFSFDYSNFLVSQAMYINKWTVHTVREWAIFNQKERKQILIEPTQKMKNILKQHNIEYAGGEDILHDIMAHKKGDSKLIQEVYSSFINSIRMRYTYEGVDKIISPVLNHEGRFFETGSTKNSPEDADANGAFNIARKGALMLELIKKDYDPNAKKIDIPKMEHVKWLEYVKQIRYER

SEQ ID NO: 652 - protein, 1246 aa, unidentified
  REGION 1..1246: note = Cas Enzyme sequence
MNKKHLSDFTNLFPVSKTLRFRLEPQGKTMENIVKAQTIETDEERSHDYEKTKEYIDDYHRQFIDDTLDKFAFKVESTGNNDSLQDYLDAYLSANDNRTKQTEEIQTNLRKAIVSAFKMQPQFNLLFKKEMVKHLLPQFVDTDDKKRIVAKFNDFTTYFTGFFTNRENMYSDEAKSTSIAYRIVNQNLIKFVENMLTFKSHILPILPQEQLATLYDDFKEYLNVASIAEMFELDHFSIVLTQRQIEVYNSVIGGRKDENNKQIKPGLNQYINQHNQAVKDKSARLPLLKPLFNQILSEKAGVSFLPKQFKSASEVVKSLNEAYAELSPVLAAIQDVVTNITDYDCNGIFIKNDLGLTDIAQRFYGNYDAVKRGLRNQYELETPMHNGQKAEKYEEQVAKHLKSIESVSLAQINQVVTDGGDICDYFKAFGATDDGDIQRENLLASINNAHTAISPVLNKENANDNELRKNTMLIKDLLDAIKRLQWFAKPLLGAGDETNKDQVFYGKFEPLYNQLDETISPLYDKVRSYLTKKPYSLDKFKINFEKSNLLGGWDPGADRKYQYNAVILRKDNDFYLGIMRDEATSKRKCIQVLDCNDEGLDENFEKVEYKQIKPSQNMPRCAFAKKECEENADIMELKRKKNAKSYNTNKDDKNALIRHYQRYLDRTYPEFGFVYKDADEYDTVKAFTDSMDSQDYKLSFLQVSETGLNKLVDEGDLYLFKITNKDFSSYAKGRPNLHTIYWRMLFDPKNLANVVYKLEGKAEVFFRRKSLASTTTHKAKQAIKNKSRYNEAVKPQSTFDYDIIKDRRFTADKFEFHVPIKMNFKAAGWNSTRLTNEVREFIKSQGVRHIIGIDRGERHLLYLTMIDMDGNIVKQCSLNAPAQDNARASEVDYHQLLDSKEADRLAARRNWGTIENIKELKQGYLSQVVHLLATMMVDNDAILVLENLNAGFMRGRQKVEKSVYQKFEKMLIDKLNYIVDKGQSPDKPTGALHAVQLTGLYSDFNKSNMKRANVRQCGFVFYIPAWNTSKIDPVTGFVNLFDTHLSSMGEIKAFFSKFDSIRYNQDKGWFEFKFDYSRFTTRAEGCRTQWTVCTYGERIWTHRSKNQNNQFVNDTVNVTQQMLQLLQDCGIDPNGNLKEAIANIDSKKSLETLLHLFKLTVQMRNSVTGSEVDYMISPVADERGHFFDSRESDEHLPANADANGAFNIARKGLMVVRQIMATDDVSKIKFAVSNKDWLRFAQHIDD

SEQ ID NO: 653 - protein, 1246 aa, unidentified
  REGION 1..1246: note = Cas Enzyme sequence
MNNSIYDNYTNKYSLSKTLRFELIPQGRTQEFIERNGILDEDKERAEDYKRVKKILDEYYKDFFDKALRRLQLKNLDIYYSLYVKKEKTEKEQKEFEKIEADLRKQVVKALKDDDKFDVLFKKEIITQELTDFVQDEDDKTSIENFQNFTTYFQGFFENRKNMFSEEAKSTAVSYRIVNQNLPKYIDNIRIFDIIMSTELCEKIFVLQKELEDKLQGMRIEEFFNVVNYTHVIANSDIEIYNMLLGGRTLEDGTKIQGINEYVNLFNQKNSKDKSIRKIPKLKPLFKQILADREGMSFVEAQFENDKQVLDAIKEVVEGINENVISISADTSVAKLFKNIRNYDLDKIYITNGLAITDLSNAVYGDWSVIKTAFEKEYDEENPKKAKTKTEKFFEDRAKYFKAKKSYSLGEINNVIAKYSTHSGGVETYFESLAEKDGSNLIDIFNLAFEKAQMLLNMDYASKHGLASDKKNVAILKQLLDSIKNIEGFIKPLCGSGTEADKDDAFYGELDSIYKILSNITPLYNKVRNYVTRKPYSQEKVKLNFQNPTLLNGWDKNKERDNLAVILRKDGLYYLGIMNKKDNTSFLGDIPVSESDFYEKMEYKLLPGPNKMLPKVFFGKSNLEYFNPSEEIMEIYNSGAHKKGDNFNLEACHKLIDFFKESINAHEDWSKFGFEFSNTEEYIDISQFYREVERQGYSMNFTKIDSSYIDELVDNGKLYLFQIYNKDFSQYSKGTPNLHTIYWKMLFDEKNLEKVIYKLNGDAEVFFRKASITEENKVVHPKGQPIAKKNFKAKEQKENSLFKYDLIKDKRYTIDKYQFHVPITMNFCAESRSYINDEVIKTIRENKDINVIGIDRGERNLLYISVVNSEGRIIHQQSLNIIENDKGYSQDYHVLLDKKEHEMDSARKNWTEIESIKELKEGYLSQAIHLITELMVKYQAIVVLEDLNFGFMNGRKKVGKQVYQKFEKMLIDKLNYLVNKKAKYEDNGGALHAYQLTNAFESFAKLGKQSGFLFYIPAWNTSKIDPMTGFVNLLYPKYSSEAEAKKFIKKFDRIRYNVQEGYFEFDFKYSNFTDKAVGSKDSWTICSYGERVVNFRNPAKNSEWDSIEIDITKQLEMHLKSVGINLESKDLIESICNVSNPQFFKNLIEDIKLVLQIRNSISNTKVDYMLSPVKDVNGKFFDTRKYQEDKEGLNYFPKDADANGAYNIARKGLLLMEKIRTGQDEKMKLAITNKEWMDYAQRHTLQ

SEQ ID NO: 654 - protein, 1246 aa, unidentified
  REGION 1..1246: note = Cas Enzyme sequence
MIEQFVNRYPLSKTLRFGLIPQGNTEENFKIMQILEKDEALARNYGKAKEIIDRYHKFFINSCLADFHLTDLEKYALLYYEPNKTEEEVAAMDETAKTMRQAISGLFCKENKAIYDRLSKKDLIENFAMSVIETDEERTVLESFRKCTVYFTGFNQNRLNMYTGEGKSTEIAHRLINQNLPKFLDNARVAKTILAALPKNDLDQIDVDFYDIFGINTQNIFEIPFYNQTLTQAGIDRYNQIIGGYTCSDGRKIKGYNEYINHFIQETKQKLPKFKPLYKQILSDRETISFIPKAFQSDSEVLSALRNFYIKKNVETDKSIRDVITELKKLFQEMDSFDEKGIYITNGVAITDLSQAVCDNWFVIKKAMQAEYDAEHSSKNRNEDYEKKRGNDLKKVKSYSLSALQRYMDAEMEDKKSLAEYIKTHTTQLCDLTASAYERVRHLLETEYSPTKKLTADADAIGRIKDFLDPIMEVFHFAKIFLGSGEEAEKDDVFYGIFSPLYDQLADIIEIYDKVRNYVTQKPYKTDKIRLIFERGDFLSGWAQPTESQAKEAHLMEKDGRYYLFITVTAINKADWERALYGKDNFQCACHIEYYKQKPDNKNTPRLFIRSKGDHYAPAVEKYNLPIQEVIDLYDKGYYKAEFKKKDQKLYYTSLRKLIDYFKLGFTKHENYKDFAFAWKESDAYENITEFYQDTMNACYRLERVTVNWNGIMDLVEKGRGFLFQIYNKDFSDHTKGTPNLHTMYFKMLFDERNLENGCYRLLGGAEMFYRKASLKLSETTIHPKGVAIKNKNPRSDRAERVLDYDIIKDKRYTETQFSLHFPIMMNCLAQGNPKLNLDIRKALLKSEHQYIIGIDRGERNLLYVCVINEKGEIVEQMSLNEIIGDNGYTVDYHELLDRKEKERDAARKSWGTIENIKELKEGYMSQVIHKICELVLKYDAVIAMEDLNGGFMNSRIKIEKQVYQKFEKMLTEKLSYLVDKKADPMSDGGLLRAYQLTNKPDPNKSVQHGMQDGIVFYIPAWCTSKIDPTTGFVDLLKPKYTNKEEAKDFFKRFQKICFNEVENMFEFHFHYPDFQRGITAGNTDWTVYTNGSRIRTFRNPEKNNQWDNTDIVLTDAFKALFAEYAIPCDADMKEAILAQDSPKFFKELCGLLSFTLQMRNSITGRTDVDYIISPVKNAAGRFYDSRKAASDLPCDADANGAYNIARKVLLFIRRLQAQEESNLMNKDLEKITNAQWLSFVQNGHE

SEQ ID NO: 655 - protein, 1246 aa, unidentified
  REGION 1..1246: note = Cas Enzyme sequence
MEQFTNLFNVQKTICFELQPIGKTKENIEINGILTQDEKRAKDYQTVKGFIDEYHKQFIKDRLWNFKLPLVSKGNLDSLEEYQTLYELPKRNDAQEADFSELKDNLRSIIAKRLTESGSAFDRIFKKELIREDLVEFLSNEEDKDLVRQFADFTTYFSGFHENRKNMYSAEEKSTAIAYRLIHQNLPKFMDNMKAFAKIANTSVAEYFADIYAGWKEYLNVNSVEELFSLDYFSETLTQPHIEVYNYIIGKKVLEDGTEIKGINEFVNLYNQQQKDKSKRLPFLVPLYKQILSDREKLSWMAEEFDSDEKMLAAINELYTHLHELLMGEENESLRSLLLNMKDYDLSQINITNDLSLTDISQHLFNRYDVYTNGVKEQLKGITPRKKKESDEDFEDRISKIFKTQKSFSISQLNSLPHPEIDGNKPRSIEEYFMAMGAVNTETTQRESFFSKIETAYEDARAILQMKDTDDSLSQNKPAVSKIKALLDAFKDLQHFIKPLLGSGEEVEKDELFYGSFQLIWDELDSVTPLYNKVRNWLTRKPYSTEKIKLNFDNSQLLGGWDVNKEPDCTGVLLRKDGYYYLGIMDKKFNRVFEENVIHTDGDCYEKMVYKQLGQISQQLPRIAFSKTWQQKLSIPEEIISIKKSESFKKNCGDLQKLISYYKSFISQHEEWNSYFDINFTDRCDYKNLPDFYSEVDSQFYALSFSKVSSSYINVLVDEGKLYLFRIWNKDFSEYSKGTPNLHTLYWKMLFDERNLSDVVYKLNGQAEVFYRKASIKPDNRVVHKANESITNKNALNKKTTSTFKYDIIKDRRYTVDKFQFHVPITINFKASGQTNINPIVQETIRQGGFKHIIGLDRGERHLLYLSLIDLKGKIVKQMTLNEIVNEYNGKPYKTNYHDLLAKREGERTDARRSWDTIETIKELKEGYLSQVVHIISNMMVKYNAIVVLEDLNTGFMRGRQKIERQVYEKFEKMLIVKLNCYIDKKADVMETTGLLHPLQLTCEAKKWKRSHQCGCLFYIPAWNTSKIDPVTGFVNLLDTRYETCEKAHLFFSKFQRISFNQKKGWFEFAFDYNDFTTKAEGTRTQWTLCTYGERIRTFRNPQKNNQWDNERIVLTDEFKKIFDEKGIDIYGNLKDAICNQRDAKFFKDLLGLMKLLLQMRNSITNSEEDYILSPVADEKGHFFDSREGKCNLPIDADANGAYNIARKGLWVICKIKKSLKGEKPTLSITNKEWLKFAQDKPYLND

SEQ ID NO: 656 - protein, 1246 aa, unidentified
  REGION 1..1246: note = Cas Enzyme sequence
MKDLKQFIGIYPVSKTLRFELKPIGKTQEWIEKNHVLENDGERAENYPRVKELIDAYHKKCINESLKNVHLNWIPLRDAIDNYRHNKTIEAKKALVEEQNKVRNEICKKLSEFVHYKELVKADTPSKLINDILPHEESLKAFDRFAVYFEGFQENRRNIYSNKAISTSVAYRLVHDNFPKFLANIEVFENIKVICPEVIQLVSSEMESFLNGIKIEDVFAVEYYNSVLTQNGIDLFNQILGGVAKDEKKYQGINELTNQFIQLHPDIGAGKKSLTMTPLFKQILSDRETLSDIVKPIESEEQLVEMVCNFYRHITNFTMNGENVNVITELTRMVLSLDKYNQDRIFVSAKALNDVSLSMYGKWNSLHEKLYEKDVRSLGGIQTSKNRKKVDAYMNKEAFSLTELSFGDDVLVRRYFVNLVDSMDTINNLWKQFEDWCNTASKPQFLHNDTGTELLKNLLDAIMMVLHKCSALVVSLENNMDGEFYNKFLPLYAELEKVILVHTRTRNYLTKKISATGKIKLKFDTPSLGAGWGINKESKNKTILLFKGGLSYLGIMNVKGTLDFNCQVKDGEPAYQKMVMINHSKPYLDLPNSFFRQSGINKFHPSERILKIYKAFKENSKSIDVKEVRELIDYYKDAITRNEEWNAIDYIFSPTESYENINDFYTEVAEQSYKLSLVDVPEKQIDEWVENGKLYLFQLYNKDYAPGTHGRKNLHTLYWESIFTEENLNNCYIKLGGKTELFYRPQCIKTPVIHEVGSKMLNRRDKNGMPIPDSIYRNLYHYFNGKKDETELTQEEMDYINKVIVKDVTHEIIKDRRYTKQYFYQFHIPIVFNANAKGNVKLNERVIEYIQSNPDVNIIGIDRGERHLIYLTLINQRGEILKQKSFNIVGNYNYQAKLVQREKERDEARKSWQSIGKITDLKEGFLSAVVHEIAQMIVKYNAIVVLEDLNRGFKRGRFKVERQVYQKFEKMLIDKLNYLSFKDSDSDKEGGVLRGYQLTEKIDNYTSIGRQTGFLFYIPAAYTSKIDPVTGFVNNFNFNDITNTEKRRDFLLKMKRIEMKSGNVEFEFDYRNFKTHQTDFQNVWTVNTSGKRIVYDTEKKDAKDVYPTQEIIKAFAGKGIDLAEGMNVKAFLSGIEADAKNAPFFYAIFNAFKTTLQMRNSNSATGEDYILSPVIDIHNGKQFCTNDVKKEKDNDGDWVANLPIDADANGAYHIALKGLYILMNPQIKKIENEKWFKFMVEKPYLK

SEQ ID NO: 657 - protein, 1247 aa, unidentified
  REGION 1..1247: note = Cas Enzyme sequence
MSLEKFTNLYSLSKTLRFELIPKGKTLENIEKNGIITQDECRAEEYEKVKKIIDEYHKHFIEDVLKNFSFTETLLREYENLAKNASKDEEQKKDFENVQKKLRTEIAKKFDIKRLFGKELIQKDLGIFLEKTDLSEFYNRENLNKHECLEMVKHFEKWTTYFVGFYENRKNMYSDEEKSTAIAYRLINDNLPKFIGNISVFEKNKDKLRDNFKALRNDLGLLEDLDYYFNLDNYGKFLPQGGIDLFNMVIGGKTTDDGVKFQGLNEYINLYNQKQTNKKDKLPKFTPLFKMILSDRTKMSWLPEQFENDNDVLDAVNNFYMSIAKERQENGQTIFEQLKNLLIEISQGSFDLNKIYLRNDTGLTNISQKFLGHWGEIQKAVEAKYEEAHPKGKNKSQEKYDDEKEKYFKRFDSISLKFINECTGKNIESYFAEFNEEKDEHGNILNKALFEIISDSYKTIENLLNTEYPTNKNLSQDKSNIEKIKEFLDGIMALLHFVKPLCGKGNETDKDEKFYGEFLGLFEKLKETAKLYDKVRNYMTKKPYSTEKIKLNFENSTLCNGWDVNKENDNTAILLRKDGLFYLAIMNYKQKTKFNDAEIAKAGESFYEKVDYKLLPGPNKMLPKVFFSEKGKEEFNPNREILEDYENGCHKKGVTFDKHKMHKLIDFFKSSIARHKDWKTFGFKFSNTSDYESIDKFYNEVLEQGYKITFRNISEKYINQLVEENKIYLFQIYNKDFSEHSKGTPNMHTLYWRELFSGENLKNVVYKLNGEAEVFYRKSSIKLENNTVHNANVPIKNKNVHNKKNESTFEYDIVKDKRYTLDKFQFHCPITLNFKALGKEYINEDVNKFIQQNGIKHIIGIDRGERHLLYVSVTDLDGNIKEQFSLNEIVNEYNGNEYKTNYHKLLDNKEDNRTKQRKEWQTIESIKELKEGYLSQVVHKISELIVKYNAIVVLEDLNFGFVRGRQKVEKSVYQQFEKKLIDKLNYLVFKKRDKNDIGGVLNALQLTSKFKSFKDMGKQCGFLFYVAAWNTSKIDPITGFINAFDCRYENVDNAQKFFGKFCDISFNNEKNYFEFVVDDYTKFSSKVAETRQNWIICTNGERIRSFRNQNKNNLWDNEPIVLTNEFKKLFEKYKIDFNSDLKTKIIAQTEKSFFDGLLYLFKLTVQMRNSITDTDTDYMISPVVNENGEFFDSRKNILNLPQNADANGAYNIARKGLILINRIKDAEDLRKINLAITNKEYMLFVQK

SEQ ID NO: 658 - protein, 1247 aa, unidentified
  REGION 1..1247: note = Cas Enzyme sequence
MLNYEDYTKRKQVTKAIRFELIPTETTQKNLEEHEILKQDQALYAALDRIKPIVDSFIKDITNKALKELTYDFNVLKDAKEEGRKAYDKAEKELFKAIDKSVSESLPKELSVSKINSAKFLQDSLTEYVLNTNDKSIKKDEAIKDIETTKGCLALFSKFLTTRITALTVWMPQRVVENFNIYCSNIEKIKNVLENAEFDSTDFQDELIKMVNVSYYEQVLTQTDIDGYNSIIQGNSNEEGIVFKGLNQRINEFNTRIRNEKRDVRALRKLDMLNKQILTPQEKKFKIETITSDDEVRSVIKTSYSSFSEASKALATLLLEKQMDSDGAGIIIKGNKLHQLSHLLTGNHTKITDAIVQEESNAINKMLEDETLKPSMRRELQKRLEILPSHIIKSNYEMTALDKYLVNEDKSVIAEQKSTFSAYISEYNNAVKTVHTYYSILEGGDVFKSRKIKGNRHMQEMIADFFAELTAVRDILFLINLPNDEDGDFAFYDTFDELYDAIRNTYKAENLVRNYLTKSVKDTAEEKQTCLGSPARLRAMWWNGEKKFSKDLATIIKHEDKYYYFVLSEDAKPITVAEVEDSKTSFLTFKKGQKSFMMLPKILFKDHATPFFENNKTAEEYVLDDECVSKSIAIDRKIYDIYKDGLFKREAVTGGLITEDEYKKNIAMLIDTYKLFANAYVQYSKFDMTQLNDTDSYADIGEFFSDVDIYTSKLSWTSIDFKQIENLVEHGQGYLFLISNRFLYAGKADKNPYSKVFLSILSDENMKKSTILLNSNPSIYYRPRILESKITHKTGSFLVNRLTEDGEPIPKAIYETIYKLKNDFTNIADEDIKEAKEYMNTHKVIAFKSGKDVSYQKRYMQDKYILQLTYTKNNDISDRTIDMLNDRIIEAIEDGYNVVSISRSTNDLVYISVFDKDFNVIEKRSLNKIDGIDYYALLKDAYKDKKEDKKAWIYDTSSGNLKAAYIDCAITEILKVAKKYNAIIVVESLSDRFKDKYSFLDNQVFKTFETRIAERLFDLSFKDVKSGRAGSVNNPLQLANNSGNSYQDGVLFYVNNSFTRGLDIKTGFTNIFATDRIKSIQAKRQFLAKMDNIEIQDNKITFSFDYANYDTRFETKKTKWSTIFNGEAVVYDREKKTNTRVENVITDEIIPAAGIADITGNVAEKIIDKQIPGAFVETLYKWFIYSINGIQKKTAKSDEIYRSPITGEDYAVNEVTTYNLARKLVFRLQYDGSSENFNSEWLNYVQQ

SEQ ID NO: 659 - protein, 1247 aa, unidentified
  REGION 1..1247: note = Cas Enzyme sequence
MNQLQNFINLYPLSKTLRFELIPQGKTLYNIEKCGILEQDQQRATNYILVKEIIDRYHKAFIDEALSALSLDLLEDYYFFYQLSTKDDSQKNKFEEIQTRMRKQIADKFSKHDRFKTIDKKELIKNDLKEFVNTQQEKDLISQFDNFTAYFSGYHNTRMNMYSPEAKSTSIAYRLINQNLPKFIDNMRVFEKICNSPVKDNFTKMLSDDQLGPVVQVISVEDLFSLDFFNTTLTQRGIDVYNQAIGGFTTDQGQRKVQGLNEYINLHNQTVTKDERLPLLRPLYKQILSDRTTASFIPDKFKTDNEVLESITKLYDEIYQDAILPLKDILLHLAHYDLNRVYLKNDTGITNISQKIFGDWGVITKAIVKSFTKQYKGKAKPGTEKWDSELNKYQKGFESFSINFINESLLLLESPEYHFSIEKYFIIGGKCKSGANMFQAVEDKYSIARQLLNNVYPEDKNLSQQQGDVDKIKQLLDSIKDLQWFLKPLLGSGKEPEKDERFYGEFSTLMDLLDQVTPLYDKVRNYMTAKPYSTEKIKLNFDNSLFLSGWARDYDTKAGLLFFKDGKYYLGINNKKLTVDEKNELNSSNSALSGKRIILDFQKPDNKNIPRLFIRSKGDSFAPAVAKYNLPINEVIDIYDSGKFKTEYRKTNEADYKKSLSRLIDYFKEGFSKHESYNHYSFCWKETSQYKDISEFYKDVEVSCYQVLEETINWESLMEFVETGKIYLFQIYNKDFSSYSSGTPNLHTLYWKILFDKENTQDVVYKLNGQAEMFFRKASIQHKNRILHKANRPVDNKNELNPKRQNVFQYDLIKDKRYTVDKFQFHVPITMNFKATGINNINPLVNEFIRDNNDVHIIGINRAENHLLYIVVIDSKGHIVKQFSLNEIINEYNGNKYHTNYSQLLNKREAERNEARLNWSTIEGIKTLKEGYLSQVIHQICQLIVQYNGIVVLEDLNMEFKQGRQKVEKSVYQQFEKKLIDKLNYLVDKKKSLSEVGGTLKALQLTNKFESFQKMGRQSGFLFYVPAWFTSNIDPATGFVNMIDTRYQNIEKSKELFSRFADIRYNAEKEYFEFEIKDYTQFNPKSEGTRQNWIICTFGTRIEKFRNPDKNNQWDSREIDVTECFKALFEQYNVNFNENLKEQIVNINDKAFFEQMLDFLYLTLQMRNSEIGNAGSDYIISPVCDPNGRFFDSRTAGHQYPENASANGAYNIARKGLYYVNQIKQADDIRALRLGLTNNEWLKFVQD

SEQ ID NO: 660 - protein, 1247 aa, unidentified
  REGION 1..1247: note = Cas Enzyme sequence
MKEFTNLYPVSKTLRFELQPIGKTKENIEKNGILQRDEKRAEDYKIVKGFIDEYHKQFIKDRLWSFKLPLNCEGHLNSLEEYQALYELPKRNDAQEAEFTEIKDNLRSIIAKRLTESGSAYERIFKKELIREDLIDFLENNEDKDIVRQFADFTTYFSGFHENRRNMYVAEEKSTAIAYRLIHQNLPKFMDNMKAFAKIADTPVAEHFADIYDGWKEYLNVGSIDEIFRLDYFTETLTQPHIEVYNYIIGKKILEDGTEIKGINEYVNLYNQQQKDKSKRLPFLVPLYKQILSDREKLSWLGEEFDSDEKMLAAINESYIHLHDLLMGDENESLRALLLHIKDFDLAKINITNDLSLTDISQHLFGRYDVFTNGIKDKLRDITPRKKKDSDEDFEDRISKIFKTQKSFSIDFLDKLPQPVMDDGKPRSIEDYFMTLGAVNTETTQKVNLFAQIENAYEDARTILQLTDTGDTLSQNKSAVAKIKALLDALKDLQHFIKPLLGSGEENEKDELFYGSFQMMWDELDTVTPLYNKVRNWLTRKPFSTEKIKLNFDNSQLLGGWDVNKEPDCTGVILRKEGFYYLGIMDKKSNHIFEADITPSVGECYDKIDYKLLPGANKMLPKVFFSKSRIDEFAPSEAIISSYKRGTHKKGADFNLAECHRLIDFFKQSINKHEDWSKFNFHFSDTKSYEDISGFYREVEQQGYMLSSHPVSSSYINQLVDEGKLYLFRIWSKDFSEFSKGTPNLHTLYWKMLFDERNLADVVYKLNGQAEVFYRKASIKPENRIIHKANHSIANKNELNSKRTSTFEYDIIKDRRYTVDKFQFHVPITINFKAAGQTNINPIVQDVIRQGGFSHIIGIDRGERHLLYLSLIDQKGNIIKQMTLNEIINEYKGQTYKTNYHDLLAKREGDRTDARRSWETIETIKELKEGYLSQVVHIISKMMVEYNAIVVLEDLNTGFMRGRQKIERQVYEKFEKMLIEKLNCYIDKHAAPSENTGLLHPLQLTCDAQKWKRSHQCGCLFYIPAWNTSKIDPVTGFTNLLDTRYDTREKARVFFSKFQRISYNAEKGWFEFALDYNDFTAKAEGTRTQWTLCTYGERIRTFRNPKKNHQWDDERIVLTDAFKQLFDTYAIDINGNLKETISAQTDAQFFKELLGLMKLLLQMRNSITNSEEDFLLSPVADDAGHFFDSREGNSSLPIDADANGAYNIARKGLWVIRKIQETANEEKPSMSITNKEWLQFAQTKPYL

SEQ ID NO: 661 - protein, 1248 aa, unidentified
  REGION 1..1248: note = Cas Enzyme sequence
MKDFNQFTNLYSLSKTLKFELKPIGKTLDYITEKSLLNEDEQRAESYKRVKKIIDEYHKKFIDSCLRGVKIGNLQEFESLYFSSNKDEKELTSLQKKMRKEIADRFTKTDAYKRLFGKELIKEDLAQIVQDESILKDIEDFKNFTTYFTGFHENRKNMYSADEKATAIAYRLIHENLPRFLSNKRIFEKITKEHPQIIEQAKKSVEPHLFGISIADMFNPEYFNQTLRQEDIDIYNLMLGGKSDSNTKIQGLNESINLYRQRKGLTKRDIPNLTVLYKQILSDRESFSSVLEKFEKPQDLLEAVKEFYINRLTKWADGDNVYNVLEQLKFIVSDDGQYDTSKIFIKNDTSLTDISQQLFGSWSVISNALKQDYYLSNSKLKPSDENDAKFEKIKFYSIQKIEDVLKRYCAEMDDLKEKYTENIILKYFASFRRKDDTLTLIQKAENYYVEAADLLNAEYPPNKSLISDDDAIEKIKNLLDAVMDIIHFVKPLRAKGYEGEKDEAFYAEFLKFADQLDKLIPLYNKVRNYLTQKPYSVEKFKLNFENSTLLDGWDQNKESANTSVLFAKNGLFFLGVMDKKHNKLFEKTPPHKTEDCFEKINYKLLPGASKMLPKVFFSAKNITYFAPDENVIRIRNHGTHTKNGEPQKGFEKKDFSISDCRIMIDFFKSSIEKHPEWKNFKFKFNQTSSYNSIDEFYRQVENQGYNISYQKIDKEYIDELVSQGKLYLFQIYNKDFSEHSKGKPNLHTLYWKALFSPDNLKDVIYKLNGQAEIFFRKKSLQYSDETLKRGHHADKLKDKFAYPIISNKRFAFDKFQFHVPITMNFKASGRDNINQEVIEFLKSVPENEIHFIGLDRGERHLLYLSMINSKGEILKQFTLNDIVNEYNNQKYTTDYHKLLAEKEKNRAESRTQWKTIETIKELKEGYISQVVHIVAKMMVENRAILLLEDLNFGFKRGRFKVEKQVYQKFEKMLIDKLNYYVDKSKSPTEPGGVLNALQLASKFTSFKDLGKQSGFIFYVPAWNTSKIDPVTGFVNLFNTKYENVANSQKFFEKFQDIRWNEAQNHIEFHVKNYTDFNPKAEGTRQNWIICSHGTRLENFRNEKQNSRWETREVPLTEEFLKHFHDHNIKPQTGLKEQIVARQDKQFFERLHHLLKLTLQMRNSSKETGEDYLISPVADEKGVFFDSRHFAKQEISEMPKDADANGAYNIARKGLLLLNKIKESKSDSKVDLKQTNKDWLNFVQKSTLK

SEQ ID NO: 662 - protein, 1248 aa, unidentified
  REGION 1..1248: note = Cas Enzyme sequence
METFSGFTNLYPLSKTLRFRLIPVGETLKHFIDSGILEEDQHRAESYVKVKAIIDDYHRAYIENSLSGFELPLESTGKFNSLEEYYLYHNIRNKTEEIQNLSSKVRTNLRKQVVTQLTKNEIFKRIDKKELIQSDLIDFVKNEPDANEKIALISEFRNFTVYFKGFHENRRNMYSDEEKSTSIAFRLIHENLPKFIDNMEVFAKIQNTSISENFDAIQKELCTELVTLCEMFKLGYFNKTLSQKQIDAYNTVIGGKTTSEGKKIKGLNEYINLYNQQHKQEKLPKMKLLFKQILSDRESASWLPEKFENDSQVVGAMVNFWNTIHDTVLAEGGLKTIIASLGSYGLEGIFLKNDLQLTDISQKATGSWSKISSEIKQKIEVMNPQKKKESYESYQERIDKLFKSYKSFSLAFINECLRGEYKIEDYFLKLGAVNSSSLQKENHFSHILNTYTDVKEVIGFYSESTDTKLIRDNGSIQKIKLFLDAVKDLQAYVKPLLGNGDETGKDERFYGDLIEYWSLLDLITPLYNMVRNYVTQKPYSVDKIKLNFRNPTLLDGWDLNRETANTSVILRRDGKYYLAIMNNKSRKVFLKYPLGTGKDCYEKMEYKLIPGAYKMLPKAFFAKSKINKFMPDEHLLSNYKKGTHKKNNANFDLDDCHTLIDFFKKSLNKHEDWKNFDFKFSDTSTYTDINNFYKEIDNQAYKLSFRPVPSDFVDKLVEEGKIFLFWIYNKDFSGHSKGTPNMHTLYWRMLFDERNLEDVVYSLNGGAEVFFRKASINVSHPTHPANIPIKKKNLKHKDEERILKYDLIKDKRYTVDQFQFHVPITMNFKADGNGNINQKAIDYLCSASDTHIIGIDRGERNLLYLVVIDGNGKICEQFSLNEIEVEYNGENYSTNYHDLLNVKENERKQARQSWQSIANIKDLKEGYLSQVIHKISELMVKYNAIVVLEDLNAGFMRGRQKVEKQVYQKFEKKLIEKLNYLVFKKQSSDLPGGLMHAYQLANKFESFNTLGKQSGFLFYIPAWNTSKMDPVTGFVNLFDVKYESVDKAKSFFSKFDSMRYNVERDMFEWKFNYGEFTKKAEGTKTDWTVCSYGNRIITFRNPDKNSQWDNKEINLTENIKLLFERFGIDLSSNLKDEIMQRTEKEFFIELISLFKLVLQMRNSWTGTDIDYLVSPVCNENGEFFDSRNVDETLPQNADANGAYNIARKGMILLDKIKKSNGEKKLALSITNREWLSFAQGCCKKWMIT

SEQ ID NO: 663 - protein, 1248 aa, unidentified
  REGION 1..1248: note = Cas Enzyme sequence
MNKFEDFTGLYPLSKTLRFELKPIGRTLEHIETDGLLEQDQHRAESYKKVKKIIDRYHKDYIENALGDFELQLQDKGRKNSLEEYYALYQCKRTEEEEKNAFTKVQKNLRKQISDRLTDLDVYKRIFKKELIKEDLLEYVTDTAEKELVEEFRDFTTYFSGFHENRKNMYSDEDKSTAISYRIIHENLPKFIDNGFSISKIIAIPEMQNHMKELYKDFEAYLNVESLTDLFRLDNFSMVITQTQIEVYNTIIGGKSEDKVKIKGLNEYINLYNQTHKENKLPKLKVLFKQILSDREAISWLPDEFKSDQETLDAIQKCYSDLNNESGVLGERNLKTILESLAQYDLNGINIRNDLQLTDISQKVFGSWSVIQNAVLEDLKNRCTRKRKEDEEEYEQRLLKLYKAQGSFSIGYLDECLVKAGQGKKVEDYFATLGAVNTETEQRENLFARIENAYTMVADLLSKPYPNNKNLAQDKSNVTLVKDFLDSLKALQRFIKPLLGHGDENEKDERFYGEFTALWSELDKVTSLYNMARNYMTRKPYSVEKIKLNFENSTLMDGWDLNKEHDNTTIILRKDGLYYLAIMNKKANKILDVDKAEKNGDCYERMVYKLLPGANKMLPKVFFAKSRIEEFAPSQKILNIRKQETFKKGPKFSIDDCHALIDFFKSSIAKHEDWRKFGFKFSDTSIYEDLSGFYREVESQGYNISFTNVSVSYINKMVDEGKLYLFQIYNKDFSPFSKGTPNMHTLYWKMLFDETNLKDVVYKLNGQAEAFFRKKSISYQKPTHPANLPIKNKNQNNPKKESVFEYDLVKNRRYTVDKFQFHVPITMNFKSIGRDHINHQVMEFLQSDKDAHIIGIDRGERHLLYLVVMDRFGNIKEQFSLNEIVNQYKGVTYHTNYRDLLEKKESQREGSRKSWQTIENIKELKEGYLSQVIHKITELMLKYHAIVVLEDLNMGFMRGRQKVEKQVYQKFEKMLIDKLNYLVDKHADPKKEGGLLHAYQLTNKFDGFQKLGKQSGFLFYIPAWNTSKIDPSTGFVNLLDTRYESIEKTKAFFSKFDIIRYNDKTDQFEFTFNYNNFTTKAEGTRTKWTLCTQGERIKTFRNPQKNSQWDNEKVELSKEFKKFFADYQIDINGNIKESISSQTEKPFFEKMLYLLKLTLQMRNSITDTDVDYLISPVADEKGIFYDSRTCSDSLPKNADANGAYNIARKGLMLVRQIREAATLDKFKFAPISNKDWLKFAQEKPYLND

SEQ ID NO: 664 - protein, 1248 aa, unidentified
  REGION 1..1248: note = Cas Enzyme sequence
MSLTQFTNLYPIQKTLRFELKPIGKTEEHIQKNRLLENDQKRADDYDVVKDLIDSYHKWFIEETLQAVSLDWSALQAAIANQRTEKSPASKKALEAEQALMRKKINKAFESHAKFKLLFSEKLFKEILPAHLNVLEATDEQRKAVDTFKRFSGYFLGFHENRKNIYSADDISTGIPHRIVQDNFPKFLNNAQIYAALPPEIKDAINAALQEDLNGRALDEVFSIGFYNTVLTQKGIDFYNLIIGGRSPEPGQRKIQGINEIIHQYRQQYPDVKIPKMVELFKQILSDRESQSFIPKMYENDKEVQESIVHFHDTELRGFTQEDREVDVLTGLANLAKGIAGFDLAHIHVTAASLPELSKTLLEEWNTLQRYIETYANERFKTKKDKEKFLKSETFSLDELNAVLEHNEQAKRIQSFWNEAADERLKAIDETHAKAEAILRKEYTAENKMRENPDDIALIKEFLDAVMDFMRWLKPFCIQSEVSKDDSFYGEFEPLYKQLALVVPLFNRVRNYATQKLAETAKIKLNFENPTLANGWDKNKEKDNTSILLMKDGKYFLGVFNVDNKPGVDGACVQTVTEACYTKMIYKLLPGPNKMLPKVFFSKTGREAFDPPQYILDGYEAEKHKKGDAFDKTFCHNLIDYFKDAIQQHPDWKQFDFQFSDTASYEDISGFYREVQQQGYKLTFTNIPERIISQWVDEGKLYLFQLSSKDFAAGTTGKQNLHTLYWTQLFSPENLKDVVVKLNGEAELFYRRKSIEKPFIHRVNEKMVNRRDRDGNLIPEKIFGELFRYFNAPDQVTLGEEATKWKDKTVVKPVKHEITKDRRYTEDKFLFHVPLTLNFKADGARLNEQVRGFLINNPEVNIIGIDRGERNLIYVTIINQKGEIIFTRSFNEVNGFDYHEKLAQREHERDAARKSWQSIGKIAELKEGYLSQVVHEITKLMIQHNAIIVLEDLNFGFKRGRFKVERQVYQKFEHALIDKLNYLVFKERKASEPGGVLKGYQFTEPLAAFKDVGKQTGMLFYVPAAYTSKIDPVTGFANLLNLNYDNERKSKELFSTTFDFIRYNSKEDFFEFGVNYEKAKTHVTDYTSEWTVCTTNEPRYAYNPQTKKTETVMVTERLKAVFAENKIAFEDGRDLKKDIVERGSVGLYKTLIWLLKLVMQMRNSNAETGEDYILSPVRNKAGVFYDSRKADDTLPKDADANGAYHIALKGLYLLQEVFNKTQSEKDKVDLKITHPDWLAFAQKRHEVK

SEQ ID NO: 665 - protein, 1248 aa, unidentified
  REGION 1..1248: note = Cas Enzyme sequence
MVKIGKDFIGQYSLSKTLRFELIPMGKTLENIKKSGLLQEDQHRAESYVEVKKIIDRYHKAYIEKTLAKFTLPLKSHKHQNSLTEYLELYNVQTKDDTQKKAFKDIQGHLRQQIADCLTGTEEYKRLDKKELIREDLLQFVKTREDYDLVKEFENFTTYFTGFYDNRKNMYSAEEKATAISYRLINENLPKFIDNMHAFQKITTTSIKTSFKQMEKDYADLLEGHKIEEVFELEYFNHTLTQGQIDAYNTIIGGKTLNETTKVKGLNEYINLYNQKEHDKLPKLKRLFKQILSEHDTVSFLPEVFTNDNEVLESIEKYYEELEEKVLSPKNKHSLENLLKDLKEYDLNKIYVRNDLQLTDISQKMFGSWNIFSQALKAEYTSRIPRGKKEKEEKYEEKREKYIKNLDSISLQQLLDSTKLLDKEYHKSVLDYFAALKNTPDNEKDRQNIPKTIKKAYEDIKELLNNAYPDAENLAQNAKQVEQIKALLDAMKDLQRFIKPLLGRGDEAEKDARFYGEFLPLWEVVDNITSLYNKVRNYMTKKPYSTDKIKLNFANSTLLGGWDVNKEHDNTSIILRKKGLYYLAIMNKENKDVFDQDKMDNSKPGYEKMNYKLLPGPNKMLPKVFFSKSRIDYFQPSKEIYDNYQNGTHKKGTNFNLQDCHKLIDFFKASINKHEDWKNFGFKFSPTAQYEDISGFYREVEQQGYKITFCNVAEKYVEKLVEEGKVYLFQIYNKDFSTYSKGTPNMHTFYWKMLFDQRNLTNAVYKLNGEAEVFYRRASIKTKNIIKHTANKALKNKNVANEHSESIFKYDLIKDKRYTVDKFQFHVPITMNFKNNGNQDITGTVREYIKANNITHVIGLDRGERHLLYLSLIDLKGNIVKQYSLNNILNEYNGHTYATDYNTLLTTKEIDRDAARKNWQTIENIKELKEGYVSQVVHKIAELIVEYNAIVVLEDLNFGFKRGRQKVERQVYQKFETMLINKLNYLVDKHKQPNEDGGLLKAFQLTNKFESFQKLGKQSGILFYVPAWNTSKIDPTTGFVNLLDTRYSSIEKAQQFFSKFLSISYNAKKKYFEFSFDYSDFTYKAEGTKTKWTICTLGTRIETFRNVEKNSQWDSREIDLTQVLQKLFAQYDIAINEDLQKNIVKQNDKKFFEQLLHLLHLTLQMRNSITGTDTDYMTSPVANAKGKFYDSRNNNPTLPENADANGAYNIARKGLWVIEQIKQADDLKKVKLAISNKEWLVFAQKFDK

SEQ ID NO: 666 - protein, 1248 aa, unidentified
  REGION 1..1248: note = Cas Enzyme sequence
MSVRIDEKKMVDECTNLYSVSKTLRFELRPQGKTLDYIKRDGILETDEHRAESYQKVKEIIDRYHKKFIEDALTGLTLTGLKEYQALYQRTSRDEKQEKEFEKIQASLRKQITKCFTEHPCYKKMFKKEMISEELISFTQDNPEEQAFIKEFLNYSTYFKGFFENRKNMYSDEPKASAIAYRMIHQNLPKYLDNCKNYALVKELEGDKILTLQENLKEKKQIESIDEFFSLDGFTKVLTQSGIDQYNLILGAYSEEGGVKIQGLNEYINLHNQKCDKGAKKLPKMKQLYKQILSDRESASFVLNKFETDQEVLSAVSCFYEQMDQKVLHNKEEMPIEEVLSKLSEYHLEQIYLSNDGSLETISQYLFGNWSVLKQAIEHDYDQRNFSLKEKKSAEKYAELKDKELKRKKVYAITEINSIAENYLGERVSVERYFAEQIADRTAAIDKAYEGCDCLKEEYSKEMKLSKDSRSIEQLKNLLDKFKELQGLLIPFLQGKEESVKDELFYGEIIRVSDVMNPLNYLYDKVRNYVTRKPYSLQKTKLNFAKSTLLDGWDRNKEKDNLGVILLKDDMYYLGIMNRNWNRVMEEAPKAVTGNVYQKMEYKLLPGPNKMLPKVFFSKSRKEEFSPDEELLERYEKGTHKKGDNFSLDDCHRLIDFFKASINKHNEWREFDFHFSDTESYEDISGFYREVEHQGYKLTFKDIDADYINNLVENGQLYLFQIYNKDFSQYSKGKPNLHTLYWKMVFSPENLANPVYKLNGEAEVFYRKASIADQDIVRHEAGSVLDNKYPKAKKATSKFNYELIKDRRFTVDKFQFHVPITMNFQAEGENYVNRKVRRLIHERKNLHVIGIDRGERNLLYLSVIDMDGNIVEQRSLNTVHPMEQEDDSRDKDYHAILSKREEDNAKARRNWQEINNIKDLKEGYLSQVIHEIAMLMIRYDAIVVLEDLNFGFKRSRQKVERQVYQKFEKMLIDKLNYLVDKNVAPSENGGLLHAYQLTEKFESFAKMNKQSGFLFYVPAWNTSKLDPTTGFVNLFDTQYVNKENVQKFIRKFDSINYNKEYCCFDFSFDYLKFTEKAAGSRTKWCICSEGKRIERFKNLKKPKNNTQWENRKVDLTDCFRVLFEQYQIDWQNGDLVQKLIAVENAEFYRGFMHIFSLMVQIRNSDENSDEIVSPVRNASGICFKSVAEDNSDGKQYPKDADANGAYNIAKKGLWIMKKLQTTPEEKLDKVNLTIPNKEWLAYAQEHTI

SEQ ID NO: 667 - protein, 1248 aa, unidentified
  REGION 1..1248: note = Cas Enzyme sequence
MGAEINSMKMVDQCTNLFSVSKTLRFELKPVGKTQDFVVQDGILNTDVHRAESYQKVKKIMDRYHKLFIERSLAGLTLTGLEKYEAFYFLSSRDDKQEKEFQDIQASLRNQVAKCFTEQPDYKKMFAKEMLTEILPDFTKDNPEERALIEEFRNFSTYFTGFFQNRRNMYSNEPIATGIAYRIVHQNLPKFVENRKNFRLVKELEEDKILSLQENLREKIQIESVDECFELEGFMKVLTQSGIKNYNCIIGGYAEEGEIKVQGLNEYINLHNQRSEKNARKLPKMKELYKQILSDREGVSFVLEKFETDQEVLNAINSFYVELKEKILDNENEVNLEELISRLPEYDLDHVYITNDDSLSKISMYLFDDWGMLNRAIEDDYDRRNILAKKKKSAEKYTEIKEKELGKQTVYSIDSLNMMTETYLGERCFAERYFTEQISDKVENIRKAYDCCECLREEYPEEEKLCKDSESTRQIKVLLDAMKELQWLITPLLKGKEESDKEELFYVELIRINDTLSQLNSLYNKVRNYITKKPYSLEKVKLNFSKSTLLDGWDRNKEKDNLATIFLKDGNYYLGIMNRDSNQVMDTAPKASSNQVYQKMEYKLLPGPNKMLPKVFFSKTHIDEFAPDEELLKHYKEGTHKKGDNFNLEDCHKLIDFFKASIQKHSEWCEFDFHFSDTESYKDISGFYREVEQQGYKITFRDIDESYIDELVENGQLYLFKIYNKDFAEHSKGTPNLHTLYWRMLFSPENLAHPVYKLNGQAEIFYRKASIAKKDIVTHKPQEVLENKYPDAGKKTSTFKYELIKDRRFTVDKFQFHVPITMNFQAEGENYVNHKVRRLIHDAQNLHVIGIDRGERNLLYISVIDMNGNIIEQKSLNVVVSEGRKVEVDYHKILTKREGDNRKAKQNWQTVNSIKELKEGYLSQVVHEIAQMMIRYDAIVVLEDLNFGFKRSRQKVERQVYQKFEKMLIDKLNYLVDKGTNPNENGGLLHAYQLTEKFESFQKLGKQSGFLFYVPAWNTSKIDPATGFVNLFDTKYINKVKTQEFIEKFDVITYNQERKCFDFYFDYSKFTEKAEGSRTKWCICSEGNRAEAYRNPNKNNKTEFKTCDLTERFIQLFEQYQIDWKEKNLVQSLSIVEEAEFYRSFMHLLSLMLKLRNDIDGEDKIISPVRNESGECFETKFPGTGEEQNSKTEKQYPYDADANGAYNIAKKGLWIIEQIKKTPEDKLDKVKLAITNKEWLAYAQEHRI

SEQ ID NO: 668 - protein, 1248 aa, unidentified
  REGION 1..1248: note = Cas Enzyme sequence
MVKIGKDFIGQYSLSKTLRFELIPMGKTLENIKKSGLLQEDQHRAESYVEVKKIIDRYHKAYIEKTLAKFTLPLKSHKHQNSLTEYLELYNVQTKDDTQKKAFKDIQGHLRQQIADCLTGTEEYKRLDKKELIREDLLQFVKTREDYDLVKEFENFTTYFTGFYDNRKNMYSAEEKATAISYRLINENLPKFIDNMHAFQKITTTSIKTSFKQMEKDYADLLEGHKIEEVFELEYFNHTLTQGQIDAYNTIIGGKTLNETTKVKGLNEYINLYNQKEHDKLPKLKRLFKQILSEHDTVSFLPEVFTNDNEVLESIEKYYEELEEKVLSPKNKHSLENLLKDLKEYDLNKIYVRNDLQLTDISQKMFGSWNIFSQALKAEYTSRIPRGKKEKEEKYEEKREKYIKNLDSISLQQLLDSTKLLDKEYHKSVLDYFAALKNTPDNEKDRQNIPKTIKKAYEDIKELLNNAYPDAENLAQNAKQVEQIKALLDAMKDLQRFIKPLLGRGDEAEKDARFYGEFLPLWEVVDNITSLYNKVRNYMTKKPYSTDKIKLNFANSTLLGGWDVNKEHDNTSIILRKKGLYYLAIMNKENKDVFDQDKMDNSKPGYEKMNYKLLPGPNKMLPKVFFSKSRIDYFQPSKEIYDNYQNGTHKKGTNFNLQDCHKLIDFFKASINKHEDWKNFGFKFSPTAQYEDISGFYREVEQQGYKITFCNVAEKYVEKLVEEGKVYLFQIYNKDFSTYSKGTPNMHTFYWKMLFDQRNLTNAVYKLNGEAEVFYRRASIKTKNIIKHTANKALKNKNVANEHSESIFKYDLIKDKRYTVDKFQFHVPITMNFKNNGNQDITGTVREYIKANNITHVIGLDRGERHLLYLSLIDLKGNIVKQYSLNNILNEYNGHTYATDYNALLTTKEIDRDAARKNWQTIENIKELKEGYVSQVVHKIAELIVEYNAIVVLEDLNFGFKRGRQKVERQVYQKFETMLINKLNYLVDKHKQPNEDGGLLKAFQLTNKFESFQKLGKQSGILFYVPAWNTSKIDPTTGFVNLLDTRYSSIEKAQQFFSKFLSISYNAKKKYFEFSFDYSDFTYKAEGTKTKWTICTLGTRIETFRNVEKNSQWDSREIDLTQVLQKLFAQYDIAINEDLQKNIVKQNDKKFFEQLLHLLHLTLQMRNSITGTDTDYMTSPVANAKGKFYDSRNNNPTLPENADANGAYNIARKGLWVIEQIKQADDLKKVKLAISNKEWLVFAQKFDK

SEQ ID NO: 669 - protein, 1248 aa, unidentified
  REGION 1..1248: note = Cas Enzyme sequence
MKQFTNQFSLSKTLRFELRPVGATQQNIDEQGILKQDEELAQSYKIVKKIIDRYHKAFIDDTMSHCSLTKDEAGNELSWLEKVQEYYTKREHTEEEEKAFTDAMDTLRKIVNDSFSKKNRERYARLFSKDLVKEDLFTTSLSDYKISDEEKLTISKFQNFTTYFSGFHENRKNMYSSEAKACTIGYRLIDENLPRFISNLSIFQKVNETAIAEYFADIEHDMEEMLQGTRVEEVFSLPYYNNLLQQKYIDLFNTVIGAVVSEDKHVKGLNQYINEYNQKQTERSARLPKFKPLYKQILSDRVQTSFKIESFDNSQDVLDAIVQFYRNLQNILTNEENNLPKLLENLTDFDLSGIYYSTKNLSNLSQHVFNNWGAIDYAWMEDLRRNNPRKKNETDEKYANRINAISKKTESISLGRIIEDLTAYQKNPKEDIINYFVNAGESKSNGSIFATIEDAYERAKDLLNTDYPKDKNLLADEKSIGLIKDLLDAIKDLQQFVKPLLGNGKEPDKDEKFYGEFSSYWEILNEFTPLYNMVRNYVTRKPYSIEKFKLNFNNSQLLNGWDVNKEQDCSGALLRKDGLYYLAIRRKTCKKGFSESEVNAEGECYEKIDYKLLPGANKMLPKVFFSKKRIDDFAPSEAILAIKEKGSFKKGSGFCKNDLHALIDFYKGAIEKHEDWRKFGFHFSPTSSYEDISGFYREVEDQGYQLKFRKVSKAYIDSLVDAGDIFLFQIYNKDFSTYSKGNPNLHTLYWKMLFDERNLKDVVYKLNGEAEVFFRKASIVTKSPTHPANQAIENKNKSNTKRESIFSYDLIKDKRFHYNKFQFHVPITMNFKASAGEAGMNERVQDYIRQSDDLHIIGIDRGERHLLYLSVIDLKGNIVEQKTLNVIKNSYNGNEYETNYHDLLDSRDAERLNARRDWKTIEGIKELKQGYLSQVVHQITSLMLKYNAIVVLEDLNKGFMRGRQKVESSVYQQFEHSLIDKLCYLASKTADANVEGGLLKAYQLATPYNTKMGHQNGFVFFIPAWNTSKIDPVTGFTNLFDLHIDTMKGIKDFFEKFDAIRWNEDREWFEFDFDYNNFTTKAEGSRTLWTLCSQGKRILTFRNPEKNSEWDNKEIDLTEEMKELFESKNIDITKDVKSQILEQTELKFFTGLRDLFRLLLQMRNSVTNTEVDYLISPVADDKGHFYNSNEVTDNSLPNNADANGAYNIARKGLWLVRQIKQTHPGDKIDFAITNKEWLQFAQDKPYLK

SEQ ID NO: 670 - protein, 1249 aa, unidentified
  REGION 1..1249: note = Cas Enzyme sequence
TEETKRFLEKNEIIKKDAVIDESYHKAKPYFDSLHREFIKESLDPERSLLSFGNFERSWNDFQKDKKSNKKNLLAQKKLLYKDIAKLFDDYVNTWKKQYAPETKNSGTKLLYSADTLSILKKRFPKDSENEKLFIKDEHGNDRYIFDSFDRFTTYLTKFQATRENLYKNDGTSTAVATRIVENLSFFLANKSKFEKFLAYKDILKLTDQEKESSKTEYYMRCMTQPGIEKYNALVGDLNARMKTLRDTAGKDAKKSDYPLLKKLYNQILAEKKIESDKVFDIESNEEVPVRMHEFYEEVERVSTIAKELVTILAQGGFENEYGGIYLHNRAINTIARKWFVSAYEFENCLPQKGKKKEGSVRVAPFVSFAEIKDALGEKLAEDLLKEKLFEEKAYRLVKRTLAYSQFLALFAKDLEILLNEYNEKKNNFSKKDLRIFERGENDENVDALKDALDAGLHIVQFMKYFVLSSKKADDKPTHTSAEFYNHYDELYGDPDQKHDIVRYYDAFRNFLTKKPADQKKIKLNFENGALLTGFDKDKESEKLGIILRKNSIYYLGIINKEHNKIFDDKKHQDAFDVVDATSYEKMEYKLFPDPKRMVPKIAFAKKNRERFGWTQEIQDIKDEYARFQDDRGDRSNWSKQFDKIKLTKLIAYYQHALDRGGYKNTFDFQWNNPVDYSGIGEFNDHLTSQNYKIGFRQVRQRYIDDKVAQGELYLFKIHNKDFGEKSKGTQNTHTLYFLNLFSQHNLTHIKLRLAGNAEVFYRKSSTQRKEEQRKFIRPIVKNKRFTEDKYFFHIPIKIGASVNSISETKFNRTLNEKLRQSACLIIGIDRGEKHLAYYSVINQKGEIVDQASLNKINDVDYCEKLRTREKERLEQRKSWKAISQIKDLKRGYISQVIHKLSELVIKHNAIIVFEDLNMRFKEVRGGIERSAYQQLEKALIEKFGYLVFKDKDPLEAGGVLNGYQLSAPFESFEKMGKQNGVIFYTNPEYTSTTDPVTGWRQHIYIKSDATDNEALKVFTEKIGIGWSDDKQSYTFSYDQKDFWEDSPARKWVLYANAPRLERYRNDAGYWTTRETNSNDLLRELFEVWDFDQPEGDISEQIAMMYEEGKLKGEKIISEKSQRFFKALRYALNLTQQIRNSDSIRYVYERDAQGDIVEDSQGKMVVKEIGENVDFIASPVVPFFTTPNPYTKENLCGLVIENGDANGAYNIARKGIMMLERIKQTQANPDLYISKSDWDEWLMKDIKQK

SEQ ID NO: 671 - protein, 1249 aa, unidentified
  REGION 1..1249: note = Cas Enzyme sequence
MKEQFINCYPLSKTLRFSLIPVGKTEDNFNKKLLLENDKQRAENYENVKSYIDRFHKEYIKSTLANARIEKINEYADLYWKSNKDDSDAKAMESLEDDIRKQISKQLTSTANFKRLFGKELICEDLPAFLTDENEKETVECFRSFTTYFNGFNTNRKNMYSSEKKSTAIAYRCVNDNLPRFLDNIKTFQKIFDNLSDETITKLNTDLYNIFGRKIEDIFSVDYFDFVLAQSGIDIYNSMIGGYTCSDGTKIQGLNECINRYNQQVAKNEKSKRLPLMKPLRKQILSEKDSVSFIPEKFNSDNEVLLAIEEYYNNHISDIDSLTELLQSLNTYNANGIFIKSGAAVSDISNAAFNSWNVLRLAWNEKYEALHPVTSTTKIDKYIEKRDKVYKSIKSFSLFELQELGAENGNEITDWYISSINECNRKIKETYLQARELLKSDYEKDYDKRLYKNEKATELVKNLLDAIKEFQQLVKPLNGTGKEENKDELFYGKFTSFYDSVADIDRLYDKVRNYITQKPYSKDKIKLNFDNPTFLKGWALGNEFANSAQLLRDGDNYYLAIMDKEFRNNIPKKYNSPISKEDMLQKIIYQQAADPSKDIPNLLVIDGVTVKKNGRKEKTGIHAGENIILENLRNTYLPENINRIRKGKTFLTSSENFSKDDLCEYIQYYICRAQEYYSSYNFTFKNASEYKSFSEFLDDVNSQAYQISYDNISKKQIMELVENGYLYLFKIYNKDFSKYSKGTPNLHTLYFKMLFDERNLSNVVYKLNGEAEMFYREASINDKEKITHHANQPIKNKNPDNEKKESVFEYDIVKDKRFTKRQFSLHMSITINFKARGQEFLNYDVRKAVKYKDDNYVIGIDRGERNLIYISVINSNGEIVEQMSLNEIIGDNGYSVDYQKLLDKKEKERDKARKNWTSVENIKELKEGYISQVVHKICELVIKYDAVIAMEDLNFGFKRGRFPVEKQVYQKFENMLISKLNLLIDKKAEPTENGGLLRAYQLTNKFDGVNKAKQNGIIFYVPAWDTSKIDPVTGFVNLLKPKYTSVREAKKLFETIDDIKYNTNTDMFEFCIDYGKFPRCNSDFKKTWTVCTNSSRILSFRNEKKNNEWDNKQIVLTDEFKSLFNEFGIDYTSDLKASILSISNADFYNRLIRLLSLTLQMRNSIIGSTLPEDDYLISPVANDRGEFYDSRNYKGSNAALPCDADANGAYNIARKALWAINVLKDTPDDMLQKAKLSITNAEWLEYTQR

SEQ ID NO: 672 - protein, 1249 aa, unidentified
  REGION 1..1249: note = Cas Enzyme sequence
MKEFTNLYPVSKTLRFDLQPIGRTKENIERNGILQRDEKRAEDYKTVKGFIDEYHKQFIKDRLWSYKLPLYSEGHLNSLEEYQALYELSKRDETQEREFAEVKDNLRAFIAKRLTEGGSAYDRIFKKELIREDLVDFLENEDDREIVRQFADFTTYFGGFHENRKNMYSAEEKSTAIAYRLIHQNLPKFMDNMKAFAKIAESSVSEHFEEIYEGWKEYLNVGSLEEIFRLDYFSVTLTQPHIEVYNYIIGKKILEDGTEIKGINEYVNLYNQQQKDKTKRLPFLVPLYKQILSDREKLSWMAEEFDSDDQMLTAINESYSHLHDLLMGDDNESLRSLLEHLKDFNLEQINITNDLSLTDISQHLFGRYDVFTNGIKDELRIITPRKKKEDDESFEDRISKIFKTQKSFSIALLDKLPQPVMEDGKLRTVEDYFLSLGAVNTGLTQKENLFAQIENAYEDARTILQLKNTDDTLSQDKPAVAKIKTLLDALKDLQHFIKPLLGSGEENEKDELFYGSFQMMWDELDTVTPLYNKVRNWLTRKPFSTEKIKLNFDNSQLLGGWDVNKEPDCTGVLLRKDGLYYLGIMDKKSNRIFEADVTPTDGVCYEKFDYKLLPGANKMLPKVFFSKSRIDEFSPSETIIASYKRGAHKKGANFNLAECHRLIDFFKQSISKHEDWSKFGFHFSDTKTYEDISGFYREVEQQGYMLSYHPVSSSYINQLVDEGKLYLFRIWNKDFSEFSKGTSNLHTLYWKMLFDEQNLANVVYKLNGQAEVFYRKASIKSENRIIHKANQPINNKNELNKKDTSTFEYDIIKDRRYTVDKFQFHVPITINFKATGQTNINPIVQDVIRQGGFSHIIGIDRGERHLLYLSLIDLQGNIVKQMTLNDIINEYKGQTYKTNYHDLLAKREGERTDARRSWETIETIKELKEGYLSQVVHIISKMMVEYNAIVVLEDLNTGFMRGRQKIERQVYEKFEKMLIEKLNCYIDKHAEPTEETGLLHPLQLTCDAKKWTRSHQCGCLFYIPAWNTSKIDPVTGFVNLLDTRYDTREKARLFFSKFQRISFNVDMGWFEFAFDYNDFNTKAEGTRTQWNLCTFGERIRSFRNPKKNNQWDDERIVLTDEFKQLFEKYDIDIAGNLKEAISAQSDAQFFKELLGLMKLLLQMRNSVTNSEEDYLLSPVADENGHFFDSREGISSLPIDADANGAYNIARKGLWVIRKIQETQEDEKVSLNITNKEWLQFAQTKPYRND

SEQ ID NO: 673 - protein, 1249 aa, unidentified
  REGION 1..1249: note = Cas Enzyme sequence
MKKLTNLYPVSKTLRFELQAIGKTKENIEKNGILQRDEKRAEDYKIVKSLIDEYHKQFIKDRLWNFKLPLHNEGHLDSLEEYQALYEISKRNDTQEAEFTEIKDNLRSIISKRLTECGSAYERIFKKELIREDLIDFLESNEDKDIVRQFADFTTYFSGFHENRRNMYVAEEKSTAIAYRLIHQNLPKFMDNMKAFAKIAETSVAEHFTDIYEGWKEFLNVGSLEEIFRLDYFSETLTQPHIEVYNYIIGKKILEDGAEIKGINEYVNLYNQQQKDKSKRLPFLVPLYKQILSDRDKLSWLADEFDSDEKMLAAINESYNHLHDLLMGLENESLRSLLLNIKDFNLSQINISNDLSLTDISQHLFGRYDVFTSGIKDELRIITPRKKKESDEEFEDRISKIFKTQKSFSVDFLDKLPQPVMEDEKPRTIEDYFMTLGAVNTEATQKENFFAQIENAYEDARTILQIKDTGDTLSQNKSAVAKIKALLDALKDLQHFIKPLLGSGEENEKDELFYGSFQMMWDELDTVTSLYNKVRNWLTRKPFSTEKIKLNFDNSQLLGGWDVNKEPDCKGILLRKDDFYYLGIMDKKSNRIFEADVTPTDGECYDKIDYKLLPGANKMLPKVFFSKSRIDEFAPSEAIVSSYKRGTHKKGAVFNLADCHRLIDFFKQSINKHEDWSKFGFHFSDTKSYEDISGFYREVEQQGYMLSSHPVSSSYIDTLVSEGKLYLFRIWNKDFSESSKGTPNLHTLYWKMLFDERNLVDVVYKLNGQAEVFYRKASIKPENCIIHKANQPIANKNELNTKRASTFKYDIIKDKRYTVDKFQFHVPITINFKAAGQNNINPIVQEAIKQDEFSHIIGIDRGERHLLYLSLIDLKGNIVKQMTLNEIINEYKGQTYKTNYHDLLAKREGDRTEARRSWETIETIKELKEGYLSQVVHIISKMMVEYNAIVVLEDLNTGFMRGRQKIERQVYEKFEKMLIDKLNCYIDKQLSPTDEGGLLHPLQLTCDAQKWKRSHQCGCLFYIPAWNTSKIDPVTGFVNLLDTHYDTREKARVFFSKFQRISYNAPKGWFEFAFDYNDFTTKAKGTRTQWTLCTQGERIRTFRNPQKNHQWDDERIMLTDAYKQLFDKYDIDINGNIKEAISSQTDAQFFKDLMGLMKLLLQMRNSITNSEEDYLLSPVANGTGHFFDSREGISSLPKDADANGAYNIARKGLWVVQKIQETPEGEKPSLTITNKEWLQFAQTKPYLND

SEQ ID NO: 674 - protein, 1249 aa, unidentified
  REGION 1..1249: note = Cas Enzyme sequence
MKEQFINCYPLSKTLQFSLIPVGKTEDNFNKKLLLERDKQRAENYEKVKGYIDRFHKEYIESVLVNARVEKIDEYADLYWKSNKDDSDAKAMESLENDMRKQISKQLKSNARYQRLFGKELICEDLPSFLTDKEERETVECFRSFTTYFKGFNTNRENMYSSDEKSTAIAYRCINDNLPRFLDNVKSFQKVFDNLSDETITKLNTDLYNTFGRNIEDIFSVDYFEFVLAQSGIDIYNSMIGGYTCSDGTKIQGLNECINLYNQQAAKNEKSKRLPLMKQLYKQILSEKDSVSFIPEKFNSDNEVLLSIEDYYSSHIGDFDLLTELLQSLNTYNANGIFVKSGAAVSDISNSAFNSWNVLRLAWNEKYEVLHPVTSKTKLDNYIEKRDKIYKAIKSFSLFELQSLGNENGNEITDWYISSTKECNSKIKEAYLQARELLKSDYEKSYNKRLSKNGKATELVKNLLDAIKDFQHLVKSLNGTGKEENKDELFYGKLTSYYDSIADIDRLYDKVRNYITQKPYSKDKIKLNFDNPTFLKGWALGNEFANSAQLLKDGDNYYLAIMDKELKNNIPKKYNSPTNEEDKLQKIIYQQAADPSKDIPNLLVIDGVTVKKNGRREKTGIHAGENIILESLRNTYLPDNINRIRKEKTFSTSSENFSKDDLYEYIQYYICRAQEYYSSYNFTFKNASEYKSFPEFLGHVNSQAYQISYDNISKKQIMELVDNGYIYLFQIYNKDFSKYSKGTPNLHTLYFKMLFDERNLSNVVYKLNGEAEMFYREASINDKEKITHQANQPIENKNPDNEKKESTFEYDIIKDKRFTKRQFSLHVPITINFKAHGQEFLNYDVRKAVKYKDDNYVIGIDRGERNLIYISVIDSNGKIVEQMSLNEIISDNGHRVDYQKLLDTKEKERDKARKNWTSVENIKELKEGYISQVVHKICELVVKYDAVIAMEDLNFGFKRGRFPVEKQVYQKFENMLISKLNLLIDKKADPTEDGGFLRAYQLTNKFDGVNKGKQNGIIFYVPAWDTSKIDPVTGFVNLLKPKYTSVSEAKKLFETIDDIKYNANTDMFEFCIDYGKFPRCNSDYKNTWTVCTNSSRILTCRNKEKNNMWDNKQIVLTDEFKSLFGEFGIDYKGNLKTSILSISNADFYRRLIKLLSLTLQMRNSITGSTLPEDDYLISPVANDRGKFYDSRNYKGMNAALPCDADANGAYNIARKALWAISVLKSTPDDMLNKANLSITNAEWLEYTQK

SEQ ID NO: 675 - protein, 1249 aa, unidentified
  REGION 1..1249: note = Cas Enzyme sequence
MERLTNLYPVSKTLRFELQPIGKTRENIEKGGILQQDEERAENYKSVKGFIDQYHKQYIKSRLWNFELPLADEGHHNSLTEYRALYELPKRDAEQEAAFTEVKDNLRAIIARRLTEKGSAYDRIFKKELIREDLIEFLEDDKDKDIVRQFADFTTYFTGFHENRANMYSSEEQSTAIAYRLIHQNLPKFMDNMKSFAKIAETSVVEHFADIYAGWEEYLNVGSISDMFRLDYFSQTLTQEHIEVYNYIIGKRILDDGTEIKGINEYVNLYNQQQKDKKQRLPLLVPLYKQILSDREKLSWLSEEFDSDAKMQQAIKETYDHLFDLLMGDENESLKSLLMHLSDFDLSQINITNDLSLTDISQHLFGKYDVFTNGIKDKLKIITPRKKKETDEDFEERITKLFKSQKSFSIAELNSLPHPVVDGDQPKSIEDYYMKLGAVNTETVQKENLFAQIENAYTDVLPILQLTDTDDKLSQNKSAVAKIKKLLDALKDLQHFVKPLLGSGEEVEKDERFYGIFQTIWDELDTVIPLYNKVRNWLTRKPYSTEKIKLNFDNSQLLGGWDVNKEPDCTGVLLRKGNYYYLGIMNKKNNRIFEKDLTPSDGDCYDKIDYKLLPGANKMLPKVFFSKSRIDEFAPSVSLIEKYKAGTHKKGANFNLKDCHNLIDFFKQSIAKHEDWCKFGFHFSDTETYEDISGFYREVEHQGYSLSSHKVSVEYIHQMVDEGKLYLFRIWNKDFSEHSKGTPNLHTLYWKMLFDNRNLQDVVYKLNGQAEVFYRKASIKEENRIIHPAKKNINNKNVLNNKQTSRFDYDIIKDRRFTVDKFQFHVPITINFKATGQTNINPVVHDIIRHGGIKHVIGIDRGERHLLYLSLIDLQGRIVKQMTLNEIINEYAGRQYKTNYHDLLAKREGERTDARRSWDTIENIKELKEGYLSQVVHVITKMMVEYKAIIVLEDLNTGFMRGRQKIERQVYEKFEHMLIDKLNCYIDKQADPATSGGLLHALQLSNKFESFARLGKQSGCLFYIPAWNTSKIDPVTGFVNLLDTHYDTMKATKSFFSKFEHISYNGEKDWFEFTFDYNEFNKKAEGTRTHWTLCTYGTRIRNFRNPQKNNQWDDEEVVLTDMFKKIFDDYGIDYRGNLKEAIQQPTEAKFYQELLSLMKLLLQMRNSKINSEVDYLLSPVADENGYFFDSRQGENTLPDNADANGAYNIARKGLWAIRKIQESPKDEKVSLAISNKEWLTFAQTKPYLE

SEQ ID NO: 676 - protein, 1249 aa, unidentified
  REGION 1..1249: note = Cas Enzyme sequence
MKEQFINYYPLSKTLRFSLIPVGKTEDNFNKKLLLESDKQRAENYENVKSYIDRFHKEYIKSALANARIEKINEYAALYWKSNKDDSDAKAMESLEDDIRKQISKQLTSTANFKRLFGKELICEDLPAFLTDENEKETVECFRSFTTYFNGFNTNRKNMYSSEKKSTAIAYRCVNDNLPRFLDNIKTFQKIFDNLSDEAITKLNTYLYNIFGRKIEDIFSVDYFDFVLAQSGIKIYNSMIGEYTCSDGTKIQGLNQCINRYNQQVAKNEKSKRLPLMKPLRKQILSEKDSVSFIPEKFNSDNEVLLAIEEYYNNHISDIDSLTELLQSLNTYNANGIFIKSGAAVSDISNAAFNSWNVLRLAWNEKYEALHPVTSTTKIDKYIEKRDKVYKSIKSFSLFELQELGAENGNEITDWYISSINECNRKIKETYLQARELLKSDYEKDYDKRLYKNEKATELVKNLLDAIKEFQQLVKPLNGTGKEENKDELFYGKFTSLYDSVADIDRLYDKVRNYITQKPYSKDKIKLNFDNPTFLKGWALGNEFANSAQLLRDGDNYYLAIMDKEFRNNIPKKYNSPISKEDVLQKIIYQQAADPSKDIPNLLVIDGVTVKKNGRKEKTGIHAGENIILENLRNTYLPENINRIRKEKTFLTSSENFSKDDLCEYIQYYICRAQEYYSSYNFTFKNASEYKSFSEFLDDVNSQAYQISYDNISKKQIMELVENGYIYLFQIYNKDFSKYSKGTPNLHTLYFKMLFDERNLSNVVYKLNGEAEMFYREASINDKEKITHHANQPIKNKNPDNEKKESVFEYDIVKDKRFTKRQFSLHVSVTINFKAHGQEFLNYDVRKAVKYKDDNYVIGIDRGERNLIYISVINSNGEIVEQMSLNEIIGDNGYSVDYQKLLDKKEKERDKARKNWTSVENIKELKEGYISQVVHKICELVVKYDAVIAMEDLNFGFKRGRFPVEKQVYQKFENMLISKLNLLIDKKAEPTENGGLLRAYQLTNKFDGVNKAKQNGIIFYVPAWDTSKIDPVTGFVNLLKPKYTSVREAKKLFETIDDIKYNTNTDMFEFCIDYGKFPRCNSDFKKTWTVCTNSSRILSFRNEEKNNEWDNKQIVLTDEFKSLFNEFGIDYTSDLKASILSISNADFYNRLIRLLSLTLQMRNSIIGSTLPEDDYLISPVANDRGEFYDSRNYKGSNAALPCDADANGAYNIARKALWAINVLKDTPDDMLQKAKLSITNAEWLEYTQR

SEQ ID NO: 677 - protein, 1249 aa, unidentified
  REGION 1..1249: note = Cas Enzyme sequence
MKEQLINCYPLSKTLRFSLIPVGKTEDNFNKKLLLESDKQRAENYENVKSYIDRFHKEYIKSALANARIEKINEYAALYWKSNKDDSDAKAMESLEDDIRKQISKQLTSTANFKRLFGKELICEDLSAFLTDENEKETVECFRSFTTYFNGFNTNRKNMYSSEKKSTAIAYRCVNDNLPRFLDNIKTFQKIFDNLSDEAITKLNTNLYNRFGRKIEDIFSVDYFDFVLAQSGIDVYNSMIGVYTCSDGTKIQGLNQCINRYNKQVAKNEKSKRLPLMKPLRKQILSEKDSVSFIPEKFNSDNEVLLAIEEYYNNHISDIDSLTELLQSLNTYNANGIFIKSGAAVSDISNAAFNSWNVLRLAWNEKYEALHPVTSTTKIDKYIEKRDKVYKSIKSFSLFELQELGAENGNEITDWYISSINECNRKIKETYLQARELLESDYEKDYDKRLYKNEKATELVKNLLDAIKKFQQLVKPLNGTGKEENKDELFYGKFTSFYDSVADIDRLYDKVRNYITQKPYSKDKIKLNFDNPTFLKGWALGNEFANSAQLLRDGDNYYLAIMDKEFRNNIPKKYNSPISKEDVLQKIIYQQAADPSKDIPNLLVIDGVTVKKNGRKEKTGIHAGENIILENLRNTYLPENINRIRKEKTFLTSSENFSKDDLCEYIQYYICRAQEYYSSYNFTFKNASEYKSFQEFLDDVNSQAYQISYDNISKKQIMELVENGYLYLFKIYNKDFSKYSKGTPNLHTLYFKMLFDERNLSNVVYKLNGEAEMFYREASINDKEKITHHANQPIKNKNPDNEKKESVFEYDIVKDKRFTKRQFSLHVSVTINFKAHGQEFLNYDVRKAVKYKDDNYVIGIDRGERNLIYISVINSNGEIVEQMSLNEIIGDNGYSVDYQKLLDKKEKERDKARKNWTSVENIKELKEGYISQVVHKICELVVKYDAVIAMEDLNFGFKRGRFPVEKQVYQKFENMLISKLNLLIDKKAEPTENGGLLRAYQLTNKFDGVNKAKQNGIIFYVPAWDTSKIDPVTGFVDLLKPKYTSVSEAKKLFETIDDIKYNTNTDMFEFCIDYGKFPRCNSDFKKTWTVCTNSSRILSFRNEEKNNEWDNKQIVLTDEFKSLFNEFGIDYTSDLKASVLSISNADFYNRLIRLLSLTLQMRNSIIGSTLPEDDYLISPVANDRGEFYDSRNYKGSNAALPCDADANGAYNIARKALWAINVLKDTPDDMLQKAKLSITNAEWLEYTQR

SEQ ID NO: 678 - protein, 1249 aa, unidentified
  REGION 1..1249: note = Cas Enzyme sequence
MKEFTNLYPVSKTLRFDLQPIGRTKENIERNGILQRDEKRAEDYKTVKGFIDEYHKQFIKDRLWSYKLPLYSEGHLNSLEEYQALYELSKRDETQEREFAEVKDNLRAFIAKRLTEGGSAYDRIFKKELIREDLVDFLENEDDREIVRQFADFTTYFGGFHENRKNMYSAEEKSTAIAYRLIHQNLPKFMDNMKAFAKIAESSVSEHFEEIYEGWKEYLNVGSLEEIFRLDYFSVTLTQPHIEVYNYIIGKKILEDGTEIKGINEYVNLYNQQQKDKTKRLPFLVPLYKQILSDREKLSWMAEEFDSDDQMLTAINESYSHLHDLLMGDDNESLRSLLEHLKDFNLEQINITNDLSLTDISQHLFGRYDVFTNGIKDELRIITPRKKKEDDESFEDRISKIFKTQKSFSIALLDKLPQPVMEDGKLRTVEDYFLSLGAVNTGLTQKENLFAQIENAYEDARTILQLKNTDDTLSQDKPAVAKIKTLLDALKDLQHFIKPLLGSGEENEKDELFYGSFQMMWDELDTVTTLYNKVRNWLTRKPFSTEKIKLNFDNSQLLGGWDVNKEPDCTGVLLRKDGLYYLGIMDKKSNRIFEADVTPTDGVCYEKFDYKLLPGANKMLPKVFFSKSRIDEFSPSETIIASYKRGAHKKGANFNLAECHRLIDFFKQSISKHEDWSKFGFHFSDTKTYEDISGFYREVEQQGYMLSYHPVSSSYINQLVDEGKLYLFRIWNKDFSEFSKGTSNLHTLYWKMIFDEQNLANVVYKLNGQAEVFYRKASIKSENRIIHKANQPINNKNELNKKDTSTFEYDIIKDRRYTVDKFQFHVPITINFKATGQTNINPIVQDVIRQGGFSHIIGIDRGERHLLYLSLIDLQGNIVKQMTLNDIINEYKGQTYKTNYHDLLAKREGERTDARRSWETIETIKELKEGYLSQVVHIISKMMVEYNAIVVLEDLNTGFMRGRQKIERQVYEKFEKMLIEKLNCYIDKHAEPTEETGLLHPLQLTCDSKKWTRSHQCGCLFYIPAWNTSKIDPVTGFVNLLDTRYDTREKARLFFSKFQRISFNVEMGWFEFAFDYNNFTTKAEGTRTKWNLCTFGERIRSFRNPKKNNQWDDERIVLTDEFKQLFDKYDIDIAGNLKEAISAQSDAQFFKELLGLMKLLLQMRNSVTNSEEDYLLSPVADENGHFFDSREGISSLPIDADANGAYNIARKGLWVIRKIQETQEDEKVSLNITNKEWLQFAQTKPYRND

SEQ ID NO: 679 - protein, 1249 aa, unidentified
  REGION 1..1249: note = Cas Enzyme sequence
MERLTNLYPVSKTLRFELQPIGKTRENIEKGGILQQDEERAENYKLVKSFIDEYHKQYIKSRLWNFELPLADEGRHNSLAEYRALYELPKRDAEQEAAFTEVKDNLRAIIARRLTEKGSAYDRIFKKELIREDLIEFLEDAKDKEIVRQFADFTTYFTGFHENRANMYSSEEQSTAIAYRLIHQNLPKFMDNMKSFAKIAETSVADHFADIYAGWEEYLNVGSINDMFRLDYFSQTLTQEHIEVYNYIIGKRILDDGTEIKGINEYVNLYNQQQKDKKQRLPLLVPLYKQILSDREKLSWLSEEFDSDQKMQQAIKETYDQLYDLLMGDENESLKSLLMHLSDFDLSQINITNDLSLTDISQHLFGKYDVFTNGIKDKLRIITPRKKKDTDEDFEERITKLFKSQKSFSIAELNSLPHPVVEGNQPNSIEDYYMTLGAVNTETVQKENLFAQIENAYTDALPILLLTDTDDKLSQNKAAVAKIKKLLDAFKDLQHFVKPLLGSGEEVEKDERFYGTFQTIWDELDTVTPLYNKVRNWLTRKPYSTEKIKLNFDNSQLLGGWDVNKEPDCTGVLLRKGNYYYLGIMNKKNNRIFEKDLTPSDGDCYDKIDYKLLPGANKMLPKVFFSKSRIDEFSPSASLVEKYKAGTHKKGANFSLKDCHNLIDFFKQSIAKHEDWSKFGFHFSDTKTYEDISGFYREVEHQGYSLSSHKVSAEYIHRMVDEGKLFLFRLWNKDFSEFSKGTPNLHTLYWKMLFDERNLQDVVYKLNGQAEVFYRKASIKEENRIIHPAKKDISNKNALNDKHTSRFDYDIIKDRRFTVDKFQFHVPITINFKATGQTNINPVVHDIIRQGGIKHIIGIDRGERHLLYLSLIDLQGRIVKQMTLNEIINEYAGRQYKTNYHDLLAKREGERTDARRSWDTIENIKELKEGYLSQVVHVITKMMVEYKAIIVLEDLNMGFMRGRQKIERQVYEKFEHMLIDKLNCYIDKLEDPSKPGGMLQALQLSNKFESFARLGKQSGCLFYIPAWNTSKIDPVTGFVNLLDTHYDTMKAAKSFFSKFERISYNGEKNWFEFTFDYNEFNKKAEGTRTHWTLCTYGTRIRNFRNPQKNNQWDDEEIVLTDMFKRLFDNYGIDYRGNLKEALQQPTEAKFYQELMSLMKLLLQMRNSKINSEVDYLLSPVADENGYFFDSRQGDTTLPDNADANGAYNIARKGLWVIHKIQETPDGEKASLAISNKEWLHFAQTKPYLE

SEQ ID NO: 680 - protein, 1249 aa, unidentified
  REGION 1..1249: note = Cas Enzyme sequence
MKQLTNLYQVSKTLRFELQPIGKTRENIEIGGILQQDEERAKNYEQVKGFIDNYHKQYIKSRLWNFELPLADEGRHNSLAEYRALFEMPKRDAEQEALFTEVKDNLRAIIARRLTEKGSAYDRIFKKELIREDLIEFLEDAKDKEIVRQFADFTTYFTGFHENRANMYSSEEQSTAIAYRLIHQNLPKFMDNMKSFAKIAETSVADHFADIYAGWEEYLNVGSINDMFRLDYFSQTLTQEHIEVYNYIIGKRILEDGSEVKGINEYVNLYNQQQKDKKQRLPLLVPLYKQILSDREKLSWLSEEFDSDEKMQQAIKETYDHLYVLLMGEENESLKSLLMHLGDFDLSQINITNDLSLTDISQHLYGKYDVFTNGVKDKLRIITTRKKKETDEDFEERITKLFKAQKSFSIAELNNLPHPVIDGNQPNSIEEYYMTLGAVNTETVQKENLFAQIENAYTDALPILQLTDTGDKLSQDKSSVAKIKKLLDAFKDLQHFVKPLLGSGEEVEKDERFYGAFQTIWDELDTVTPLYNKVRNWLTRKPYSTEKIKLNFDNSQLLGGWDVNKEPDCTGVLLRKDGFYYLGIMNKKNNHIFEKDLTPSDGDCYDKIDYKLLPGANKMLPKVFFSKSRIDEFAPYASLVEKYKAGTHKKGANFSLKDCHNLIDFFKQSIAKHEDWSKFGFHFSDTNTYEDISGFYREVEHQGYSLSSHKVSVNYIHRMVDEGKLFLFRLWNKDFSEYSKGTPNLHTLYWKMLFDERNLQDVVYKLNGQAEVFYRKASIKEDNRIIHPAKKDISNKNALNNKQTSRFDYDIIKDRRYTVDKFQFHVPITINFKATGQTNINPVVHDLIRKGGIKHIIGIDRGERHLLYLSLIDLQGRIVKQMTLNEIINEYAGRQYKTNYHDLLVKREGERTDARRSWETIENIKELKEGYLSQVIHVITKMMVEYNAIVVLEDLNMGFMRGRQKIERQVYEKFEHMLIDKLNCYIDKQEDPSKPGGMLHSLQLSNKFESFARLGKQSGCLFYIPAWNTSKIDPVTGFVNLFDTHYDTMKAAKSFFSKFERITYNGEKDWFEFTFDYDEFSRKAEGTRTHWTLCTYGTRIRNFRNPKKNNQWDDEEVVLTDLFKQLFDNYSIDYRGNLKEAIQQPTEAKFYQELMSLMKLLLQMRNSKINSEVDYLLSPVADENGQFFDSRLGDTTLPDNADANGAYNIARKGLWAIRRIQESPEQEKVSLAISNKEWLSFAQTKPYLK

SEQ ID NO: 681 - protein, 1249 aa, unidentified
  REGION 1..1249: note = Cas Enzyme sequence
MNDLKQFIGIYPVSKTLRFELKPIGRTQEWIERNHVLEHDWKRAEDYPKVKALIDEYHKVCISVSLKDVHLDWMPLKQALEGYQQSKSNESKAVLEKEQTSMRKKISATIKDFRHFKELTAPTPQKLIDDVFPGIYESEALKSFNKFALYFRGFQDNRNNIYSAEAISTGVPYRLVHDNFPKFLADIEVYENIKAVCPEVIEQVATEMQPFLEGVMIDDIFTLDFYNSLLTQNGIDFFNQVLGGVAEEGKQKYRGMNEFVNLYRQQHPELAGRKKALTMVPLFKQILSDRETLSYIPQHIESDQQLVEMLNNFYVRITNYEYNGKTINILKELSDLTGRMKQYNPNGLFLSAKNLTDVSQKLYGKWSAINDLLYEQAVVQYGDPAVAKNKKKIDTYLAKDAFALSEICLDNEHGLSKYYSEMPNAVEQVGSNWLQFKEWCKGEDKQLFLNNADGTEIVKNLLDAMMDILHRCAVFVVPIEYDLDKDFYNDFLPLYAELENVIFVYNRTRNYLTKKPSDTKKFKLNFGTPTLGDGWGVNNERKNKAILLFKDGLSYLGIMNVKGTLKFDETKDTSLPYYKKMICRYLSKPFMDLPHTFFSEKGISTFCPSERIMDIYKNGSFKKDSPSYSIAALHDIIDFYKDAISKHEDWVKYDFSFSPTESYEDISSFYSEIAKQAYKICFTNISEHQVNDWVEKGQLYLFQLYNKDYAEGAHGRKNLHTLYWENLFSEENLNNLVLKLGGQAELFYRPQSIKKAAKHEVGSKMLNRRDKSGMPIPETIYRSLYQYFNGRIPESELTADEKSYINQVIVKETTHEIIKDRRYTKPEFFFHVPIVFNANADGNEYINERALDYLKNNPDVNIIGIDRGERHLIYLTLINQRGEILKQKTFNMVGNYDYHAKLTQREQERDEARKSWQSVGKIKELKEGFLSAVIHEIAVMMVENNAIVVLEDLNFGFKRGRFKVERQVYQKFEKMLIDKLNYLSFKDRKADAEGGILRGYQLAQQFTSFQRLGKQSGFLFYIPAAYTSKIDPITGFANHFNFNDVTNAEKRKAFLMNMERIEMKNGNVEFEFDYRKFKTFQTDYQNVWTVNTLGKRIVFDPEMRKAKDIYPTQEIVTAFKEKGIILKDGTDLKSLIADIEANAKNASFYYAIFDAFKRTLQMRNSNATTDEDYILSPVAVNGKQFCTTDEANKGKDANDNWLSKLPVDADANGAYHVALKGLYLLNNPQTKRIENEKWFQFMVEKPYLE

SEQ ID NO: 682 - protein, 1249 aa, unidentified
  REGION 1..1249: note = Cas Enzyme sequence
MEQFTNLYQISKTLRFGLEPIGKTKENIEKRGVLTCDEKRAEDYQTVKGFIDDYHKQFIKDRLWNFKLPLTSNGNHDSLEEYQALYEMSKRNDAQEAEFSEVKDNLRAIIAKRLTENGSAYDRIFKKEFIREDLVEFLSNENDKELVRQFADFTTYFSGFYENRKNMYSAEEKSTAIAFRLIHQNLPKFMDNIRTFAKIAETSVAEHFTDIYNGWKEYLNVDNIEEVFRLDYFSETLTQPHIDVYNYIIGKKVQDDGTEIKGINEYVNLYNQQQKDKSKRLPFLVPLYKQILCDREKLSWLSEEFDSDEKMLEAINGTYSHLHDILMGEDNDSLRSLLLHLKDYDLSQINIKNDLSLTNISQHLFGRYDVFLSGIKEQLKIKTPRKKEESEEDYEDRITKKFKSQKSFSISYLNTLPYPEVETGKPQSVEEYFMSMGAINTDATQKENIFIQIVNAHEDARTVLQMRDTGDTLSQNKEAVSKIKTLLDSYKDLQHFIKPLLGSGEEIEKDEKFYGCFQMIWEELETVTLLYNKVRNRLTRKPYSTEKVKLNFDNSQLLGGWDINKERDCAGVLLLKDGYYYLGIMDKKSNRVFETDVMTSDTDFYDKIDYKLLPGANKMLPKVFFSKSRINEFAPSEAVVLSYKRGTHKKGKDFNLSDCHRLIDFFKESIQKHEDWRKFGFHFSDTQTYEDISGFYREVEEQGYMLSSHPVSSAYINKLVEEGKLYLFRIWNKDFSTYSKGTPNLHTLYWKMLFDKRNLSDVVYKLNGQAEVFYRRASIKSENRIVHKANQPIINKNALNKNPTSTFGYDIIKDRRYTVDKFQFHVPITINFKALGQGNINPIVQNTIRKGGFRHIIGIDRGERHLLYLSLIDLKGNIVKQMTLNEIVSEYKGQTFKTNYHELLTRREGDRTEARRSWDTIERIKDLKEGYLSQVVHVISKMMVEYKAIVVLEDLKPGFMRERQKIERQVYEKFEKMLIEKLNCYTDKQADATEPTGLLHPLQLTCEAKKWKRSHQCGCLFYIPAWNTSKIDPVTGFVNLFDTRYDTREKARLFFSKFQRIGFNSKKGWFEFVFDYNDFTTKAEGSQTLWTICTFGDRIRTFRNSQKNNQWDNERVSLTDEFKKIFEERDIDICGNLKEAICGQTDAKFFKDLLGLMKLLVQMRNSITNSEEDYLLSPVADENGHFYDSRERISNLPVDADANGAYNIARKGLWVIRQIQKSKENEKVSLAITNKEWLWFAQTKPYLKE

SEQ ID NO: 683 - protein, 1249 aa, unidentified
  REGION 1..1249: note = Cas Enzyme sequence
MKTTTLSTFTRQYPISKTLRFSLLPVGKTREHIRANGFLENDEIRAEKYRLVKAVIDEYHKAFIEQVLGGLRLDGIEEYFELYRKRDATDAEKKKLEEVQKRLREQIADAFRKHPWWTTLEPEPLFKKALPSFVKDDENLSLVKYFQKFTTYFRGFYENRNNIYSAEAKATAIAYRVVHENLPRFLDNCTTYMQARSKPELANTFTAIERELYDDLRGTRLEEVFEPTFFQKTFTQSGIDFYNTVIGGRTLGKGRKIRGVNEFVNTEHNQKQTDKKNRISRFLPLHKQVLSDRDTASFVLAVFTKDDEILDAVRSYYRRLAEPSTDQKLSVLSQLTAVLADLSHADLTRVYVRRSSLNDLSRNICGDWGLIERALDDWYERKKIDTGVKRTKSDATKEKWLKEEYVAIAIIDEALKEFEVDSNSVYRDNIATYFAELLDHHDAKETVTEMFERTYRELEIVLAKRTSKTLVSDTKTVEAIKSFLDAALAVYRFARPLMLDPSFIGERDTAFMSTFMPIYEELDIVVPLYNKTRNYLTKKPYSLEKLKLNFENATLLDGWDLNKETDNTSIIFRRGRLYYLGIMHRKHNRTFRSIPEPKQGEVTYEKMVYKLIPGPNKMFPKVFFSAKGKKIYHPPKDLLERYKQGTHKKGNTFSKEDCHALIDFFKKGIERHEEWKNFGFVFSATEKYDDVSGFYREVEAQAYKISWQNVSASWIDSLVEEGKLFLFVINSKDFSSHSRGTPNLHTLYWRALFDLENLEEGVYKLNGGAEVFYRKPSLDLATTTVHPANQSIANKNPLAERRTSTFPYAITKDRRFTQESFQFHVPITLNFTSYGRPNLNTKVREFLKGNTSVNIIGIDRGERNPLYISVIDQKGNILVQESLNTIVNTYRDKVGATHQKRTDYHNLLGRKETERDEARTSWSRIENIKELKEGYLSHVIHRITTLMVEYNAIIVMENLNVGFKRGRYKVEKQVYQKFEKMLIDKLNYLVFKNREPHVPGGILRAFQLTSKFSSFRDMGIQSGFLFYVPPAYTSTMDPVTGFVDLLKPRYTNLESARNFIRKCKDIRYDLENHWFVFDIDYAAFTAKTEVTTRWIVCTTNCPRYVYERAETEKHGRTREINATQELETLFTQAGINYIDGQDLRDAITKQTNKSFFRKLLWVLGIVMKLRYSNGLKGTDELDYIASPVKPFFCSLNDEVGRPADADANGAYHIAKKGLLILKRIDEAEEPHKANLAISNKDWFAFAQGK

SEQ ID NO: 684 - protein, 1249 aa, unidentified
  REGION 1..1249: note = Cas Enzyme sequence
MKDLKQFIGIYPVSKTLRFELRPVGKTQEWIEKSKVLENDESKAADYPVVKKLIDEYHKVCIRESMKNVHLDWNPLKEAIEDYQKTKSDEAKKRLESEQTMMRKQIATAIKDFKHYKELTAATPSDLITSVLPEFSDNEALKSFRGFASYFIGFQENRNNIYSPDAIGTGVPYRLVHDNFPKFLSNLEVYDKIKATCPEVIQQASEEMQRFLEGVMIDDIFSLDFYNSLLTQDGIDFFNRVIGGVSEDGMQKYRGINEFSNLYRQQHKDLAGSKKALTMIPLFKQILSDRDTLSYIPAQIETEEELVTSITQFYKHITHFERDGKTINVLNELVALLSKIDTYNPDGICVTANKLTDISQKVFGKWSIIEEKLKDKAIQQYGDISVAKTKKKVDAYLSRKAYCLSDLCFDDEFHISQYFSDIPQTLNAIDGYWLQFNEWCKNEEKQKFLNNPTGTDIVKSLLDAMMELSHKCSVLVMPEEYEVDKSFYNEFIPLYEELDTLFLLYNKVRNYLTRKPSDVKKFKLNFESPTLANGWDQNKEMKNNAILLFKNGKSYIGVLNAKNKAKIKKAKCDASSTSYKKMIYKLLSDPSKDLPHKIFAKGNLDVYKPSEYILEGRESGKYKKGPSFDKKFLHDFIDFYKAAIAIDPDWSKFNFNYTPTELYEDIGSFFSEIKKQAYKISFTDIPESQVDEWVDNGQLYLFQLYNKDYAEGAHGRKNLHTLYWENLFTDENLNNLVLKLNGQAELFCRPQSIKKPVSHKVGSRMLNRRDKSGMPIPESIYRSLYQFYNGKKKESELTAAEKQYMNQVIVKDVTHEIIKDRRYTRQEYFFHVPITFNANADGNEYINENVLNYLKDNPNVNIIGIDRGERHLIYLTLINQRGEILKQKTFNVVNSYNYQAKLEQREKERDEARKSWDSVGKIKDLKEGFLSAVIHEISKMMIEHNAIVVLEDLNFGFKRGRFKVERQVYQKFEKMLIDKLNYLSFKDREAGEEGGILRGYQMAQKFVSFQRLGKQSGFLFYIPAAYTSKIDPVTGFVNHFNFNDITNAEKRKEFLMKMERIEMRNGNIEFEFDYRKFKTFQTDYQNLWTVSTYGKRIVMRMDDKGYKQMVDYEPTKEIINAFKNKGIQLSEGSDLKVLIADIEANAVNAGFFNTLLYAFQKTLQMRNSNAATEEDNILSPVAKDGHYFCSIDEANKGRDTQGDWVSKLPVDADANGAYHIALKGLYLLRNPEKKKIENEKWLQFMVQKP

SEQ ID NO: 685 - protein, 1249 aa, unidentified
  REGION 1..1249: note = Cas Enzyme sequence
MEQFTNLYQVSKTLRFDLQPIGKTQENIEKNGILARDEQRAKDYLLVKGFIDDYHKQFIKERLWDFKLPLESEGRLDSLQEYQELYELSKRDDAQEAAFTEIKDNLRSIIAKRLTESGSAYERIFKKELIREDLVEFLEKEEAKDIVRQFADFTTYFSGFHENRRNMYSAEEKSTAIAYRLIHQNLPKFLDNMKAFAKIAETSVAKHFADIYDGWKEHLNVGSIEEIFRLDYFSETLTQTHIEVYNYIIGKKIFEDGTEIKGINEYVNLYNQQQKDKSQRLPFLVPLYKQILSDREKLSWMAEEFDSDEQMLSAINESYNHLHDLLMGDENDSLRSLLLHIKDFNLSQINITNDLSLTDISQHLFSRYDVFTNGIKDELRIITPRKKKESDEDFEDRISKIFKTQKSFSVAFLDNLPQPVMDDGKSRSVEDYFMSLGAVNTETTQKENLFAQIENAYEDARHILQMNDTGDTLSQNKPAVAKVKALLDSLKDLQHFIKPLLGSGEENEKDELFYGLFQMIWDELNTVTPLYNKVRNWLTRKPYSTEKIKLNFDNAQLLGGWDVNKEPDCTGVLLQHDGFYYLGIMNKKANHIFDADVTPSDGDCYDKIDYKLLPGANKMLPKVFFSRSRIDEFAPSETIVNSYKRGTHKKGTGFSLSDCHRLIDFFKTSISKHEDWSKFGFRFSDTKTYEDISGFYREVEQQGYMLSSHPVSTSYIHQLVEDGKLYLFRIWNKDFSEFSKGTPNMHTLYWKMLFDERNLADVVYKLNGQAEVFYRKASIKLENRIVHPSNRPIANKNELNKKRTSTFEYDIIKDRRYTVDKFQFHVPITINFKAAGQTNINPIVQDAIRRGGFKHIIGIDRGERHLLYLSLIDLKGNIVKQMTLNDIVNEYKGITYRTNYHDLLAKREGDRTEARRSWDTIETIKELKEGYLSQVIHIISKMMVEYNAIVVLEDLNTGFMRGRQKIERQVYEKFEKMLIEKLNCYIDKQADPSEITGLLHPLQLTCDAQKWKRSHQCGCLFYIPAWNTSKIDPVTGFVNLLDTRYDTREKARLFFSKFQRISFNAKKDWFEFAFDYNDFTTKAEGTRTNWTLCTYGERIRTFRNPQKNNQWDDERIVLTDAFKQLFDKYNIDIIGNIKESISAQSDTQFFKELLGLMKLLLQMRNSITNSEEDYLLSPVADQNGHFFDSRESNDSLPNNADANGAYNIARKGLWIIEQIKQTEDLSKLKLAVSNKEWLQFAQNKPYLND

SEQ ID NO: 686 - protein, 1249 aa, unidentified
  REGION 1..1249: note = Cas Enzyme sequence
MKQFTNLYPVSKTLRFELQPIGKTKENIEKNGILMRDEKRAEDYKIVKGFIDDYHKQFIKERLWSFKLPLNSEGHLNSLEEYQALYEVSKRNEVQEAEFSEVKDNLRSIIAKRLTESGSAYERIFKKELIREDLIDFLESKEDKDIVRQFADFTTYFSGFHENRKNMYVAEEKSTAIAYRLIHQNLPKFMDNMKTFAKIAETSVAEHFSDIYEGWKEYLNVGSIEEIFRLDYFSETLTQPHIEVYNYIIGKKILEDGTEIKGINEYVNLYNQQQKDKSKRLPFLIPLYKQILSDREKLSWLVEEFDSDEIMLAAINEAYNHLHDLLMGRENESLRSLLLHIKDFDLSQISITNDLSLTDISQHLFSRYDVFTNGIKDELRIITPRKKKESDEDFEDRISKIFKTQKSFSIDFLDKLPQPVMEDGKTRSIEDYFMTLGAVNTETTQKENLFAQIENAYEDARFVLQLKDTGDTLSQNKSAVAKIKALLDALKDLQHFIKPLLGSGEENEKDDLFYGSFQMMWDELDTITPLYNKVRNWLTRKPFSTEKIKLNFDNSQLLGGWDVNKEPDCTGVLLRKDGLFYLGIMDKKSNHIFETDVIPTDGECFDKIDYKLLPGANKMLPKVFFSKSRIDEFAPSESIITSYKRGTHKKGVGFNLAECHRLIDFFKQSINKHEDWSKFGFHFSDTKTYEDISGFYREVEQQGYMLSSRPVSSSYIDTLVSEGKLYLFRIWNKDFSEFSKGTPNLHTLYWKMLFDERNLSDVVYKLNGQAEVFYRKASIKPENRIVHKANQPVANKNELNTKLASTFEYDIIKDKRYTVDKFQFHVPITINFKAAGQTNINTIVQDAIRQEEFSHIIGIDRGERHLLYLSLIDLKGNIVKQMTLNEIINEYKGQTYKTNYHDLLAKREGDRTNARRSWETIETIKELKEGYLSQVVHIISKMMVEYNAIVVLEDLNTGFMRGRQKIERQVYEKFEKMLIEKLNCYIDKQVSPTAKGGLLNPLQLTCDAQKWKRSHQCGCLFYIPAWNTSKIDPVTGFVNLLDTHYDTREKARVFFSKFQRISYNAQKGWFEFAFDYNDFTSKAEGTRTQWTLCTQGERIRTFRNPQKNHQWDDERIALTDAYKQLFDKYDIDINGNIKEAISAQTDAQFFKELMGLMKLLLQMRNSVTNSEEDYLLSPVADDAGHFFDSREGISNLPIDADANGAYNIARKGLWIIRKIQEAPSGERISLSITNKEWLQFAQTKPYFND

SEQ ID NO: 687 - protein, 1249 aa, unidentified
  REGION 1..1249: note = Cas Enzyme sequence
MKNFESFTNLYPLSKTLRFELRPIGRTLENIQANGLLEQDNHRAESYKLVKAIIDRYHKVFIDEALSHCVLPVENSGNKNSLSEVYQYLTTKDHSEKETDDFNKTQDNLRKMIVSALKKDTHFGRIFKKELIREDLLNNDLQGFDLNEEEYDLIKEFRDFTTYFVGFNENRANMYSEEAKSTAIGYRLIHENLPKFIDNMVIFQKVKVSPVSEYFANIETEMEDMLQGIKVEDIFDLNFFNQVLVQRFIDLYNAVIGGQVASEEDHRKGLNQYINEYNQVQKDKKDRLPKFKPLFKQILSDRIHASWQIDNFESDNEVLKAIENAYETLDEEVISRKDSNLPLLFASISDFDLSGIYVSAKAITDFSQQIFKDWNAIDSALEAACRRSNQPKKKETEEKYAERIKKQRSHIDSYSVGEIIESLVAFQPNPEKSILDYLGGMGRREDKPSIIESIKSAYRDVEELLKTEYPANKNLALDKDNISKVKALLDAIKELQFFIKPLLGTGKESGKDERFYGEFVDYWQTLDIITPLYNKVRNYATRKPYSTAKFKLNFENSTLLNGWDVNKEPDNTSVLLRKDGLYYLAIMKKSCNRVFAVDQYDTVGDCYEKIDYKLLPGANKMLPKVFFAKSRIDEFAPSREVLDIYKRGSFKKGEEFCKADLHTLIDFYKASITKHEDWKKFGFEFSPTSSYDDISGFYREVEQQGYQIRFRKVSCTYIDSLVDQGQIYLFQIYNKDFSPFSKGTPNMHTLYWKMIFDERNLKDVVYKLNGQAEIFFRKSSLPVETPTHPANQPIANKNPLNRKKESLFTYDIVKNRRYRYDKFQFHVPITMNFKSIGSEYINDQVQDYIRQSKDLHFIGIDRGERHLLYLTVIDSKGIIEEQFSLNVINNEYNGTTYSTNYHDLLEERGDDRTKARREWLAIESIKELKEGYLSQVVKKITDLMIKYNAIVVLEDLNMGFKRGRQKVESSAYQQFEHKLIDKLNYLAGKTAPIDKVGGLLKAYQLATPYQNEMGFQNGFVFYIPAWNTSKIDPVTGFTNLFDLHIETMEQAKKFFSKFDYIRWNAANNWFEFAFDYKNFTEKADGSRTQWTLCTQGTRIRTFRNPEKNSEWDNVEVDLTDQFLSLFNSKNIDIKSDLKTQILAQNEKDFFMSLLLCLKLTLQMRNSISNSEVDYLISPVADANGDFFDSRKVDLSLPANADANGAYNIARKGLWMARRIKKSRPEDKVSLKITNKEWLNFAQNKPYLTD

SEQ ID NO: 688 - protein, 1249 aa, unidentified
  REGION 1..1249: note = Cas Enzyme sequence
MKSLKQFIGIYPVSKTLRFELRPVGKTVEWIEKNKVLESDEQKAEDYPIVKSLIDDYHKVCIRESLKRVHLDWNPLRQALEEYQGSKSDESMAVLEKEQANMRKQIANAIKDFHHYRELTAPTPQKLIDNVFPGIYDNEAIRSFNRFAMYFKGFQENRNNIYSAEAISTGVPYRLVHDNFPKFLADIEVFENIKNACPEVIEQVAKEMQPFLEGVMIDDIFTLDFYNSLLTQDGIDFFNQVLGGVAEEGKQKYRGINEFANLYRQQHPDITDKRKGLTMVPLFKQILSDRETLSYIPQQIESEQQMTDVLCQFYDHITNCEYNGKTINVLKELSSVTSRIDDYNPDGIFLSAKTITDVSQKMFGRWSTIKDMLYERAAGLFGDPSIAKNKKKIDAYLAKEAFSLSEVCFDSQQGLSMYFSDMPHLTEQVCGNWLQFKEWCKGDDKQLFLNNVDGTEIVKNLLDSMMEILHHCSALVAPIEYDLDKDFYNNFLPLYAELENVIFVYNRIRNYLTKKPSDTKKFKLNFGTPTLGDGWGVNNERKNKAILLFKDGLSYLGIMNVKGTLKFEESKNAASPSYKKMTCRYLSKPFMDLPHTFFSEKGIRTFRPSEHVLEIYKSGSFKKDSPNYSKSSLSELIDYYKESINKHEDWVKYGFSFSSTDSYEDISSFYSEIARQAYKISFTNISELQVNEWVEGGQLYLFQLYNKDYAEGAHGRKNLHTLYWENLFSDENLSNLVLKLGGQAELFYRPQSIKKPVRHEVGSKMLNRRDKSGMPIPESVYSGLYQYFNGRKQESELTAEERSYMDQVVVKETTHEIIKDKRYTKPEFFFHVPIVFNANADGNEYINERVLDYLKDNPDVNIIGIDRGERHLIYLTLINQRGEILKQKTFNMVGNYNYHAKLEQREKERDQARKSWQSVGKIKDLKEGFLSAVIHEIAVMMVENNAIVVLEDLNFGFKRGRFKVERQVYQKFEKMLIDKLNYLSFKDRKADEEGGILRGYQLAQQFTSFQRLGKQSGFLFYIPAAYTSKIDPVTGFVNHFNFNDITNAEKRKAFFMNMERIEMKRGDVEFEFDYRKFKTYQTDFQNIWTVNTSGKRIVFDAERREAKDVYPTQDIIAAFSGRGIVIKDGMNLKALIADIEPNAKNAAFFGTLFYAFQKTLQMRNSNAATEEDYILSPVVRNGKQFCTTNEVNKGKDADGNWRSKLPVDADANGAYHIALKGLYLINNPHTKKIENEKWFRFMVEKPYLE

SEQ ID NO: 689 - protein, 1249 aa, unidentified
  REGION 1..1249: note = Cas Enzyme sequence
MKEQFINCYPLSKTLQFSLIPVGKTDDNFNKKLLLERDKQRAENYEKVKGYIDRFHKEYIESVLVNARVEKIDEYADLYWKSNKDDSDAKAMESLENDMRKQISKQLKSNARYKRLFGKELICEDLPSFLTDKDERETVECFRSFTTYFKGFNTNRENMYSSDEKSTAIAYRCINDNLPRFLDNVKSFQKVFDNLSDETITKLNTDLYNTFGRNIEDIFSVDYFEFVLAQSGIDIYNSMIGGYTCSDGTKIQGLNECINLYNQQVAKNEKSKRLPLMKPLYKQILSEKDSVSFIPEKFNSDNEVLLSIEDYYSSHIGDFDLLTELLQSLNTYNANGIFVKSGAAVSDISNGAFNSWNVLRLAWNEKYEALHPVTSKTKLDNYIEKRDKIYKAIKSFSLFELQSLGNENGNEITDWYISSSKECNSKIKEAYLQARELLKSDYEKSYNKRLSKNGKATELVKNLLDAIKDFQHLVKSLNGTGKEENKDELFYGKLTSYYDSIADIDRLYDKVRNYITQKPYSKDKIKLNFDNPTFLKGWALGNEFANSAQLLKDGDNYYLAIMDKELKNNIPKKYNSPTNEEDMLQKIIYQQAADPSKDIPNLLVIDGVTVKKNGRREKTGIHAGENIILENLRNTYLPDNINRIRKEKTFSTSSENFSKDDLYEYIQYYICRAQEYYSSYNFTFKNASEYKSFPEFLYHVNSQAYQISYDNISKKQIMELADNGYIYLFQIYNKDFSKYSKGTPNLHTLYFKMLFDERNLSNVVYKLNGEAEMFYREASINDKEKITHQANQPIKNKNPDNEKKESTFEYDIIKDKRFTKRQFSLHVPITINFKAHGQEFLNYDVRKAVKYKDDNYVIGIDRGERNLIYISVIDSNGKIVEQMSLNEIISDNGHRVDYQKLLDTKEKERDKARKNWTSVENIKELKEGYISQVVHKICELVVKYDAVIAMEDLNFGFKRGRFPVEKQVYQKFENMLISKLNLLIDKKADPTEDGGLLRAYQLTNKFDGVNKGKQNGIIFYVPAWDTSKIDPVTGFVNLLKPKYTSVSEAKKLFETIDDIKYNANTDMFEFCIDYGKFPRCNSDYKKTWTVCTNSSRILTCRNKEKNNMWDNKQIVLTDKFKSLFGEFGIDYKGNLKTSILSISNADFYRRLIKLLSLTLQMRNSITGSTLPEDDYLISPVANDRGEFYDSRYYKETNAALPCDADANGAYNIARKALWAISVLKSTPDDMLNKANLSITNAEWLEYTQK

SEQ ID NO: 690 - protein, 1249 aa, unidentified
  REGION 1..1249: note = Cas Enzyme sequence
MKHFTNLYPVSKTLRFELQPIGKTKENIEKNGILLRDEKRAEDYKIVKGFIDEFHKQFIKDRLWSFKLPLHNEGHLDSLEEYQALYEISKRNDAQEAEFTEIKDNLRSIIAKRLTESGSAYERIFKKELIREDLIDFLESNEDKDIVRQFADFTTYFSGFHENRRNMYVAEEKSTAIAYRLIHQNLPKFMDNMKAFAKIAETSVAEHFTDIYEGWKEYLNVGSIEEIFRLDYFSETLTQPHIEVYNYIIGKKILEDGSEIKGINEYVNLYNQQQKDKSKRLPFLVPLYKQILSDRDKLSWLAEEFDSDEKMLSAINESYNHLHELLMGNENESLRSLLLHIKDFNLSQINITNDFSLTDISQHLFGRYDVFTSGIKDELRIITPRKKKESDEDFEDRISKIFKTQKSFSIDFLDKLPQPVMEDGKPRCIEDYFMTLGAVNTETTQKENLFAQIENAYEDARAILQLKDTGDSLSQNRSAVAKIKALLDALKDLQHFIKPLLGSGEENEKDELFYGSFQTMWDELDSVTPLYNKVRNWLARKPFSKEKIKLNFDNSQLLGGWDVNKEPDCTGVLLRKDDFYYLGIMDKKYNRIFEADVTPTDGECYDKIDYKLLPGANKMLPKVFFSKSRIDEFAPSEAIVSSYKRGTHKKGADFNLADCHRLIDFFKQSINKHEDWSKFSFQFSDTKSYEDISGFYREVEQQGYMLSSHPISSSYITQLVDEGKLYLFRIWNKDFSEFSNGTPNLHTLYWKMLFDECNLTDVVYKLNGQAEVFYRKASIKPENRIIHKANQPIANKNELNTKRTSTFKYDIIKDKRYTVDKFQFHVPITINFKAAGQTNINPIIQDAIRQGEFSHIIGIDRGERHLLYLSLIDLKGNIVKQMTLNDIVNEYKGQTYKTNYHDLLAKREGDRTDARRSWETIETIKELKEGYLSQVIHIISKMMVEYNAIIVLEDLNTGFMRGRQKIERQVYEKFEKMLIDKLNCYIDKQVSPTAEGGLLHPLQLTCDAQKWKRSHQCGCLFYIPAWNTSKIDPVTGFVNLLDTHYDTREKARVFFSKFQRISFNVPKGWFEFAFDYNDFTSKAEGTRTQWTLCTQGERIRTFRNPQKNNQWDDERIVLTDAFKQLFDKYDIDINGNIKEAISEQTDAQFFRDLLGLMKLLLQMRNSITNSEEDYLLSPVADDAGHFFDSREGISSLPIDADANGAYNIARKGLWVVRKIKETPNGEKTTLSISNKEWLQFAQTKPYIND

SEQ ID NO: 691 - protein, 1249 aa, unidentified
  REGION 1..1249: note = Cas Enzyme sequence
MKEFTNLYPVSKTLRFELQPIGMTKENIEKNGILQRDEKRAEDYKIVKGFIDEYHKQFIKERLWSFKLPLNCEGHLNSLEEYQALYELPKRNDAQEAEFTEIKDNLRSIIAKRLTESGSAYERIFKKELIREDLIDFLESNEDKEIVRQFADFTTYFSGFHENRRNMYVAEEKSTAIAYRLIHQNLPKFMDNMKAFAKIAETPVAEHFDDIYEGWKEFLNVGSIDEIFRLDYFTETLTQPHIEVYNYIIGKKILEDGTEIKGINEYVNLYNQQQKDKSKRLPFLVPLYKQILSDREKLSWLGEEFDSDEKMLAAINESYTHLHDLLMGDENESLRALLLHIKDFDLTKINITNDLSLTDISQHLFGRYDVFTNGIKDELRNITPRKRKESDEELEDRISKIFKTQKSFSIDFLDKLPQPVMDDEKPRSIEDYFMTLGAVNTETTQKVNLFAQIENAYEDARTILQLTDTGDTLSQNKSAVAKIKALLDALKDLQHFIKPLLGSGEENEKDELFYGSFQMMWDELDTVTPLYNKVRNWLTRKPFSTEKIKLNFDNSQLLGGWDVNKEPDCTGVILRKEGFYYLGIMDKKSNHIFEADITPSVGECYDKIDYKLLPGANKMLPKVFFSKSRIDEFAPSEAIISSYKRGTHKKGADFNLVECHRLIDFLKQSINKHEDWSKFNFHFSDTKSYEDISGFYREVEQQGYMLSSHPVSSSYINQLVDEGKLYLFRIWSKDFSEFSKGTPNLHTLYWKMLFDERNLADVVYKLNGQAEVFYRKASIKPENRIIHKANHSIANKNELNSKRTSTFEYDIIKDRRYTVDKFEFHVPITINFKAAGQTNINPIVQDVIRQGGFSHIIGIDRGERHLLYLSLIDQKGNIIKQMTLNEIINEYKGQTYKTNYHDLLAKREGDRTDARRSWETIETIKELKEGYLSQVVHIISKMMVEYNAIVVLEDLNTGFMRGRQKIERQVYEKFEKMLIEKLNCYIDKHEAPSENTGLLHPLQLTCDAQKWKRSHQCGCLFYIPAWNTSKIDPVTGFTNLLDTRYDTREKARVFFSKFQRISYNAEKGWFEFALDYNDFTAKAEGTRTQWTLCTYGERIRTFRNPKKNHQWDDERIVLTDAFKQLFDTYDIDINGNLKETISAQTDAQFFKELLGLMKLLLQMRNSITNSEEDFLLSPVADDAGHFFDSREGNSSLPIDADANGAYNIARKGLWVIRKIQETANEEKPSLSITNKEWLHFAQTKPYLKD

SEQ ID NO: 692 - protein, 1249 aa, unidentified
  REGION 1..1249: note = Cas Enzyme sequence
MKNLKQFIGIYQVQKTLRFELRPVGKTQEWIEKNKVLENDEQKAADYPVVKKLIDDYHKVCISESLKDVHLDWSPLKQALEDYQQSKSDESKAVLEKEQTSMRKQIAAVIKDFRHFKELTAPTPQKLIDDVFPGIYEDEALKSFNRFALYFRGFQDNRNNIYSAEAISTGVPYRLVHDNFPKFLADIEVYENIKTTCPEVIDQVSTEMQPFLEGVMIDDVFTLDFYNSLLTQDGIDFFNQVLGGVAEEGKQKYRGINEFANLYRQQHPELTGKKKALTMVPLFKQILSDRETLSYIPQQIESEQQLIDVLSQFYAHITDYEYNGKIINVLKELSNLTNRIGDYNPAGIFLSAKTLTDVSQKLFGRWSAINDELYEKAVSQFGDPAIGKNKKKIDAYLAKDAFALSEIDLDSEHHLSTYFSEMPHIVEQVGSSWLQFKEWCKGEDKQLFLNNADGTEIVKNLLDAMMDILHRCSVLIVPVEYDLDKDFYNDFLPLYAELENVIFVYNRTRNFLTKKPSDTKKFKLNFSTPTLGDGWGVNNERKNKAILLFKDGLSYLGIMNVKGTLKFEETKDVSSPSYKKMTCRYLSKPFMDLPHTFFSEKGISTFHPSEHIMDIYKNGTFKKDSPSYSIAALHDLIDFYKDSINRHEDWVKYAFSFSPTESYEDISSFYSEIAKQAYKISFTNVSEQQVNDWVENGQLYLFQLYNKDYAEGAHGRKNLHTLYWENLFSEENLNNLVLKLGGQAELFYRPQSIKKPAKHVVGSKMLNRRDKTGMPIPESIYRSLYQYYNGRKQECELTAAEKSYMNQVIVKETTHEIIKDRRYTKPEFFFHVPIVFNANADGNEYINERVLDYLKDNPDVNIIGIDRGERHLIYLTIINQRGEILKQKTFNLVGNYNYHAKLEQREKERDDARKSWQSVGKIKELKEGFLSAVIHEIAEMMVENNAIVVLEDLNFGFKRGRFKVERQVYQKFEKMLIDKLNYLSFKDRKTDEEGGILRGYQLAQQFTSFQRLGKQSGFLFYIPAAYTSKIDPVTGFVNHFNLNDITNAEKRKTFLMNMERIEMKNGNVEFEFDYRKFKTYQTDYQNVWTVNTSGKRIVFDSETRKAKDIYPTQEIVAAFNEKGINLKDGMDLKSLIADIEANAKNASFYYAIFDAFKRTLQMRNSNAATKEDYILSPVVRNGKQFCTTDEVNKGKDADGNWLSKFPVDADANGAYHIALKGLYLLNNPQTKKIENEKWFQFMVEKPYLD

SEQ ID NO: 693 - protein, 1249 aa, unidentified
  REGION 1..1249: note = Cas Enzyme sequence
MKNFESFTNLYPLSKTLRFELRPIGRTLENIQANGLLEQDNHRAESYKLVKAIIDRYHKVFIDEALSHCVLPVENSGNKNSLSEVYQYLTTKDHSEKETDDFNKTQDNLRKMIVSALKKDTHFGRIFKKELIREDLLNNDLQGFDLNEEEYDLIKEFRDFTTYFVGFNENRANMYSEEAKSTAIGYRLIHENLPKFIDNMVIFQKVKVSPVSEYFANIETEMEDMLQGIKVEDIFDLNFFNQVLVQRFIDLYNAVIGGQVASEEDHRKGLNQYINEYNQVQKDKKDRLPKFKPLFKQILSDRIHASWQIDNFESDNEVLKAIENAYETLDEEVISRKDSNLPLLFASISDFDLSGIYVSAKAITDFSQQIFKDWNAIDSALEAACRRSNQPKKKETEEKYAERIKKQRSHIDSYSVGEIIESLVAFQPNPEKSILDYLGGMGRREDKPSIIESIKSAYRDVEELLKTEYPANKNLALDKDNISKVKALLDAIKELQFFIKPLLGTGKESGKDERFYGEFVDYWQTLDIITPLYNKVRNYATRKPYSTAKFKLNFENSTLLNGWDVNKEPDNTSVLLRKDGLYYLAIMKKSCNRVFAVDQYDTVGDCYEKIDYKLLPGANKMLPKVFFAKSRIDEFAPSREVLDIYKRGSFKKGEEFCKADLHTLIDFYKASITKHEDWKKFGFEFSPTSSYDDISGFYREVEQQGYQIRFRKVSCTYIDSLVDQGQIYLFQIYNKDFSPFSKGTPNMHTLYWKMIFDERNLKDVVYKLNGQAEIFFRKSSLPVETPTHPANQPIANKNPLNRKKESLFTYDIVKNRRYRYDKFQFHVPITMNFKSIGSEYINDQVQDYIRQSKDLHFIGIDRGERHLLYLTVIDSKGIIEEQFSLNVINNEYNGTTYSTNYHDLLEERGDDRTKARREWLAIESIKELKEGYLSQVVKKITDLMIKYNAIVVLEDLNMGFKRGRQKVESSAYQQFEHKLIDKLNYLAGKTAPIDKVGGLLKAYQLATPYQNEMGFQNGFVFYIPAWNTSKIDPVTGFTNLFDLHIETMEQAKKFFSKFDYIRWNAANNWFEFAFDYKNFTEKADGSRTQWTLCTQGTRIRTFRNPEKNSEWDNVEVDLTDQFLSLFKSKNIDIKSDLKTQILAQNEKDFFMSLLLCLKLTLQMRNSISNSEVDYLISPVADANGDFFDSRKVDSSLPANADANGAYNIARKGLWMARRIKKSRPEDKVSLKITNKEWLNFAQNKPYLTD

SEQ ID NO: 694 - protein, 1249 aa, unidentified
  REGION 1..1249: note = Cas Enzyme sequence
MKEFTNLYPVSKTLRFELQPIGKTKENIEKNGILQRDEKRAEDYKIVKGFIDEYHKQFIKERLWSFKLPLNCEGHLNSLEEYQALYELPKRNDAQEAEFTEIKDNLRSIIAKRLTESGSAYERIFKKELIREDLIDFLENNEDKDIVRQFADFTTYFSGFHENRRNMYVAEEKSTAIAYRLIHQNLPKFMDNMKAFAKIADTPVAEHFADIYDGWKEYLNVGSIDEIFRLDYFTETLTQPHIEVYNYIIGKKILEDGTEIKGINEYVNLYNQQQKDKSKRLPFLVPLYKQILSDREKLSWLGEEFDSDEKMLAAINESYTHLHDLLMGDENESLRALLLHIKEFDLTKINITNDLSLTDISQHLFGRYDVFTNGIKDELRNITPRKRKESDEELEDRISKIFKTQKSFSIDFLDKLPQPVIDDGKPRSIEDYFMTLGAVNTETTQKENLFAQIENAYEDARTILQLTDTGDTLSQNKSAVAKIKALLDALKDLQHFIKPLLGSGEENEKDELFFGSFQMMWDELDTVTPLYNKVRNWLTRKPFSTEKIKLNFDNSQLLGGWDVNKEPDCTGVILRKEGFYYLGIMDKKSNHIFEADITPSVGECYDKIDYKLLPGANKMLPKVFFSKSRIDEFAPSEAIISSYKRGTHKKGADFNLAECHRLIDFFKQSINKHEDWSKFNFHFSDTKSYEDISGFYREVEQQGYMLSSHPVSSSYINQLVDEGKLYLFRIWSKDFSEFSKGTPNLHTLYWKMLFDERNLADVVYKLNGQAEVFYRKASIKPENRIIHKANHSIANKNELNSKRTSTFEYDIIKDRRYTVDKFQFHVPITINFKAAGQTNINPIVQDVIRQGGFSHIIGIDRGERHLLYLSLIDLKGNIIKQMTLNEIINEYKGQTYKTNYHDLLAKREGDRTDARRSWETIETIKELKEGYLSQVVHVISKMMVEYNAIVVLEDLNTGFMRGRQKIERQVYEKFEKMLIEKLNCYIDKHAAPSENTGLLHPLQLTCDAQKWKRSHQCGCLFYIPAWNTSKIDPVTGFTNLLDTRYDTREKARVFFSKFQRISYNAEKGWFEFALDYNDFTAKAEGTRTQWTLCTYGERIRTFRNPKKNHQWDDERIVLTDAFKQLFDTYDIDINGNLKETISAQTDAQFFKELLGLMKLLLQMRNSITNSEEDFLLSPVADDAGHFFDSREGNSSLPIDADANGAYNIARKGLWVIRKIQETANEEKPSLSITNKEWLHFAQTKPYLKD

SEQ ID NO: 695 - protein, 1249 aa, unidentified
  REGION 1..1249: note = Cas Enzyme sequence
MKNLKQFIGIYQVQKTLRFELRPVGKTQEWIEKNKVLENDEQKAADYPVVKKLIDDYHKVCISESLKDVHLDWSPLKQALEDYQQSKSDESKAVLEKEQTSMRKQIAAVIKDFRHFKELTAPTPQKLIDDVFPGIYEDEALKSFNRFALYFRGFQDNRNNIYSAEAISTGVPYRLVHDNFPKFLADIEVYENIKTTCPEVIDQVSTEMQPFLEGVMIDDVFTLDFYNSLLTQDGIDFFNQVLGGVAEEGKQKYRGINEFANLYRQQHPELTGKKKALTMVPLFKQILSDRETLSYIPQQIESEQQLIDVLSQFYAHITDYEYNGKIINVLKELSNLTNRIGDYNPAGIFLSAKTLTDVSQKLFGRWSAINDELYEKAVSQFGDPAIGKNKKKIDAYLAKDAFALSEINLDSEHHLSTYFSEMPHTVEQVGSSWLQFKEWCKGEDKQLFLNNADGTEIVKNLLDAMMDILHRCAVLIVPVEYDLDKDFYNDFLPLYAELENVIFVYNRTRNFLTKKPSDTKKFKLNFSTPTLGDGWGVNNERKNKAILLFKDGQSYLGIMNVKGTLKFEETKDVSSPSYKKMTCRYLSKPFMDLPHTFFSEKGISTFHPSEHIMDIYKNGTFKKDSPSYSIAALHDLIDFYKDSINRHEDWVKYAFSFSPTESYEDISSFYSEIAKQAYKISFTNVSEQQVKDWVENGQLYLFQLYNKDYAEGAHGRKNLHTLYWENLFSEENLNNLVLKLGGQAELFYRPQSIKKPAKHVVGSKMLNRRDKTGMPIPESIYRSLYQYYNGRKQECELTAAEKSYMNQVIVKETTHEIIKDRRYTKPEFFFHVPIVFNANADGNEYINERVLDYLKDNPDVNIIGIDRGERHLIYLTIINQRGEILKQKTFNLVGNYNYHAKLEQREKERDDARKSWQSVGKIKELKEGFLSAVIHEIAVMMVENNAIVVLEDLNFGFKRGRFKVERQVYQKFEKMLIDKLNYLSFKDRKTDEEGGILRGYQLAQQFTSFQRLGKQSGFLFYIPAAYTSKIDPVTGFVNHFNLNDITNAEKRKTFLMNMERIEMKNGNVEFEFDYRKFKTYQTDYQNVWTVNTSGKRIVFDSETRKAKDIYPTQEIVAAFNEKGINLKDGMDLKSVIADIEANAKNASFYYAIFDAFKRTLQMRNSNAATKEDYILSPVVRNGKQFCTTDEVNKGKDADGNWLSKFPVDADANGAYHIALKGLYLLNNPQTKKIENEKWFQFMVEKPYLD

SEQ ID NO: 696 - protein, 1249 aa, unidentified
  REGION 1..1249: note = Cas Enzyme sequence
MEQFTNLYPLSKTLRFELIPHEKTKELLERTDYLAQDEKRAESYKIVKGIIDRYHKSFIEDVLSKPIEDQGEKRPILKYAKESTKNCDSLEEFYELYSKSQKSETEKNTLEIIQNNLRKQIVYALTQDARFKNLDKKELIYQDIYAIAKPEEIPFIKEFEGFATYFVGFHENRMNMYSSEAKSTAIGNRLINENLPIFTDNMGTFQKLLNSPVSEHFDTICKDMEDILPYDNIEEIFMLHNYNDFLTQKQITVYNAIIGGRVLEDGTKIQGINEYVNLYNQQQPTRETRLPKLKTLFKQILSDKESVSWLAEEFTSDAEMLKSIRDYYTSFKNNASQQMIDILTNIKSYDIDHIFIPNDISLTTISKKVFKDWEAINKSIIKRLKEDNPQKGREKDENYEERMSKAFKSYDSFSLGLINSCTATDDVCIYFSKIAKTDEETGLSHNLLDNIEEAYDKAKEYLNNGYPSNLNLAQDKSTVQKIKTLLDSIKDLQKFIKPLLGSGTEAVKDERFYGDISLVWEIIDQITPLYNKVRNRITRKAYSTEKIKLNFENSTLLAGWDLNKERDNTSIILKKDGLYYLAIMRKEFNKVFQNAPRQTSDEDSFEKMEYKLLPGANKMLPKVFFSKSRIDEFAPSDVLIEKYKKGTHKKGSNFNIDDCHNLIDFFKSSIQKHDDWSKFNFKFSPTNSYEDMSGFYREVEKMGYKITFKKIPADYIEELVTTGKIFLFKIYNKDFSQYSKGTPNLHTLYWKMVFDDNNLKDVVFKLNGEAEIFYRKKSLSYKSPTHPAHQPIRNKNPYNAKEESNFAYDLIKDKRYTLDKFHFHIPITINFKSEGVSNINSLVCKYLRENDDIHFIGIDRGERHLLYVSVIDSRGRIKEQFSLNQIINEYKGNSYSTDYHKLLEERDEKRAKERQSWDSIESIKELKQGYLSQVIHKIASLVVKYNAVVVLEDLNIGFKRGRQKVESSIYQQFEKALIDKFNYLVDKNVAPEQPGGLMKGYQLTNKFSSFRDMGKQNGFLFYIPAWNTSKIDPVTGFVDMLHPKYESVEKAREFFTKFNKISYNQEKGWFEFLFDYNDFTTKAEGTRTVWTLCTFGKRIETFRNKNKNSMWDNKEIDLTSAFISLCEKYNVPLSCDMKNDIVAQTEKDFYVELIRILRLTLQMRNSITGTDVDYLISPVADENGNFYDSRNADSTLPENADANGAYNIARKGLWAAMQIRSCTDSDLKVNLAISNKEWLTFAQTKPYTK

SEQ ID NO: 697 - protein, 1250 aa, unidentified
  REGION 1..1250: note = Cas Enzyme sequence
MQFQDFTNQYAVSKTLSFELIPQGRTLEHVEAKGLLSEDEHRSESYKTVKTVIDRYHKQFIEEALSGFELDELETYQTLYNIANKTSEDQKCFIAIQDTMRKSIVKHIKQHPKFSILDKKELIRDELFTYCENDAEKAMVLEFYKFTTYFSGFNDNRKNMYSDEEKSTAIAYRIVHQNLPKFIDNLKTFSLISNVLSENIKTLNTELQNVLGNMIINDIFALNFFNQTLTQKGIDRYNTLLGGFTDQNNPKKKIKGLNEYINQYNQTLPKTGKIGKLKPLYKQILSDRESISFLPETLQTGQDVLTALRCYYESNLADVINEYGNDGKTLKEVFENLSNYDLSGVFIRNDASIADVSQKIFGNWNIIQQAFDLRYDQTYTGKKSKKPEKYEDERKKYFKNIQSFSIESINEALTYLNDKTKHKQIEKFFSGLGIRENKNNLITIINKAYEDLEKVLGIPYPTDKELSQDTRTVEKIKTFLDSVKALQWFTKLILGKGTEPNKDSLFYGDLLPLWNEIDKITPLYNSIRNYMTKKPYSTEKIKLNFQNATLLAGWDVNQERANTSLIFLKNGLYYLGIMDQEYNKSFIDLPVLPMTTADDVYQKMEYKQLPGPEKMLPKVFFSKARIDEFAPSERVLEIYKNGTFKKGDDFKLEDCHELIEFYKRAIAQHPAWNQFNHQFSKTSAYQNIGEFYNDVKQQGYKITYRDVPVEYMNQLINDGQLYLFQIYNKDFSPHSKGTPNMHTLYWKMIFDEQNLNDVVYKLDGGAEVFYRKASPGIKKTPTHPKNQAVANKNPLNPKKESIFDYDLIKNKRFTMDKFLLHVPIKMNFKANPMTNLNMSVRSYLKTQRKTNIIGIHRGERNLLYVAVINEKGEILEQQSLNTIMNKNNDISHTTDYHDLLDRKEKERDTARKNWQTIENIKELKEGYLSQVIHKITQLMVKYQAIVVVEDLDMGFMQGRQKVEKQVYQKFEKMLISKLQYLVDKKAPIKQPGGLLKALQLTKNETAGQGKNSYEKQNGFLFYVPAWNTSSIDPTTGFVNLFKSSDLRYESINKSKTFINLIDKMQYSTSAQHFEFNIDYDKFTEKAQGTRTDWMICTHGKRIRSFRNAETNNQWCTEEIDLTQAFRQLLDDNEIDYQSQTLKEDILQMNTRAFFVAFLDIFRLILQLRNRKENGDYLISPVKNSTGEFFDSRDKRNGLPENEDANGAYNIARKGAWIIDAIKDADDDKLNRVKMTMSNKDWLTYAQAHLI

SEQ ID NO: 698 - protein, 1250 aa, unidentified
  REGION 1..1250: note = Cas Enzyme sequence
MKTLSDFTNLFPLSKTLRFKLIPIGNTLKNIEASGILDEDRHRAESYVKVKAIIDEYHKAFIDRVLSDTCLQTESIGKHNSLEEFFFYYQIGAKSEQQKKTFKKIQDALRKQIADSLTKDKHFSRIDKKELIQEDLIQFVRDGEDAAEKTSLISEFQNFTVYFTGFHENRQNMYSPDEKSTAIAYRLINENLPKFVDNMKVFDRIAASELASCFDELYHNFEEYLQVERLHDIFSLDYFNLLLTQKHIDVYNALIGGKATETGEKIKGLNEYINLYNQRHKQEKLPKFKMLFKQILTDREAISWLPRQFDDNSQLLSAIEQCYNHLSTYTLKDGSLKYLLENLHTYDTEKIFIRNDSLLTEISQRHYGSWSILPEAIKRHLERANPQKRRETYEAYQSRIEKAFKAYPGFSIAFLNGCLTETGKESPSIESYFESLGAVETETSQQENWFARIANAYTDFREMQNRLHATDVPLAQDAEAVARIKKLLDALKGLQLFIKPLLDTGEEAEKDERFYGDFTEFWNELDTITPLYNMVRNYLTRKPYSEEKIKLNFQNPTLLNGWDLNKEVDNTSVILRRNGRYYLAIMHRNHRRVFSQYPGTERGDCYEKMEYKLLPGANKMLPKVFFSKSRIDEFNPSEELLARYQQGTHKKGENFNLHDCHALIDFFKDSIEKHEEWRNFHFKFSDTSSYTDMSGFYREIETQGYKLSFVPVACEYIDELVRDGKIFLFQIYNKDFSTYSKGKPNMHTLYWEMLFDERNLMNVVYKLNGQAEIFFRKASLSARHPEHPAGLPIKKKQAPTEESCFPYDLIKNKRYTVDQFQFHVPITINFKATGTSNINPSVTDYIRTADDLHIIGIDRGERHLLYLVVIDSQGRICEQFSLNEIVTQYQGHQYRTDYHALLQKKEDERQKARQSWQSIENIKELKEGYLSQVVHKVSELMIKYKAIVVLEDLNAGFKRSRQKVEKQVYQKFEKMLIDKLNYLVFKTAEADQPGGLLHAYQLTNKFESFKKMGKQSGFLFYIPAWNTSKIDPTTGFVNLFDTRYENVDKSRAFFGKFDSIRYRADKGTFEWTFDYNNFHKKAEGTRSSWCLSSHGNRVRTFRNPAKNNQWDNEEIDLTQAFRDLFEAWGIEITSNLKEAICNQSEKKFFSELFELFKLMIQLRNSVTGTNIDYMVSPVENHYGTFFDSRTCDSSLPANADANGAYNIARKGLMLARRIQATPENDPISLTLSNKEWLRFAQGLDETTTYE

SEQ ID NO: 699 - protein, 1250 aa, unidentified
  REGION 1..1250: note = Cas Enzyme sequence
MKQFTNLYPVSKTLRFELQPIGKTKENIERAGILQRDEQRAEDYIKVKGFIDEYHKQFIKERLWNFRLPLNSEGSHNSLEEYQKLYELSKRNETQEKEFTELKNNLRRIIVKRLTESGSAFDRIFKKELIREDLVEFLENEEDREIVRQFADFTTYFTGFHENRKNMYTDEEKSTSIAYRLIHQNLPKFMDNMKAFAKIAETSVAEHFADIYDGWKEFLNVGSIEEIFQLDYFSETLTQPHIEVYNYIIGKKILEDGTEIKGINEYVNLYNQQQKDKSQRLPFLVPLYKQILSDREKLSWLAEEFDSDEKMLAAINGSYRHLHDLLMGKENESLLTLLTHLKDFDLTRINITNDLSLTDISQHLFGQYDVFTKGIKEELRLIIPKKREESDEKFEERITKIYKTQKSFSIAVLDKLPQPAMEDNSPRNIEDYFQSLGAINTETNQKENLFAQIENTYEDARTILQTAETGEGLSQNKPAVAKIKALLDALKDLQHFIRPLLGSGEENDKDELFYGTFQLIWDELDTITPLYNKVRNWLTRKPYSTEKIKLNFDNAQLLGGWDVNKEPDCTGVLLRKDGFYYLGIMNKKANHIFDTTITPSDGDCYDKIDYKLLPGANKMLPKVFFSKSRIDEFAPSEAIIRSYKKGTHKKGTDFSLADCHRLIDFFKTSINKHEDWKKFGFHFSDTQTYEDISAFYREVEQQGYMLSSHHVSVSYIHQLVEEGKLYLFRIWNKDFSEYSKGTPNLHTLYWNMLYDNPNLADVVYKLNGQAEVFYRKASIKPENRIIHPAHRSIANKNEFNEKRTSTFEYDIIKDRRYTVDKFQFHVPITINFKATGQSNINPIVQNTIRQGGFSHIIGIDRGERHLLYLSLIDLKGNIVKQMTLNDIINEHNGVTYRTNYHNLLTIREGERTDARRSWDTIETIKELKEGYLSQVIHIISKMMIEYNAIVVLEDLNMGFMRGRQKIERQVYEKFEKMLIDKLNCYIDKQIDPQSIGGLLHPIQLTNKFESFHKLGKQCGCLFYIPAWNTSKIDPLTGFVNLFDTRYDTREKARLFFSKFQRISFNVEKNWFEFSFNYNDFNTKAEGTRTEWTLCTYGERIRTFRNPQKNHQWDDERIVLTDEFKQLFEKYGIDIRRNLKDAICNQNEAQFYRDLLGLMKLLLQMRNSITNSEEDYLLSPVSDETGHFFDSREDIDTLPNNADANGAYNIARKGLWIIRKIQETPDGEKPSLTITNKEWLQFAQTKPYLID

SEQ ID NO: 700 - protein, 1250 aa, unidentified
  REGION 1..1250: note = Cas Enzyme sequence
MSKFESFTNQYSLNKTLRFSLIPIGKTEENFNAKLLLEEDETRAKEYSKVKRLIDRYHRHYIEGVLSTFVLDGVSEYADLYYKTGKTEKDLKEMDKAETLMRKKVAKALTSTSVYKKLFSKELITEILPEFLSDENELASVEMFQSFFTYFVGFNDNRRNMYTELPKTTAISYRCVNENLPKFLDNAANFKKIITAIPEKISLLNEDVSGLYGVLAEDVFSVDYFSFVLAQSGIDKYNEIIGGYTCSDGTKVQGLNEYVNLYNQQVAGKDRSLKLPFMKPLYKQILTLSESISFIPEKFESDDELLGAVARFYTETVVPTLNELKKLADELETFDSDGIYIRSGASVTDISNAVFGKWNVISEGWRKNYAEEHPLKAGKNEEKYADDMGKAYKAIKSFSIRELEHFAALCPEEHDQNSILSYISSATEEKTSAVTVAYDSAEKLLSENYSENNDKKLCRNDAAIEMVKNLLDSIKEVEWLLKPLLGTGKEENKDDTFYGRFLPLFESLSELDKLYDKVRNYVTQKPYSKDKIKLNFSNDIFLEGWAQSLEIARSAQLFRKGNTYYLAAMDKDLRSALPKKYIAPSSSDDALEKIVYQQMASPAKDIPNLMVINGKTVKKNGRKEKSGDHIGENIILEQLKNEYLPARINEIRKKRSFSRTSEHFSKEDLAEYIQYYSERVQEYYSSFDFNFKDATDYSSYDEFLKDVDGKAYQITYESVSYKQIMSLVDSGHLYLFQIYNKDFSPHSHGKENLHTMYFKMLFDERNLADVVYQLNGGAEMFYRKASIKDGEKIVHPANLPVKNKNSLNEKKESVFGFDLVKDRRFTKRQFSLHLSITLNFKSEGREFINHDVRLALKNSEDNCVIGIDRGERNLLYVCVINGKGEIVCQQSLNEIISDNSYKVDYHKLLDDKEKARDAARKSWGTVENIKELKEGYLSQVVHKICELAIKYDAVIALEDLNFGFKNGRFKVEKQVYQKFENMLISKLNYLVDKARAADEAGGLLNAYQLTNKADGVNRGRQNGIIFYVPAWLTSKLDPTTGFADLIRPRYTSIADTKSFIQRIDDIRYNSSEDLFEFDFDLEKFPNTAASYKKKWTVCTNGERIKTFRNENKNGEWDNETVLLSKAFKNLFSEHRVDIAKDIKSQLLSVDAASFFAHFMKLLALTLQMRNSITGSDIDYLISPVRNASGSFFDSRNLDPALPENADANGAYNIARKALWAIDLLKNTPDDELQRADLFIRNADWLKLAQK

SEQ ID NO: 701 - protein, 1250 aa, unidentified
  REGION 1..1250: note = Cas Enzyme sequence
MKEQFINRYPLSKTLRFSLIPIGETENNFNKNLLLKKDKQRAENYEKVKCYIDHFHKEYIESVLSKARIEKVNEYANLYWKSNKDDSDIKAMESLENDMRKQISKQLTSTEIYKKRLFGKELICEDLPSFLTDKNERETVECFRSFTTYFKGFNTNRENMYSSDEKSTAIAYRCINDNLPRFLDNVKSFQKVFDNLSDETITKLNTDLYNIFGRNIEDIFSVDYFEFVLAQSGIEIYNSMIGGYTCSDKTKIQGLNECINLYNQQVAKNEKSKRLPLMKPLYKQILSEKDSVSFIPEKFNSDNEVLHAIDDFYTGHIGYIDLLTELLQSLNTYNANGIFVKSGVAITDISNGAFNSWNVLRLAWNEKYEALHPITSKTKIDKYIEKQDKIYKAIKSFSLFELQSLGNENGNEITDWYISSINESNIKIKEAYLQAQELLNSDYEKSYNKRLYKNEKATELVKNLLDAIKEFQKLIKPLNGTGKEENKDELFYGKFTSYYDSIADIDRLYDKIRNYITQKPYSKDKIKLNFDNPTFLKGWALGNEFANSAQLLKDGDNYYLAIMDKELKNNIPKKYNSPTSEEDMLQKIIYQQAADPSKDIPNLLVIDGVTVKKNGRREKTGIHTGENIILENLRNTYLPDNINRIRKEKTFSTLSENFSKDDLYEYIQYYICRAQEYYSSYNFTFKNASEYKSFPEFLGHINSQAYQISYDNISKKQIMELVENGYIYLFQIYNKDFSKYSKGTPNLHTLYFKMLFDERNLSNVVYKLNGEAEMFYREASIGDKEKITHYANQPIKNKNPDNEKKESVFEYDIVKDKRFTKRQFSLHLPITINFKAHGQEFLNYDVRKAVKYKDDNYVIGIDRGERNLIYISVINSNGKIVEQMSLNEIISDNGHKVDYQKLLDKKEKDRDKARKNWASVENIKELKEGYISQVVHKICELVIKYDAVIAMEDLNFGFKRGRFPVEKQVYQKFENMLISKLNLLIDKKADTTEDGGLLRAYQLTNKFDGVNKAKQNGIIFYVPAWDTSKIDPATGFVNLLKPKYTSVPEAKKLFETIDDIKYNANTDMFEFYIDYSKFPRCNSDFKKSWTVCTNSSRISTFQNKEKNNMWDNKQIVLTDEFKSLFNEFGIDYKGNLKDSILNISDPAFYRRLIKLLSLTLQMRNSITGSTLPEDDYLISPVANESGEFYDSRNYKGTNAALPCDADANGAYNIARKALWAINVLKDTPDEMLNKAKLSITNAEWLEYTQK

SEQ ID NO: 702 - protein, 1250 aa, unidentified
  REGION 1..1250: note = Cas Enzyme sequence
MKEQFINRYPLSKTLRFSLIPIGETENNFNKNLLLKKDKQRAENYEKVKCYIDHFHKEYIESVLSKARIEKVNEYANLYWKSNKDDSDIKAMESLENDMRKQISKQLTSTEIYKKRLFGKELICEDLPSFLTDKNERETVECFRSFTTYFKGFNTNRENMYSSDEKSTAIAYRCINDNLPRFLDNVKSFQKVFDNLSDETITKLNTDLYNIFGRNIEDIFSVDYFEFVLAQSGIEIYNSMIGGYTCSDKTKIQGLNECINLYNQQVAKNEKSKRLPLMKPLYKQILSEKDSVSFIPEKFNSDNEVLHAIDDFYTGHIGYIDLLTELLQSLNTYNANGIFVKSGVAITDISNGAFNSWNVLRLAWNEKYEALHPITSKTKIDKYIEKQDKIYKAIKSFSLFELQSLGNENGNEITDWYISSINESNIKIKEAYLQAQELLNSDYEKSYNKRLYKNEKATELVKNLLDAIKEFQKLIKPLNGTGKEENKDELFYGKFTSYYDSIADIDRLYDKIRNYITQKPYSKDKIKLNFDNPTFLKGWALGNEFANSAQLLKDGDNYYLAIMDKELKNNIPKKYNSPTSEEDMLQKIIYQQAADPSKDIPNLLVIDGVTVKKNGRREKTGIHTGENIILENLRNTYLPDNINRIRKEKTFSTLSENFSKDDLYEYIQYYICRAQEYYSSYNFTFKNASEYKSFPEFLGHINSQAYQISYDNISKKQIMELVENGYIYLFQIYNKDFSKYSKGTPNLHTLYFKMLFDERNLSNVVYKLNGEAEMFYREASIGDKEKITHYANQPIKNKNPDNEKKESVFEYDIVKDKRFTKRQFSLHLPITINFKAHGQEFLNYDVRKAVKYKDDNYVIGIDRGERNLIYISVINSNGKIVEQMSLNEIISDNGHKVDYQKLLDKKEKDRDKARKNWASVENIKELKEGYISQVVHKICELVIKYDAVIAMEDLNFGFKRGRFPVEKQVYQKFENMLISKLNLLIDKKADTTEDGGLLRAYQLTNKFDGVNKAKQNGIIFYVPAWDTSKIDPATCFVNLLKPKYTSVPEAKKLFETIDDIKYNANTDMFEFYIDYSKFPRCNSDFKKSWTVCTNSSRISTFQNKEKNNMWDNKQIILTDEFKSLFNEFGIDYKGNLKDSILNISNADFYRQLIKLLSLTLQMRNSITGSTLPEDDYLISPVANESGEFYDSRNYKGTNAALPCDADANGAYNIARKALWAINVLKDTPDDMLNKAKLSITNAEWLEYTQK

SEQ ID NO: 703 - protein, 1250 aa, unidentified
  REGION 1..1250: note = Cas Enzyme sequence
MEQLTNLYPVSKTLRFELQPIGKTRENIEKRGILQQDEERAENYKLVKGFIDEYHKQYIKSRLWNFELPLDDEGRHNSLAEYRALYELPKRDAEQEAAFTEVKDNLRAIIARRLTEKGSAYDRIFKKELIREDLIEFLEDENDKEIVRQFAGFTTYFTGFHENRANMYSSEEQSTAIAYRLIHQNLPKFMDNMKSFTKIAETSVAEHFADIYAGWEEYLNVGSINDMFRLDYFSQTLTQEHIEVYNYIIGKRILDDGTEIKGINEYVNLYNQQQRDKKQRLPLLVPLYKQILSDREKLSWLSEEFDSDTKMQQAIKETYDHLYDLLMGDENESLKSLLMHLGDFDLSQINITNDLSLTDISQHLFGKYDVFTNGIKDKLRIITPRKKKETDEDFEERITKLFKTQKSFSIAELNSLPHPIIEGSQPKNIEDYYMALGAVNTETVQKENLFAQIENAYTDVLPILQLTDTGDKLSQNKAEVAKIKKLLDAFKDLQHFVKPLLGSGEEVEKDERFYGAFQTIWDELDTVTPLYNKVRNWLTRKPYSTEKIKLNFDNAQLLGGWDVNKEPDCTGVLLSKDGFYYLGIMNKKNNHIFEKDMTPSDVDCYDKIDYKLLPGANKMLPKVFFSKSRIDEFAPSASLVEKYKAGTHKKGANFSLKDCHNLIDFFKQSIAKHEDWSKFGFHFSDTNTYEDISGFYREVEHQGYSLSSHKVSVDYIHQMVDEGKLFLFRLWNKDFSEYSKGTPNLHTLYWKMLFDEHNLNDVVYKLNGQAEVFYRKASIKEENRIIHPAKKDISNKNALNEKQKSRFDYDIIKDRRFTVDKFQFHVPITINFKAIGQTNINPVVHDIIRQGGIKHVIGIDRGERHLLYLSLIDLQGRIVKQMTLNEIINEYAGRQYKTNYHDLLAKREGERTDARRSWDTIENIKELKEGYLSQVVHVITKMMVKYKAIVVLEDLNMGFMRGRQKIERQVYEKFEHMLIDKLNCYIDKQEDPSKPGGMLHALQLSNKFESFARLGKQSGCLFYIPAWNTSKIDPVTGFVNLLDTHYDTMKAAKSFFSKFERIRYNGENDWFEFTFDYDEFNKKAEGTKTRWTLCTYGTRIRNFRNPQKNNQWDDEEVVLTDMFKKLFEDYGVDYQGNLKEAIQHPTEAKFYQELMSLMKLLLQMRNSKINSEVDYLLSPVADENGHFFDSRQGDATLPDNADANGAYNIARKGLWVIRKIQESPKDEKVSLAISNKEWLTFAQTKPYLDK

SEQ ID NO: 704 - protein, 1250 aa, unidentified
  REGION 1..1250: note = Cas Enzyme sequence
MKQFTNLYPVSKTLRFELQPIGKTKENIEKGGILQRDEQRAEDYKKVKLLIDAYHKQFIKERLWSFKLPMVSQGHHDSLEEYQELYELSKRTDAQEAAFTEVKDNLRRIIVKRLTEKGSVYERIFKKELIREDLLDFLEDEEDKKIVRQFADFTTYFTGFHENRANMYSDEEKSTAIAFRLIHQNLPKFMENMKAFAKIAQTTVSEHFVDIFEGWKEYLNVSSLEEVFNLDYFSETLTQPHIEVYNYIIGKKILDDGTEIKGVNEYVNLYNQQQKDKRQRLPLLVPLYKQILSDREKLSWLAEEFDSDEMMLAAINETYGNFHDLLMGEENESLRSLLKHINDYDLSQINITNDLSLTDISQHLFGRYDVFTNGIKEKLRITTPRKKEESEDAFEERISKIFKSHKSFSIEFLNALSQPVIDNDKPRKVEDYFMALGAVNTDTTQKENLFAQIENAYEEARHILQMKDTGDTLSQDKDAVAKIKALLDALKDLQHFIKPLLGSGEENEKDELFYGSFQMMWDELDAVTPLYNKVRNWLTRKPYSTEKIKLNFDNAQLLSGWDVNKEPDCTGVLLRKDGYYYLGIMNKKANRIFDADVTPSEGECYDKIDYKLLPGANKMLPKVFFSKSRINEFAPSEAIISSYKRGTHKKGADFSLSDCHRLIDFFKSSINKHEDWCKFGFHFSETESYEDISGFYHEVEQQGYMLSYHHVSVSYINKLVEEGKLYLFRIWNKDFSEYSKGTPNLHTLYWKMLFDEHNLADVVYKLNGQAEVFYRKASIKPESRVIHPAHMAIANKNELNENSTSTFEYDIIKDRRYTVDKFQFHVPITINFKSIGQTNINPIVQDTIRQGGFSHIIGLDRGERHLLYLSLIDLKGNIVKQMTLNEIINEYKGITYRTNYHDLLVKREGERTTARRSWDTIENIKELKDGYLSQVIHIISKMMVEYNAIVVLEDLNTGFMRGRQKIERQVYEKFEKMLIDKLNCYIDKQADPNTVGGLLHPIQLANKFESFRKLGKQSGCLFYIPAWNTSKIDPVTGFVNLFDTRYETREKARVFFSKFQSIRFNVEKDWFEFAFDYDVFTTKAEGTRAQWTLCTHGTRIRTFRNPLKNNQWDDEELLLTDAFKQLFDKYDIDINGNLKEAINRQTDAQFYKELMGLMKLLLQMRNSRTNSEVDYLLSPVADERGHFFDSRDNIATLPDNADANGAYNIARKGLWVIRKIQESKEGEKLSLAISNKEWLQFAQTKPYLDD

SEQ ID NO: 705 - protein, 1250 aa, unidentified
  REGION 1..1250: note = Cas Enzyme sequence
MKQFTNLYPVSKTLRFELQPIGKTKENIERAGILQRDEQRAEDYIKVKGFIDEYHKQFIKERLWNFRLPLNSEGSHNSLEEYQKLYELSKRNETQEKEFTELKNNLRRIIVKRLTESGSAFDRIFKKELIREDLVEFLENEEDREIVRQFADFTTYFTGFHENRKNMYTDEEKSTSIAYRLIHQNLPKFMDNMKAFAKIAETSVAEHFADIYDGWKEFLNVGSIEEIFQVDYFSEPLTQPPIEVYNYIIGKKILEDGTEIKGINEYVNLYNQQQKDKSQRLPFLVPLYKQILSDREKLSWLAEEFDSDEKMLAAINGSYRHLHDLLMGKENESLLTLLTHLKDFDLTRINITNDLSLTDISQHLFGQYDVFTKGIKEELRLIIPKKREESDEKFEERITKIYKTQKSFSIAVLDKLPQPAMEDNSPRNIEDYFQSLGAINTETNQKENLFAQIENTYEDARTILQTAETGEGLSQNKPAVAKIKALLDALKDLQHFIRPLLGSGEENDKDELFYGTFQLIWDELDTITPLYNKVRNWLTRKPYSTEKIKLNFDNAQLLGGWDVNKEPDCTGVLLRKDGFYYLGIMNKKANHIFDTTITPSDGDCYDKIDYKLLPGANKMLPKVFFSKSRIDEFAPSEAIIRSYKKGTHKKGTDFSLADCHRLIDFFKTSINKHEDWKKFGFHFSDTQTYEDISAFYREVEQQGYMLSSHHVSVSYIHQLVEEGKLYLFRIWNKDFSEYSKGTPNLHTLYWNMLYDNPNLADVVYKLNGQAEVFYRKASIKPENRIIHPAHRSIANKNEFNEKRTSTFEYDIIKDRRYTVDKFQFHVPITINFKATGQSNINPIVQNTIRQGGFSHIIGIDRGERHLLYLSLIDLKGNIVKQMTLNDIINEHNGVTYRTNYHNLLTIREGERTDARRSWDTIETIKELKEGYLSQVIHIISKMMIEYNAIVVLEDLNMGFMRGRQKIERQVYEKFEKMLIDKLNCYIDKQIDPQSIGGLLHPIQLTNKFESFHKLGKQCGCLFYIPAWNTSKIDPLTGFVNLFDTRYDTREKARLFFSKFQRISFNVEKNWFEFSFNYNDFNTKAEGTRTEWTLCTYGERIRTFRNPQKNHQWDDERIVLTDEFKQLFEKYGIDIRRNLKDAICNQNEAQFYRDLLGLMKLLLQMRNSITNSEEDYLLSPVSDETGHFFDSREDIDTLPNNADANGAYNIARKGLWIIRKIQETPDGEKPSLTITNKEWLQFAQTKPYLID

SEQ ID NO: 706 - protein, 1250 aa, unidentified
  REGION 1..1250: note = Cas Enzyme sequence
MNTFNDLSAFTNLYSLSKTLRFELIPKGNTLEMIERHGLLIKDETRAENYKKVKKIIDEYHKDFINKAIEGLVLNGLEDFILLYNKALRSEDDKKQMALVQTSLRKQISERFSKHPNESISERYKNLFAKELIKIDLKNFVNDEDRIVVSEFDNFTTYFSGFHENRRNIYTSDEISTAIGYRLVHQNLLFFIDNIKIFDKLSLTTISSEFQKILKELELIIQVNSIDEIFTTEYFNETLTQIGIDKYNFLLGGYTSEDGKTKIKGLNEYINLYNQQQSEKANKIGKLKPLYKQILSDRASASFLPEEFLNDSEVLEGIEKTYQDISESLANVMKIILDFKVFDSSKIYIKNDTGLTDISQKMLGDWSAIQRGVELKYEIENPRGPKEKNIEKYQEKKQKAFRNQESFNIRYLNECIALLNLEKVLTIEQYFVNFGYSPKSETSEVIPNLLLKIQDNYDSVKDLLNQPYDVNKNLGQDRESVEKIKSLLDSIKSLQHFVKPLCGNGDEADKDERFYGEFIPLFENIDLINMLYNKVRNYIAKKPYSIEKYKLNFDNSTLLNGWDANKEIDNTSIILRKNGLYYLAIMNKKNNKVFDKKFEGNTDSCFEKMVYKLLPGANKMLPKVFFSNSRIKEFNPSKELQENYKNETHKKGDTFNINHCHELINFFKESISKHEDWKHFNFNFSDTKSYLDLSGFYREVEQQGYKITFSNIPEDYINQLVNEGKIYLFQIYNKDFSPFSKGTPNLHTMYWKMLFDADNLKNVVYKLNGQAEVFFRRKSIKEDSIITHSSGVAIINKNPDNRKKTSEFKYDLIKDKRFTVDKFQFHVPITMNFKATGGDRINNEVVRYLQNNPDIHIIGIDRGERHLLYLTLINRKGEIVKQYSLNEIVNEYKGITHKVDYHALLDKKEGGRDEARKSWGTIETIKELKEGYLSQVVHIIAKLIVENNAIVVLEDLNMGFMRGRQKVEKQVYQKFERMLIDKLNYLVDKSKSAKELGGVLNALQLTNKFESFQKLGKQSGFLFYVPAWNTSKMDPITGFVNLFSIKYENMEKARSFFSKFSSIHYNSAKQWFEFEFDYDQFTAKAEGTKAKWKIIADNKERYSFNKSINNGKGGQEQYKVAERLEILFGENNITYGGGENIIPQIEKQSSQDFFKSLIKLFNVTLSLRHNNGKKGADEQDYILSPVMNKEGLFFDSRLATDKQPKDADANGAYNIARKGLWVLEQIDKSYDLKTLKLAITNKEWLQFVQK

SEQ ID NO: 707 - protein, 1250 aa, unidentified
  REGION 1..1250: note = Cas Enzyme sequence
MEQFTNLYPVSKTLRFELQPIGKTRENIEKGGLLEQDEQRAKNYLVVKKFIDDYHKQFIKERLWSFELPLSSEGKLDSLEEYQELYSLSKRDASQEAAFTEVKDNLRAIIAKRLTEKGSAFDRIDKKELIREDLLNFLEKEEDKEIVRQFADFTTYFSGFHENRRNMYSSEEKSSAIAYRLVHQNLPKFMENMKAFAKIAETTVADHFADIYAGWEEFLNVSSIEEMFRLDYFSQTLTQPHIEVYNYVIGKKILEDGTEIKGINEYVNLYNQQQKDKKQRLPLLVPLYKQILSDREKLSWLSEEFDSDVVMLSAIKKLYSHLHDYLTGDENESLKTLLKNLTDYDLSQIYISNDLSLSDISQHLFGRFDVFSIGIKENLKAINHQKKKESEEDYEKRISNLFKSHKSFSIAELNRLPQPVQEDGQLRRVEDYFMTLGAVNTESVQKENLFAQIENAYHDAIPILKLTDTGDTISQNKAAVSKIKVLLDTLKDLQHFIKPLLGSGEENNQDELFYGIYRTIWDELDAVTPLYNKVRNWLTRKPYSTEKIKLNFDNAQLLGGWDVNKEPDCTGVLLAKDGFYYLGIMNKKSNRIFDADVTPSEGDCFDKIDYKLLPGANKMLPKVFFSKSRIDEFKPSKTIIENYKKGTHKKGASFNLTSCHQLIDFFKQSISKHEDWSKFNFQFSDTATYDDISSFYREVEQQGYKLTTRPVSSSYINQMVEEGKLYLFRIWNKDFSEYSKGTPNLHTLYWNMLFDERNLDDVVYKLNGQAEVFYRKASIKPENRVVHPANRAIKNKNALNAKQESTFDYDIIKDRRYTVDKFQFHVPITINFKAKGQTNINPIVHETIRKNGFTHIIGIDRGERHLLYLSLIDLKGNIVKQMTLNDIINEYNGQEYVTNYHDLLVKREGERTEARRSWDTIETIKELKEGYLSQVIHIISKMMVEYNAIVVLEDLNTGFMRGRQKIERQVYEKFEKMLIDKLNCYVNKKIDPAAEGGMLYALQLTNKFESFRKLGKQSGCLFYIPAWNTSKIDPVTGFVNLFDTRYETREKARVFFSTFKRIIYNKEKDWFEFSFDYNDFTTKAEGTRTQWTLCTYGTRIRNFRNPQRNSQWDDEEVVLTEQFKTLFEKYDIDINGNLKEAINGQTDAKFFQEIMGLMKLLLQMRNSKTNSEVDYLLFPVADESGHFFDSRTSGVNLPDNADANGAYNIARKGLWAIRKIQDTPSDDKISLVLTNKEWLIFAQTKPYLDD

SEQ ID NO: 708 - protein, 1250 aa, unidentified
  REGION 1..1250: note = Cas Enzyme sequence
MKYNHFTNLFSQSITLRFGLVPQGKTLQHIQENGLLEQDAQRAVDYVEVKKMIDEYHKLFIDRVLKDFKLKVDSDGKKNSLEEYFLYYNIGKKTDSQKAEYEKVKTNLRKAIANQLTKDKYFKNLNKEKLLTEDLYNTNLMRELSPNEKLLVEGFHNFTTYFEGLNKARQNMYSTENKSTAIPYRLIHDNLPKFIDNIKTFDIVAASPIANDFDKLYADMSQYLNVKDIREMFTLDYYNTLLTQPQISVYNAIIGGKALEDGTKIQGLNERINLYNQKHKDGKLPKFKFLFKQILSDREVLSWLPEAFEKDNEVLQTIESCYQDLTEMVLGDRNLKNLLVNIGSYDLHSIYLANDVQLTNISQRLFKDWNAINRAVMADLKATVKPTKKETESDYLDRLDKLAKKVDSFSIGYLNDCIDKSDLPVKTHVETYFAGLGAVDDEENQRANLFARIAIYHSDVESLLTTEYPEDANLAQDNGAVEKIKTLMDALKELQHFIKPLLGNGDEPDKDENFYGELDSLWQDLDQVTPLYNKVRNYMTRKPYSTEKIKLNFESPTLMAGWDLNKEEANHTVILRKNGLYYLGIMNKTSNKAFNVANLSTGGDCYEKMEYKSLKSRDISHKFFAAKHKNRYAPSDKIKAIKERGSYQKATKDNFSLSDCHAYIDFFKSSLKITDEWSMYNFNFSDTSSYGDIKDFYNELEEQTYKLTFRNVSVDYVDKLVEEGKLYLFQIYNKDFSPFSKGKPNLHTLYWQMLFDERNLADAVYKLNGKAEVFFRKASLQKTHPEHPAHQPIANKNPNNPKKASLFEYDLIKDKRYTVDKFQFHVPITMNYKATGSNVINAQVYDYLKQTEDTYVIGLDRGERHLLYLSLIDPAGRIVKQFSLNEMVNEYKDVVRKTNYHTLLDARESERQKARQSWMTIQNIKELKEGYLSQVVHIISRLMVEYKAIVVLEDLNMGFKRGRQKVEKQVYQKFEKMLIDKLNYLVDKDLPADEDGGLLHAYQLANKFKSFKKLGKQSGFLFYVPAWNTSKMDPTTGFVNLLDTHYETIAKSRVFFNKFKSIRYNAQAGWFEWKFDYNDFDKRAEGTRTDWTLCTYGERIVTFRNKDKNSEWDNKKVNLTEEFKKFFAENGIDIEGNLKEQIAERADKSFFEGLYSLLKLTLQMRNSITGTEEDYLISPVMNARGEFFDSRKSGQGLPENADANGAYNIALKGLWVLQQIRQSKDQKDVKLAISNKEWLQFAQQKPYLKD

SEQ ID NO: 709 - protein, 1250 aa, unidentified
  REGION 1..1250: note = Cas Enzyme sequence
MKYNHFTNLFSQSITLRFGLVPQGKTLQHIQENGLLEQDAHRAESYIKMKKLIDEYHKRFIDRSLSDFKLNMEDKGKKDSLTEYFTYYQIGKKDDRQKADYEKIQSNLRTAIAKRLTGDEAYKRIDKKELIQEDLFNTEWMRKLSEDETALVEEFRKFTTYFGGYNENRRNMYTAEERSTAIAYRLVNDNLPKFVDNIKTFDIVAASPIANDFDKLYADMSQYLNVKDIREMFTLDYYNTLLTQPQISVYNAIIGGKALEDGTKIQGLNERINLYNQKHKDGKLPKFKFLFKQILSDREVLSWLPEAFEKDNEVLQTIESCYQDLTEMVLGDRNLKNLLVNIGSYDLHSIYLANDVQLTNISQRLFKDWNAINRAVMADLKATVKPTKKETESDYLDRLDKLAKKVDSFSIGYLNDCIDKSDLPVKTHVETYFAGLGAVDDEENQRANLFARIAIYHSDVESLLTTEYPADANLAQDNGAVEKIKTLMDALKELQHFIKPLLGNGDEPDKDENFYGELDSLWQDLDQVTPLYNKVRNYMTRKPYSTEKIKLNFENATLLNGWDLNKEPDNTSIILRKGGLYYLAIMDKKHNKVFESEKLPASGECYEKMDYKLLPGANKMLPKVFFSKSRIDEFNPSNTLMAHYAAGTHKKGENFSKADCHELIDFFKASIQKHEDWRNFDFHFSDTSTYEDLSGFYREVEQQGYKLTFRNVSVDYVDKLVEEGKLYLFQIYNKDFSPFSKGKPNLHTLYWQMLFDERNLADVVYKLNGQAEVFFRKASLQKTHPEHPAHQPIANKNPNNPKKTSLFEYDLIKDKRYTVDKFQFHVPITMNFKATGSNVINAQVYDYLKQTEDTYVIGLDRGERHLLYLSLIDPAGRIVKQFSLNEMVNEYKDVVRKTNYHTLLDTRESERQKARQSWMTIQNIKELKEGYLSQVVHIISRLMVEYKAIVVLEDLNMGFKRGRQKVEKQVYQKFEKMLIDKLNYLVDKDLPADEDGGLLHAYQLTNKFDSFQRMGKQSGFLFYVPAWNTSKMDPTTGFVNLLDTHYETIAKSRVFFNKFKSIRYNAQAGWFEWKFDYNDFDKRAEGTRTDWTLCTYGERIVTFRNKDKNSEWDNKKVNLTEEFKKFFAENGIDIEGNLKEQIAERADKSFFEGLYSLLKLTLQMRNSITGTEEDYLISPVMNARGEFFDSRKSGQGLPENADANGAYNIALKGLWVLQQIRQSKDQKDVKLAISNKEWLQFAQQKPYLKD

SEQ ID NO: 710 - protein, 1250 aa, unidentified
  REGION 1..1250: note = Cas Enzyme sequence
MKYNHFTNLFSQSITLRFGLVPQGKTLQHIQENGLLEQDAHRAESYIKMKKLIDEYHKRFIDRSLSDFKLNMEDKGKKDSLTEYFTYYQIGKKDDRQKADYEKIQSNLRTAIAKRLTGDEAYKRIDKKELIQEDLFNTEWMRKLSEDETALVEEFRKFTTYFGGYNENRRNMYTAEERSTAIAYRLVNDNLPKFVDNIKTFDIVAASPIANDFDKLYADMSQYLNVKDIREMFTLDYYNTLLTQPQISVYNAIIGGKALEDGTKIQGLNERINLYNQKHKDSKLPKFKFLFKQILSDREVLSWLPEAFEKDNEVLQTIESCYQDLTEMVLGDRNLKNLLVNIGSYDLHSIYLANDVQLTNISQRLFKDWNAINRAVMADLKATVKPTKKETESDYLDRLDKLAKKVDSFSIGYLNDCIDKSDLPVKTHVETYFAGLGAVDDEENQRANLFARIAIYHSDVESLLTTEYPEDANLAQDNGAVEKIKTLMDALKELQHFIKPLLGNGDEPDKDENFYGELDSLWQDLDQVTPLYNKVRNYMTRKPYSTEKIKLNFENATLLNGWDLNKEPDNTSIILRKGGLYYLAIMDKKHNKVFESEKLPASGECYEKMDYKLLPGANKMLPKVFFSKSRIDEFNPSNTLMAHYAAGTHKKGENFSKADCHELIDFFKASIQKHEDWRNFDFHFSDTSTYEDLSGFYREVEQQGYKLTFRNVSVDYVDKLVEEGKLYLFQIYNKDFSPFSKGKPNLHTLYWQMLFDERNLADVVYKLNGQAEVFFRKASLQKTHPEHPAHQPIANKNPNNPKKTSLFEYDLIKDKRYTVDKFQFHVPITMNFKATGSNVINAQVYDYLKQTEDTYVIGLDRGERHLLYLSLIDPAGRIVKQFSLNEMVNEYKDVVRKTNYHTLLDARESERQKARQSWMTIQNIKELKEGYLSQVVHIISRLMVEYKAIVVLEDLNMGFKRGRQKVEKQVYQKFEKMLIDKLNYLVDKDLPADEDGGLLHAYQLTNKFDSFQRMGKQSGFLFYVPAWNTSKMDPTTGFVNLLDTHYETIAKSRVFFNKFKSIRYNAQAGWFEWKFDYNDFDKRAEGTRTDWTLCTYGERIVTFRNKDKNSEWDNKKVNLTEEFKKFFAENGIDIEGNLKEQIAERADKSFFEGLYSLLKLTLQMRNSITGTEEDYLISPVMNDRGEFFDSRKSGQGLPENADANGAYNIALKGLWVLQQIRQSKDQKDVKLAISNKEWLQFAQQKPYLKD

SEQ ID NO: 711 - protein, 1250 aa, unidentified
  REGION 1..1250: note = Cas Enzyme sequence
MKRLTNLYPVSKTLRFELQPIGRTKENIENGGILQRDEKRAEDYEVVKTFIDDYHKQFIKERLWNFQLPIANEGRLNSLEEYQELYEHSKRNETQEKAFTEVKNNLRSIIAKRLTEKGSAYERIFKKELIREDLIEFLEDEKDKAIVRQFADFTTYFTGFYENRRNMYSDEEKSTAIAYRLIHQNLPKFMDNMKSFAKIAQTSVAEHFVDIYSQWEEHLNVEKLEDIFHLDYFSETLTQPHIEVYNYIIGKRILEDGTEIKGINEYVNLYNQQLKDKSKRLPLLVPLYKQILSDREKLSWVAKEFDSDKEMLTAINEAYTRLYDFLMGTENESLRSLLTHLKDFDLTRINIANDLSLTDISQHLFGQYDVFTKGIKEELRRITPRKKKENDEDLDERISKIFKTQKSFSIDFLNHLPQPAMDDGQPRKIEDYFMSLGAVNTETMQKENLFAQIENAYEAVRPILQADVAGDTILQNKSAVAKIKTLLDAFKDLQHFIKPLLGSGEENEKDELFYGAFQMMWDELDTITPLYNKVRNWLTRKPYSIEKIKLNFDNAQLLGGWDVNKEPDCTGILLRKDGYYFLGIMNKKSNHIFDSDATPSDGDCYDKIDYKLLPGANKMLPKVFFSKSRIDEFAPSEAIVNSYKRGTHKKGPDFSESDCHRLIDFFKASIKKHEDWSKFGFHFSETQTYEDISGFYREVEQQGYRLTSHRVSADYINKMVEEGKLFLFRIWNKDFSEFSKGTPNLHTLYWRMLFDERNLADVVYKLNGQAEVFYRKSSIKDENRIIHPARHAIDNKNALNKKQTSTFGYDIIKDRRYTVDKFQFHVPITINFKATGRDNINPIVLEMIRRGEFTHIIGIDRGERHLLYLSLIDLKGNIVKQMTLNEIINEYNGQKYKTNYHDLLVKREGERTTARRSWDTIESIKELKEGYLSQVVHIISKLMVDYNAIVVLEDLNMGFMRGRQKIERQVYEKFEKMLIDKLNCYIDKQADPQSVGGLLHPIQLASKFESFHKLGKQCGCLFYIPAWNTSKIDPVTGFVNLLDTRYETREKARLFFSLFRRITFNHDKNWFEFTFDYNDFTTKAEGTRTQWTLCSYGTRIRNFRNPLKNNQWDDMEIVLTEEFKKLFSEYGININGNLKEAINAQNDAQFFKNLMGLMKLLLQMRNSKTSSEVDYLLSPVADEQGHFFDSREGIENLPNNADANGAFNIARKGLWAIRKIQETPEDEKPSLAITNKEWLKFAQTKPYLNE

SEQ ID NO: 712 - protein, 1250 aa, unidentified
  REGION 1..1250: note = Cas Enzyme sequence
MKQLTNLYPVSKTLRFELLPIGRTKENIERSGILQRDEQRAEDYKKVKEFIDEYHKQFIKERLWTFKLPLENEGNHNSLEEYQALYELPKRTEAQETEFTEIKDNLRSIIVKRLTEKGSAYERIFKKELIREDLIDFLENKEDKDIVRQFADFTTYFTGFHENRANMYSPEEKSTAIAYRLIHQNLPKFMDNIKSFAKIAQTSIAEHFVDIFEGWKEYLNVEKLEDIFRLDYFSETLTQPHIEVYNYIIGKKVLEDGTEIKGINEYVNLYNQQQKDKSQRLPLLVPLYKQILSDREKLSWLSEEFDSDEKMLIAINESYNHLHDLLMGDENESLRTLLSHLKDFDLTQINITNDLSLSDISQHLFAQYDVFTKGVKDELRLVTPRKKNETDEAFEDRISKIFKTQKSFSINVLDNLPQPAMEDGKLRTIEDYFMSLGAVNTETKQKENLFAQIENAYEDARSILQLRDTNDKLSQDKAAVTKVKALLDAFKDLQHFIKPLLGSGEENEKDELFYGVFQLIWDELDTVTPLYNKVRNWLTRKPYSTEKIKLNFDNAQLLGGWDVNKEPDCTGVLLMKNGFYFLGIMNKKANRIFDVDVTPSDGDCYDKIDYKLLPGANKMLPKVFFSKSRIDEFAPSDAIVHSYKKGTHKKGANFSLTDCHRLIDFFKESISKHEDWSKFGFHFSDTQTYEDISGFYREVEQQGYMLSSHPVSVAYINQMVDEGKLFLFRIWNKDFSEYSKGTPNLHTLYWRMLFDESNLADVVYKLNGQAEVFYRKASIKEENRIVHPAHRPIVNKNALNEKRTSTFEYDLIKDRRYTVDKFQFHVPITINFKATGQTNINPVVQETIRRGGFTHVIGIDRGERHLLYLSLIDLQGHIIKQMTLNEIINEYNGRKYQTNYHDLLVKREGERTTARRSWDTIENIKELKEGYLSQVIHIISKMMVEYNAIVVLEDLNMGFMRGRQKIERQVYEKFEKMLIDKLNCYIDKQADPQSEGGLLHPIQLANKFESFRKLGKQSGCLFYIPAWNTSKIDPVTGFTNLFDTRYETREKARSFISHFIRISYNTNKDWFEFSFDYNDFTTKAEGTRTRWTLCTYGTRIRTFRNPLQNNQWDDEEIVLTDEFKQLFEKYNIDIHGNLKEAINAQTDAQFFKDLMGLMKLLLQMRNSKTNSEVDYLLSPVADEQGHFFDSREGIMNLPDNADANGAYNIARKGLWVIRKIQETPEGEKLSLAITNKEWLEFAQTKPYLND

SEQ ID NO: 713 - protein, 1250 aa, unidentified
  REGION 1..1250: note = Cas Enzyme sequence
MKQFTNLYPVSKTLRFELQPIGKTRDNIEKGKLLEQDEQRAKNYLIVKKFIDDYHKQFIKERLWGFELPITSEGKLDSLEEYQELYSLSKRDVSQEAAFTEVKDNLRAIIAKRLTEKGSAFDRIDKKELIREDLINFLEKENDKEIVRQFADFTTYFSGFHENRRNMYSSEEKSTTIAYRLIHQNLPKFMENMKAFAKIAETSVADHFADIYAGWEEFLNVSSVEEMFRLDYFSQTLCQPHIEIYNYIIGKKVLEDGTEIKGINEYVNLYNQQQKDKKRRLPLLVPLYKQILSDREKLSWLSKEFDSDAVMLSAINELYSHLHNLLMGDENESLKTLLINLKDYDLTQIHIRNDLSLTDISQHLFGRYDVFTIGIKENLKAIHPKKKKESEEDYEKGISNIFKSHKSFSIADLNRLPQPVQENGQLQRIEDYFMSLGAVNTESVQKENLFARIENAYHDALPILRLTDTGDTLSQKKASVSKIKALLDALKDLQHFIKPLLGSGEEMDQDELFYGGFRAIWDELDAITPLYNRVRNWLTRKAYSTEKIKLNFGNAQLLGGWDVNKEPDCTGILLAKDGFYYLGIMNKKANRIFDADMTPSEGDCFDKIDYKLLPGANKMLPKVFFSKSHIDEFKPSKMIVENYKKGTHKKGASFSLTSCHQLIDFFKQSISKHEDWSKFNFHFSDTKTYEDISGFYREVEQQGYKLTTRPVSSSYIYQMVDEGNLYLFRIWNKDFSQFSKGTPNLHTLYWKMLFDERNLADVVYKLNGQAEVFYRKASIKPENRVVHPANRAIKNKNALNAKQESIFGYDIIKDRRYTVDKFQFHVPITINFKAIGQTNINPIVHETIRKYGFTHIIGIDRGERHLLYLSLIDLKGIIVKQMTLNDIINEYNGQKYVTNYHDLLAKREGERTDARRSWDTIETIKELKEGYLSQVVHVISNMMVEYNAIVVLEDLNPGFMRGRQKIERQVYEKFEKMLIDKLNCYINKKSDPTEEGGMLHALQLTNKFESFRKLGKQSGCLFYIPAWNTSKIDPVTGFVNLLDTHYETREKARVFFSTFKRISYNKEYDWFEFLFDYNDFTTKAEGTRTQWTLCTYGTRIRNFRNPQKNNQWDDEEVVLTEQFKTLFNRYDINIYGNLKESIHGQTDAKFYKELMGLMKLLLQMRNSKTNSEVDYLLSPIADESGHFFDSRTSGSNLPENADANGAYNIARKGLWAIRKIQETPESEKISLAISNKEWLTFAQTKPYLND

SEQ ID NO: 714 - protein, 1250 aa, unidentified
  REGION 1..1250: note = Cas Enzyme sequence
MKYSDFSNIYSQSITLRFGLIPQGETLQHIQENGLLEQDARRAEDYVKVKKLIDEYHKAFIERVLKGFKLKVNEDGGKDSLEEYFLYYNIGKKDDKQKATFEKVQENLRKSIADRLAKDTNFSRINKKELIKEDLLNTDLMRQLTEEEQALVKEFSDFTTYFTGFNQNRQNMYSAEKKSTAISYRLIHENLPKFIDNMKTFDIVANSEVAVQFDNLYQKMETYLNVEKLSEMFCLSYFNVVLTQTQIEVYNAIIGGKSLDDGSRIQGLNELVNLYNQKHKDAKLPKFKLLYKQILSDREAVSWLPEKFEKDNELLASIQKVYQELSGIIWGDSNLKNLLLNIASYDLNRIYISNDTQFTQISQRLFKDWGALHRVILEDLKSTVARGKKESESDYLDRLDKLVKKSESYSIGYLNQCIDKSELSDKPHVETYFTSLGAVHEETEQCANLFTQISIYYMEAQKLLTQEFPTQSNLVQDKQAVDKIKNLLDALKSLQHFVKPLLGNGDEPDKEERFYGELDSLWQEMEQITPLYNKVRNYLTRKPYSVEKIKLNFENSTLMDGWDLNKEPDNTTVILRKGGLYYLAIMNKAYNRVFKADILPDNGECFEKMEYKLLPGANKMLPKVFFSKSRIKEFAPSEKLLQHYADGTHKKGSNFSKADCHELIDFFKASIQKHEDWSKFNFQFSDTSTYEDLSGFYREVEQQGFKISFCSVSVSYVKKLVKEGKIYLFQIYSKDFSPSSKGKPNLHTLYWRMLFDERNLKDVVYKLNGQAEVFFRQASLTNNLTVHPAHQPIANKNPNNPKKTSTFEYDLIKNRRYTVDHFQFHVPITMNFKATGNSMINPQVYQYLKETKDTYVIGIDRGERHLLYLTLIDPQGRIVKQCSLNEMVNEYQNVVRKTNYHDLLDAREAERKQARQSWMTIENIKELKEGYLSQVVYMISQMMVKYKAIVVMEDLNMGFKRGRQKVEKQVYQKFEKMLIDKLNYLVDKDTDAETAGGLLHAYQLTNKFESFQRMGKQSGFLFYVPAWNTSKMDPTTGFVNLLDTRYESVASSLSFFRRFKQIRYNEDKDWFEFKLDYNDFDKRAEGTRTEWTLCTQGERIITFRNKAKNSEWDNKSVRLTEEFKKFFYQYDVDIHGNLMDTILERTDKSFFEGLYSLLKLTLQMRNSITGTDVDYLISPVMNAEGTFYDSRQSGSQLPENADANGAYNIALKGLWVLKQIRESKELKEVKLAITNKEWLQFAQEKPFLKD

SEQ ID NO: 715 - protein, 1250 aa, unidentified
  REGION 1..1250: note = Cas Enzyme sequence
MQYSDFSNIYSQSITLRFGLIPQGETLQHIQENGLLEQDARRAEDYVKVKKLIDEYHKTFIERVLKGFKLKVDEDGGKDSLEEYFLYYNKGKKEDKQIATFEKVQENLRKSIADRLAKDTNFSRINKKELIKEDLLNTDLMRQLTEEEQALVKEFSDFTTYFTGFNQNRQNMYSAEKKSTAISYRLIHENLPKFIDNMKTFDIVANSEVAVQFDNLYQKMETYLNVEKLSEMFCLSYFNVVLTQTQIEVYNAIIGGKSLDDGSRIQGLNELVNLYNQKHKDAKLPKFKLLYKQILSDREAVSWLPEKFEKDNELLSSIQKAYQELSGIILGDSNLKNLLLNIASYDLNRIYISNDTQFTQISQRLFKDWGALHRVILEDLKSTVARGKKESESDYLDRLDKLVKKSESYSIGYLNQCIDKSELPDKPHVETYFTSLGAVHEETEQCANLFTQISIYYMEAQKLLTQEYPTQSNLAQDKQAVDKIKNLLDALKSLQHFVKPLLGNGDEPDKEERFYGELDSLWQEMEQITPLYNKVRNYLTRKPYSTGKIKLNFENSTLMDGWDLNKEPDNTTVILRKDGLYYLAIMNKAYNRVFKADILPDNGECFEKMEYKLLPGANKMLPKVFFSKSRIKEFAPSEKLLQHYADGTHKKGPNFSKADCHELIDFFKASIQKHEDWSKFNFQFSDTSTYEDLSGFYREVEQQGFKISFRSVSVSYVKKLVEEGKIYLFQIYNKDFSPSSKGKPNLHTLYWRMVFDERNLKDVVYKLNGQAEVFFRQASLTNDLTVHPAHQPIANKNPNNPKKTSTFEYDLIKNRRYTVDHFQFHVPITMNFKATGNSMINPQVYQYLKETKDTYVIGIDRGERHLLYLTLIDPQGRIVKQCSLNEMVNEYQNVVRKTNYHDLLDAREAERKQARQSWMTIENIKELKEGYLSQVVHLISQMMVKYKAIVVMEDLNMGFKRGRQKVEKQVYQKFEKMLIDKLNYLVDKDTDAEAAGGLLHAYQLTNKFESFQRMGKQSGFLFYVPAWNTSKMDPTTGFVNLLDTRYESVASSLSFFRRFKQIRYNEDKDWFEFKLDYNDFDKRAEGTRTEWMLCTQGERIITFRNKAKNSEWDSKSVRLTEEFKKFFYQYDVDIHGNLMDTILERTDKSFFEGLYALLKLTLQMRNSITGTDVDYLISPVMNAKGTFYDSRQSGSQLPENADANGAYNIALKGLWVLKQIWESKELKEVKLAITNKEWLQFAQEKPFLKY

SEQ ID NO: 716 - protein, 1250 aa, unidentified
  REGION 1..1250: note = Cas Enzyme sequence
MKQFTNLYPVSKTLRFELQPIGKTRDNIEKGGLLKQDEQRAKNYLVVKKFIDDYHKQFIKERLWSFELPLTNEGRLDSLEEYQEFYSMSKRDVAQEAAFTEVKDNLRAIIAKRLTERGSAFDRIDKKELIREDLLHFLEKEEDKEIVRQFADFTTYFSGFHENRRNMYSSEEKSTAIAYRLIHQNLPKFMENMKAFAKIAETSVADHFADIYAGWEEFLNVSNIGEMFRLDYFSQTLTQPHIEVYNYIIGKKVLEDGTEIKGINEYVNLYNQQQKDKKQRLPLLVPLYKQILSDREKLSWLSEEFKSDADMLSAINEFYSNLHDLLMGDEYESLKTLLKHLDNYNLSQIHISNDLSLTDIAQHLFGRYDVFTFGIKENLKAIHPQKKKESEEDYEKRISNLFKSHKSFSVAELNKLPQPVQKDGQLLKVEDYFMALGAVNTESVQKENLFAQIENAYHGALPILRLKDSEDTLSQNEVAVAKIKALLDTMKDLQHFIKPLLGSGEENDKDDLFYGVFLTIWDELNAVTPLYNKVRNWLTRKPYSTEKIKLNFDNAQLLGGWDVNKEPDCTGVLLVKDGFYYLGIMNKKANRIFDADVTPSYGDCFEKIDYKLLPGANKMLPKVFFSKSRIDEFKPSKTIVENYKKGTHKKGASFSLSSCHQLIDFFKQSISKHEDWNKFNFHFSDTSAYDDISAFYREVEQQGYKLTTRPVSASYISQMIDEGKLYLFRIWNKDFSEFSKGTPNLHTLYWKMLFDKRNLADVVYKLNGQAEVFFRKASIKPENRITHLANKAIKNKNTLNAKQESTFDYDIIKDRRYTVDKFQFHVPITINFKAAGQTNINPIVHETIRKNGFKHIIGIDRGERHLLYLSLIDLKGNIIRQMTLNDIINEYKGQKYVTNYHDLLVTREGQRTDARKSWDTIETIKELKEGYLSQVIHIISKMMVEYNAIVVLEDLNMGFMRGRQKIERQVYEKFEKMLIDKLNCYINKQIDPNEEGGMLHALQLTNKFESFRKLGKQSGCLFYIPAWNTSKIDPVTGFVNLFDTRYETREKARVFFSTFKRIIFNKEKDWFEFSFDYNDFTTKAEGTRTQWTLCTFGTRIRNYRNPQKNSQWDDEEVMLTQQFKTLFEKYDIDIYGNLKEAINGQTDAKFYQELMGLMKLLLQMRNSKTNSEVDYLLSPVADETGNFFDSRTPEAKLPNNADANGAFNIARKGLWAIRKIQNTPSDEKISLAITNKEWLEFAQTKPYLED

SEQ ID NO: 717 - protein, 1250 aa, unidentified
  REGION 1..1250: note = Cas Enzyme sequence
MKQFTNLYPVSKTLRFELQPIGKTRDNIEKGGLLKQDEQRAKNYLVVKKFIDDYHKQFIKERLWSFELPLTNEGRLDSLEEYQEFYSMSKRDVAQEAAFTEVKDNLRAIIAKRLTERGSAFDRIDKKELIREDLLHFLEKEEDKEIVRQFADFTTYFSGFHENRRNMYSSEEKSTAIAYRLIHQNLPKFMENMKAFAKIAETSVADHFADIYAGWEEFLNVSNIGEMFRLDYFSQTLTQPHIEVYNYIIGKKVLEDGTEIKGINEYVNLYNQQQKDKKQRLPLLVPLYKQILSDREKLSWLSEEFKSDADMLSAINEFYSNLHDLLMGDEYESLKTLLKHLDNYNLSQIHISNDLSLTDIAQHLFGRYDVFTFGIKENLKAIHPQKKKESEEDYEKRISNLFKSHKSFSVAELNKLPQPVQKDGQLLRVEDYFMALGAVNTESVQKENLFAQIENAYHGALPILRLKDSEDTLSQNEVAVAKIKALLDTMKDLQHFIKPLLGSGEENDKDDLFYGVFLTIWDELNAVTPLYNKVRNWLTRKPYSTEKIKLNFDNAQLLGGWDVNKEPDCTGVLLVKDGFYYLGIMNKKANRIFDADVTPSYGDCFEKIDYKLLPGANKMLPKVFFSKSRIDEFKPSKTIVENYKKGTHKKGASFSLSSCHQLIDFFKQSISKHEDWNKFNFHFSDTSAYDDISAFYREVEQQGYKLTTRPVSASYISQMIDEGKLYLFRIWNKDFSEFSKGTPNLHTLYWKMLFDKRNLADVVYKLNGQAEVFFRKASIKPENRITHLANKAIKNKNTLNAKQESTFDYDIIKDRRYTVDKFQFHVPITINFKAAGQTNINPIVHETIRKNGFKHIIGLDRGERHLLYLSLIDLKGNIIRQMTLNDIINEYKGQKYVTNYHDLLVTREGQRTDARKSWDTIETIKELKEGYLSQVIHIISKMMVEYNAIVVLEDLNMGFMRGRQKIERQVYEKFEKMLIDKLNCYINKQIDPNEEGGMLHALQLTNKFESFRKLGKQSGCLFYIPAWNTSKIDPVTGFVNLFDTRYETREKARVFFSTFKRIIFNKEKDWFEFSFDYNDFTTKAEGTRTQWTLCTFGTRIRNYRNPQKNSLWDDEEVMLTQQFKTLFEKYDIDIYGNLKEAINGQTDAKFYQELMGLMKLLLQMRNSKTNSEVDYLLSPVADETGNFFDSRTPGAKLPNNADANGAFNIARKGLWAIRKIQNTPSDEKISLAITNKEWLEFAQTKPYLED

SEQ ID NO: 718 - protein, 1251 aa, unidentified
  REGION 1..1251: note = Cas Enzyme sequence
MSAQSALSTLINKYSLSKTLRFELIPIGKTKESIDRKGLLSQDVKRAQSYKEVKKIIDEYHKEFIEKSLINAKLKGLEEFSKLYYKLQKEDKDKKNIKKMQDNLREQISDLFKNNKKDKWNILFKEDLIKKELPLFAKDDKQKNLINEFNKFTTYFTGFHKNRKNMYAEEEKSTSIPYRIIHQNLPKFLDNIRIFEKIKKNKINTDVIEKELSLFLNGIKINDIFSINFFNDVLNQKGITFYNTILGGVSEKDRTKIKGINEYVNTEYNQKQLDKKSKIPKLKQLYKQILSDTETASFVLEQFENDNQLLEKIEQFYNTELINYETEGKTQSVFLQFEQLFKNMQNYDASKIYISNLSIANISKIIFGDWSIICNALAEWYDKHNTKGKKINEYKKENFLKQDFSIQQIEDAVLEYKNDTLNKEINFLLNYFASFLNEKSKKNIIQRIETEYSKVKDLLNTDYPEKKKLASDKDNVSKIKAFLDSLMDFLHFVKPFNIKKDTGLEKEENFYSIYVPLFEQIDKIIPLYNKVRNYLTKKPYSTEKIKLNFENSTLLDGWDLNKESDNTSVVLRKDDLYYLGIMDKKHNRIFKELPSQNGNESSYEKMIYKLLPGPNKMLPKVFFSKKGKKQFKPSKKLLKKYEDGTHLKGDNFNINDCHNLIDFFKESIAEHEDWKQFDFKFSSTSSYKDLSNFYKEVEKQGYKITFQNISENYINQLIDEGKLYLFQIYNKDFSKYSKGTPNLHTLYWKMLFDNDNLKNIVYKLNGKAEVFYRKSSLILGDNIVHKAGEAIINKNPDNEKKHSTFDYDLIKDKRFTLDKFQFHVPITLNFKSEGRQNLNEDVRKFLKNNPDINIIGIDRGERHLLYLTLINQKGKILFQKSLNEITNEYNNKNGKSQIKSTNYHSLLDKKEKKRDEARKNWGIIENIKELKEGYMSQIVHYISKLMIEKNAILSLEDLNFGFKRGRQKVEKQVYQKFEKMMIDKLNYLVFKDKKANETGGLLNALQLTNKFESFAKLYNQSGFIFYVPAWNTSKIDPITGFVNLLKPYYENLNKSQEFFKKFNNIKYNPKQEYFEFNFDYKNFTNKAEGSKNVWEICTTNNERFMWDKTLNSGKGAQKAVDVTQELKKLFDSSKINYLNGNDIKEDIINQNSADFFRKLMKLLSVVLSLRHNNGLKGKDEKDFILSPVEPFFNSLNAKMEEPKDADANGAYNIALKGLLILKQINESEDLRKIKFNLSNKEWLKFAQSKSF

SEQ ID NO: 719 - protein, 1251 aa, unidentified
  REGION 1..1251: note = Cas Enzyme sequence
MKDLKQFIGIYPVSKTLRFELKPIGKTLDWIRERNVVEKDERKSQDYPIVKQHIDEYHKVCISESLKNVCFDWKPLKEAIEEHHKLKSDESKKQLETEQTNMRKQIVLAIKRFKHYPELTAATPKDLIQNVLPEITNDSSLNSFNRFASYFKGFQENRKNIYSLDAISTGVPFRLVHDNFPKFLSNIDIYENIKSTAPETLDLAAKELQPFLEGVMLDDIFSLDFYNSLLTQDGIDFFNRVIGGVSEEGKQKFRGINEFTNLYRQQHPELSANKKAMTMIPLFKQILSERETLSYIPKQIENENELTETIKQFYSHITNFERNGKTINILNELVRLLGQVTSYNQDRIFVSSKYITDISQKLYGRWNAINDYLYERAVEMFGDVSVAKNKKLVDNYIDKDVYSASELGFDENNNLSTFYSELPQIVGSVNGNWIQFCEWCKIDRKQKFLNNAEGTEIIKKLLDAIMEVMHKCNVLVVSEEYDLDKDFYNNFFPLFTELENIVFVYNRVRNFLTKKPSDVKKFKLNFGVPTLCDGWDLNKEKDNKAILLFKDNRSYLGIMNPEDYPKIKESNDSGDGYFSKMVYKLLPGPNKMLPKVFFSKKGRETFSPSDRIIDIYESGAFKKGSSNFSIVCLHELIDFYKDAINRHEDWSKYNFKFSPTDSYKDIGAFYNEISKQAYKIRFTNISEQEINQLVDKGQLYLFQLYNKDYASGAHGRKNLHTLYWENLFKEENLNNLVLKLNGQAELFYRPQSINEPVAHKVGSIMLNRRDKSGMPIPETVYRSLYLYFNGKKKEEELDSVEKSYIDNVIVKKVTHEIVKDKRFTKPEFFFHVPITFNSNADGNEFINENVIEYITDNPDVNIIGIDRGERHLIYLTLINQQGEILKQKTFNTVGTYNYHAKLEQREQERQEARKSWQSIGKIKDLKEGFLSAVIHEIALMMAEYNAIVVLEDLNFGFKRGRFKVERQVYQKFEKMLIDKLNYLAFKDRKSDETGGILRGYQFAQKFVSFQRLGKQSGFLFYVPAAYTSKIDPVTGFVNHFNFNDITNAEKRKQFFCKMERIEMKNDNIEFEFDYRKFKTYQTDFQNVWTASTFGKRIVMKTDESGRKQMADYYPTNEILAAFKKYGYELTNGTDIKSLLQDIEADQKSASLFSNLFYAFQKTLQMRNSNHATEEDYILSPIAKHGYHFCSTEEANKGKDEFGNWLSKLPVDADANGAYHIALKGLYLLKNPQTKKIEHEKWFKFMVEKPYK

SEQ ID NO: 720 - protein, 1251 aa, unidentified
  REGION 1..1251: note = Cas Enzyme sequence
MRELKRFIGIYPVSKTLRFELRPVGKTLEWIEKNKVLESDEQKAEDYPKVKTLIDEYHKVCIRESLKGAHFDWMPLRSALEKYQKSKSDEDKAILEKEQTLMRKQVAAAIKEFQHYKELTAPTPQKLIDSVFPDIYESDALKSFYRFSVYFRGFQENRNNIYSAEAISTGVPYRLVHDNFPKFLADIEVFGDIKANCPEVIEQAADELQPFLEGIMIDDIFTIDFYNSLLTQDGIDFFNQVLGGVAEEGKQKYRGINEFSNLYRQQHPELTAKKKALTMIPLFKQILSDRDTLSYIPQQIESEQQLIELLNQFYSHITAFDYNGMIVDVLKELTKLTGNINNYNPDGIYLSAKSLTDVSQKLFSKWSIITERLSEEAIKRFGDVSITKNKKKIDAYLSKDAYALSEIPLDNEHSLSMFFAELPKNIENVGSNWLQFMEWCKGESKQLFLNNADGTEIVKNFLDSIMEILHKCSVLVVSVEHDLDKDFYNDFLPLYAELENAVMVYNRVRNFLTKKPSDTKKFKLNFGVPSLGDGWDQNKERDNKAIILFKDGKSYLGIMNAKDMPIIKERDENTPSSYKKMIYKLLADPAKDFPHTFFSKKGIDTYHPSRYILDGREQGKYKKGETFDKKFMRDFIDFYKDAVAKHPIWSKFNFVYSPTESYEDIGAFFNEVSKQAYKIRFSYIEESQINEWINNGQLYLFQLYNKDYAEGAHGRKNLHTLYWESLFSPENLSNIVLKLNGQAELFYRPQSIKQPVSHKTGSKMLNRRDKSGMPIPEAIYRSLYQYFNGRKAESELTLVEKSYIDQVVIKDVTHEIVKDRRYTKPEFFFHVPITFNVNADGNEYINDQVMEYLKDNPDVNIIGIDRGERHLIYLTLINQRGEILKQKTFNMVGNYNYHAKLEQREQERDQARKSWQSIGKIKELKEGFLSAVIHEIAMMMIENNAIVVLEDLNFGFKRGRFKVERQVYQKFEKMLIDKLNYLSFKDRKPDEAGGILRGYQLAQQFTSFQRLGKQSGFLFYIPAAYTSKIDPVTGFVNHFNFNDITNAEKRKAFFMEMERIEMRNGDIEFEFDYRKYKTYQTDYQNVWTVNSSGKRIVMRIDENGRKQMTDYYPTQEIVRAFKEIGIQLNEGTNIKALLADIDASPKNASLFGALFYAFQKTLQMRNSNSTTEEDYILSPVAKNGIQFNTNDEANKGSDANGNWVSRLPVDADANGAYHIALKGLYLLMNPQTKKIENEKWLQFMVQKPYKD

SEQ ID NO: 721 - protein, 1251 aa, unidentified
  REGION 1..1251: note = Cas Enzyme sequence
MKNFNSFTRLYPVSKTLRFELKPIGKTLEHIEQNGLLEQDKHRAESYQKVKELIDDYHKDFINKTLFEFSQKDTLMSKFDGMLEEFFILYQIKNKEDAQKKEFDEKQNKLRKMIVGFIKSDSRFSRIDKKELIKEDLLKFLANDENVALVNEFREFTTYFTGFHENRMNMYSEEAQSTAIAYRLIHENLPKFIDNMQTFLYVAASPVAEKFSEIYRSFEPYLNVSSIEEIFQLNYYKLVLTQTQIDVYNALIGGKTEEDGTKIQGLNEYINLFNQQQTDKHNRLPKFKTLFKQILSDRNRISWLPDAFSSDREVLASIEENYQRLQTTVFQSNEVSHSLKELMISLRDYDLERIWIKNDIQLTEISQKMFGNWNVIEKAIVEALKEEVKRNKKDTDETYLERRLKVYKNIDSFSIEEINHCLEKVGYNQRVEDYFANLGAVDTADKQTESLTAQITNAYTEVKTLLTTPYPEGKNLAQDKENVAKIKTLLDSLKALQHFVKPLLGKGDEAEKDGRFYGDFTALWDELGHITPIYNMARNYLTRKPYSTEKIKLNFENSTLLNGWDLNKETDNSGVLLRKDGMYYLAIMAKGWNKVFTGALPDHGQCYEKIDYKLLPGPNKMLPKVFFSKSRMAEFSPSESLLEHYEQGTHKKGPQFNLSHCHELIDFFKSSIQKHSDWCQFGFQFSDTATYNDLNGFYQEVESQGYKISFRNVSVDYIDTLVDDGKLYLFQIYNKDFSTFSKGTPNMHTLYWKMLFDERNLKDVVYKLNGQAEVFYRKSSIVANAPTHPANKPIANKNPDNAKKESLFYYNLIKDRRYTIDKFMFHVPITMNFKAIGRDNINTQVNDFIRQTDDLHIIGIDRGERHLLYLCVIDMKGNIVEQYSLNDIVNEYNHNRYSTNYHELLERREGERTEARRSWKTIESIKELKEGYLSQVIHKIADLMVKYQAIVVLEDLNLGFKRGRQKVESSVYQQFEKQLIDKLNYLVDKKKAADETGGVLQALQLTNHFESFQKLGKQSGFLFYIPAWNTSKMDPVTGFVNLFDTHYENIEKTRLFFSRFESIRYNTEKGWFEFKFDYSNKFTERAEGTRTLWTLCTQGTRVETFRNPGKNGSWDSVEINLTERFKGFLKEYGIDIHANLKAAIAEQTEKAFYEGLLYLFRLTLQMRNSVTGTEIDYLISPVANETGDFFDSRTCGERLPANADANGAYNIARKGLWAVLQIKASADEKVRLAISNKEWLKFAQEKPYLRD

SEQ ID NO: 722 - protein, 1251 aa, unidentified
  REGION 1..1251: note = Cas Enzyme sequence
MSQNFYNNLTHLYPVSRTITLELKPVGATREHIQAKHLIESDETIAECYKRVKELIDKVHKKIIDETLVQPCILPESSLNDYYETYLSGDSAALKDIEAVLRSSIADKLKKHPSFENLFGAKMVREELPKIATTQEELDIIDVFNRFTTYLTNYHEVRKNLYSDEEKHSTVPYRAINENLPKHIQNVIIYEDICEKDYDIYFYAAIESLEQYLGDIRLDEVFSVSGFNNLLAQRGIDTYNQIIGGISTETTKLKGLNEVINLWNQAHPSEKLPKFSPLYKQMLSDAETKSFVIDKFESDEQVYSALIDSFIELSHIAYTAASDKLDEFKYIHESTPTITYESFYCDIKEYDKNGIFITTDNLADLSVLLFGKWNVLRNLISLNYDKNYTGKKKTGTGAYDKEKEAELKKKKSYTIAELEAIIVNNSDEITHADILAVLRSNAMDKLNDLRIAQRELNHALGYPKLAEKKLKKNEELISAIKTYLDSIKTLQNNLRLLQYNIGAQNKDERFYGDLNALWDSFIPFNTLYNKVRNYITSKPFSNEKLKLNFGSPTFLGGWDSDNINTNLGLLFQKDGTYYLGIMDKDSKKAFKEMPEGTGETYDNYIYKQFPKPELNLPRVFLKPAFSPSEEVLRIAKEKTHTVGKNFSLDDCHTLIDFFKEGIRRHEDYSKFDFNFSDTKTYKNIADFYREVSDQGYMFKKRSVSAEYIDNLVETGQLYLFQIYRNDFSPCATGNLDLQTIYFKMLFDERNLSGDITYKLTGGAEVFYRMPSLKLEDTAIHKKGSVLTSKNPLNPVKEKIAKWDIIKDKRYTQEKFTLHLGISLNHVSKNLKNINNTINNEIRKMDEFHIIGINRGERNLIYATVINQNGEIVDSQQISLNVITQTFNNGKNRQETDYLDLLTRKAKERDDERKSWAPIEQIKNIKSGYLSQAIHVITQLAVKYNAFIAIENLDSDFMHSRQKIEKQIYQNFEKALITKLNYLVTNKSRELKNVDNAGGALAAYQLTNQFESFKKLGIQSGILFRVPTYYISNIDPTTGFVNFIYPTYETMEKSKNFFSTFERIRYNAKEDYFEFDVDLSKFTSKAEGTKKEWTVCTYGKRLRNFRNEEKQSRWETEVYYPTEKMKDLLDEYNIYYEDGKCLIEAITEQTKAAFYKELTEIVKMTLQMRNTGFSDNAEDDFLQSCVKNEKNEFFNSFIASEMLPRSTDANGAYNVARKALMMIERIRESKDGEKIKLAVSNAEWLQYAQKEA

SEQ ID NO: 723 - protein, 1251 aa, unidentified
  REGION 1..1251: note = Cas Enzyme sequence
VLDSPFSKLTNLYSLSKTLRFELKPTPETVELLKKTDLQGKTPIQVDKDINDTYTSVMKPLFDLLHESFINESLQKLELDLLDLKNLEDLYLEYKRLQNDRKKNQERINELWGNREEGEIQKVQDKLRRQIVDRFKKQGEEWKARYSKIKLNDKGYKVLTNAKILDVLLVLYPEKSEAINKFKGFFTYFSGFNQNRENYYTDEAKATGVANRIVNINLPIFFDDKVSFHLLVEQGLKLDEYEKYFELSNYKDYLTQEGIEKFNEIVGNINQQKNLFLQQENSKNTDKNKKIYLPNLKELQKQIGCRTKQEKALENEGKSIYPEYLEKVGLGFQIAKDEKGKYQIWQALDYLNNRYKDKLERIKINYSNFFTSWNEYDLGGIWFRKESINTISSIWFGGQNWHVLTDALKSIGVGRVDKGEYKTPSFVSLSELKEAMEKLPMYEAENLFKEEYKSKNLFKPTLFETFLSIWQWEIESKLNNLQEKIVEFNKASMEPFDKSKKVEEGKSSQTELVKDLVEGGYLRLFQMTKYHNLEKRGQKTPLPTDRRFYDELEKFWEENQIVTYHKAFQSTLTKKPYSDKKIKLNFENGSLLGGFSDGQEKNKAGVIIKNKDRFYLGILKNRSFFRRDKPNPLYETNDKEWQRLILTNLKFQTLAGKGFLGKYGVKYGNMGKTETLRAVQFLQEFIRSDYIKKYPQLQPLVSRTFKSKKEFDAAIKESLNDCFTMKFVPINKTTLEHGLREGELYLFEITNKDFSKFSKSIRKNIHTYYWKNLFDERNFEKPLLALNGGAEVFFRRGQKGKLLKHQDRKNKEVLSNKRFAEDKYFLHVSITINYGKPKTIKHKDLINQTIKEQINKIRVIGIDRGEKHLLYYSVVDQGGRIIEQGSLNEINGVDYNTKLQEKQNKRKQARLNWEAIGNIKNFKEGYLSQAVHKIYELIIKYNAIIALENLNSEFKAKRLAKVEKSIYKKFELALARKLNHLILKDKNPTDLGGVLNAYQLTPAVAQGDVKKFEKANQWGIMFYVRANYTSTTDPLTGWRKHKYISYSDPIEEIKEFFDPDGGVLINYDDDRKCFRFDYVYEGRNWKLYAFKGIKRFYWNGKKREMEECDLHEEFEKIFSIFDKSRNINKQMLENNFDWKRLSFLWNLLNQIRNIDREKSGNDNDFIQSPAWSEKYRTFFDSREVTTMGLPDNGDANGAYNIARKGLIILNRLKKCSDTSKFGNDNNGKNPENGYYISDAVWDDFTSKNTHG

SEQ ID NO: 724 - protein, 1251 aa, unidentified
  REGION 1..1251: note = Cas Enzyme sequence
MKSLKQFIGIYPVSKTLRFELRPVGKTLEWIEKNKVLESDEQKAEDYPKVKTLIDEYHKVCIRESLKSAHFDWVPLRLALEKYQKSKSDEDKAALEKEQTLMRKQVAAAIKMFRHYKELTAPTPKKLIDNVFPDIYESDALKSFNRFSVYFRGFQENRNNIYSAEAISTGVPYRLVHDNFPKFLADIEVFEDIKSNCPEVLKQAATELQPFLEGVMIEDIFTIDFYNSLLTQDGIDFFNQVLGGVSEEGKQKYRGINEFSNLHRQQHPELTAKKKTLTMIPLFKQILSDRDTLSYIPQQIESELQLIELLNQFYSHITAFDYNGKTVDILKELTKLTGNISNYNPDGIYISAKSLTDVSQKLFSKWSVITDRLYEQAIKRFGDVSIAKNKKKIDVYLSLDAYTLSEMPFDNEHSLPIFFAELPKTIENVGSNWLQFMEWCKGESKQLFLNNADGTEIVKNFLDSIMEILHKCSVLVVSVEHDLDKDFYNDFLPLYAELENVIIVYNRVRNFLTKKPSDTKKFKLNFGVPSLGDGWDQNKERDNKAIILFKDGKSYLGILNAKDMPMIKERDESTPSSYKKMIYKLLADPAKDFPHTFFSKKGIDTYHPSRYILDGREQGKYKKGETFDKKFMRDFIDFYKDAVAKHPIWSKFNFVYSPTESYEDIGAFFNEVSKQAYKIRFSYVEESQINEWIEKGQLYLFQLYNKDYAEGAHGRKNLHTLYWESLFSPENLSNIVLKLNGQAELFYRPQSIKQPVLHKMGSKMLNRRDKSGMPIPEAIYRSLYQYFNGRKAESELTPAEKSYIDQVVVKDVTHEIVKDRRYTRSEFFFHVPITFNVNADGNEYINEQVMEYLKDNPDVNIIGIDRGERHLIYLTLINQRGEILKQKTFNMVGNYNYHAKLEQREQERDQARKSWQSIGRIKELKEGFLSAVIHEIAMMMIENNAIVVLEDLNFGFKRGRFKVERQVYQKFEKMLIDKLNYLSFKDRKPDDAGGILRGYQLAQQFTSFQRLGKQSGFLFYIPAAYTSKIDPVTGFVNHFNFNDITNTEKRKAFFMKMERIEMRNGDIEFEFDYRKYKTYQTDYQNIWTVNSSGKRIVMRLDKNGRKQMTDYYPTREIVKTFKEKGILLNENTDIKALLADIDACPKNASLYEVLFYAFQKTLQMRNSNSTTEEDYILSPVAQNGKQFNTNDEVDKGRDEDGNWVSKLPVDADANGAYHIALKGLYLLMNPQTKKIENEKWLHFMVQKPYKN

SEQ ID NO: 725 - protein, 1251 aa, unidentified
  REGION 1..1251: note = Cas Enzyme sequence
MKDLKQFIDIYPVSKTLRFELRPVGKTQEWIEKNKVLESDEQKAEDYPKVKALIDDYHKVCIRESLKDIHLDWNPLKTAIEEHRKNNNDDSKKALEKEQESMRKQIAAAIKDFRHYKELTAPTPQKLIDNVFPDIYDDDALKSFNRFSIYFRGFQENRNNIYSADAISTGVPYRLVHDNFPKFLANIEVYENIKTACPEVLEQVAKELQPFLEGVMIDDIFKLDFYNALLTQNGIDFFNQVLGGDSEEGKQKYRGINEFSNLYSQQHPELGGKKKALTMIPLFKQILSDRETLSYIPQQIESEQQQTETINHFYSYITNYEKNGKTVNILSELTILIGSISNYNPDGIFLSSKSITDVSQKVFGHWSIINDKLQECAIEKYGSIEVAKNKKKIDSYLDKDAFSLSELPFDDEHKVSDYFATFPQEVNNIHSYWLQYKEWCKGEGKQLFLNNPDGTEIIKNLLDSMMEVLHKCSVLLAPEEYDVDKDFYNEFIPLYVEFSNIIFLYNKVRNFLTKKPSDVKKFKLNFGVPSLGDGWDQNKERDNKAIILFKDGLSYLGIMNAKNLPEIKEKQEGTPSSYKKMIYKLLADPAKDFPHTFFSKKGIDTYHPSDYILNGREQGKYKKGSTFDKQFMHDFIDFYKDAVAKHPIWSKFNFVYSPTESYEDIGAFFNEVSKQAYKIRFSYIEEAQINDWVDNGKLYLFQLYNKDYAEGAHGRKNLHTLYWENLFSPENLNNLVLKLNGQAELFYRPQSIKKPVTHKMGTKMLNRRDKSGMPIPESIYRSLYQYFNGKKQFSELTDAEKAYIDQVIVKDVTHEITKDRRYTKAEYFFHVPITFNLNADGNDYINERVQEYLKDNPDVNIIGIDRGERHLIYLTLINQKGEILKQKTFNTVGDYNYQAKLTQREQERDQARKSWQSVGKIKDLKEGFLSAVIHEIAKMMIENNAIVVLEDLNFGFKRGRFKVERQVYQKFEKMLIDKLSYLSFKDRKVDEEGGILRGYQLAQQFKSFQRLGKQSGFLFYTPAAYTSKIDPVSGFINHFNFNDITNAEKRKEFFMKMEHIEMKNGDIEFEFDYRKFKTYQRDYQNVWTVSTYGKRIIMQPDEMGHKVMKDFFPTQQIIKAFESKGITLEEGKDIKALLSAIEANAMNASFYSTLFFAFQKTLQMRNSNSATEEDYILSPVAVNGKHFCSTDEANKGRDANGNWISKLPVDADANGAYHIALKGLYLLMNPLTRKIENEKWLQFMVEKPYKE

SEQ ID NO: 726 - protein, 1251 aa, unidentified
  REGION 1..1251: note = Cas Enzyme sequence
MKDLKRFIGIYPVSKTLRFELRPVGKTLEWIEKNKVLESDEQKAEDYPKVKTLIDEYHKVCIRESLKDAHFDWMPLRLALEKYQKSKSDEDKAALEKEQAVMRKQIATAIKEFRHYKELTAPTPQKLIDNVFPGIYESDALKSFNRFSVYFRGFQENRNNIYSAEAISTGVPYRLVHDNFPKFLADIEVFGNIKANCPEVIEQAATELQPILEGVMLEDIFTIDFYNSLLTQDGIDFFNQVLGGTAEEDKQKYRGINEFSNLYRQQHPELTAKKKALTMIPLFKQILSDRDTLSYIPQQIESEQQLIELLNQFYSHITAFDHNGKTVDVLKELTKLTGNINNYNPDGIYLSAKSLTDVSQKLFSKWNIITERLSEEAIKRFGDVSITKNKKKIDAYLSKDAYALSEIPLDNEHSLSMFFAELPKNIENVGSNWLQFMEWCKGESKQLFLNNADGTEIVKNFLDSIMEILHRCSVLVVSVEHDLDKDFYNDFLPLYAELENAVMVYNRVRNFLTKKPSDTKKFKLNFGVPSLGDGWDQNKERDNKAIILFKDGKSYLGIMNAKDMPMIKERNESTPSSYKKMIYKLLADPAKDFPHTFFSKKGIDTYHPSWYILDGREQGKYKKGETFDKKFMRDFIDFYKDAVAKHPIWSKFNFVYSPTESYEDIGAFFNEVSKQAYKIRFSYIEESQINEWINNGQLYLFQLYNKDYAEGARGRKNLHTLYWESIFSPENLSNIVLKLNGQAELFYRPQSIKQPVTHKMGSKMLNRRDKSGMPIPEAIYRSLYLYFNSKKTESELTLVEKSYLDQVVVKDVTHEIVKDRRYTKPEFFFHVPITFNVNADGNEYINEQVMEYLKDNPDVNIIGIDRGERHLIYLTLINQRGEILKQKTFNMVGNYNYHAKLEQREQERDQARRSWQSIGRIKELKEGFLSAVIHEITMMMIENNAIVVLEDLNFGFKRGRFKVERQVYQKFEKMLIDKLNYLSFKDRKTDDAGGILRGYQLAQQFTSFQRLGKQSGFLFYIPAAYTSKIDPVTGFVNHFNFNDITNAEKRKAFFMKMERIEMRNGDIEFEFDYRKYKTYQTDYQNIWTVNSSGKRIVMRLDENGRKKMTDYYPTQEIVRAFKEKGMLLNEGADIKALLADIDASPMNASLYGVMFYAFQKTLQMRNSNSTTEEDYILSPVAQNGKQFNTDTEANKGRDTNGNWISKLPVDADANGAYHIALKGLYLLMNPQTKKIENEKWLQFMVQKPYND

SEQ ID NO: 727 - protein, 1251 aa, unidentified
  REGION 1..1251: note = Cas Enzyme sequence
MKSLKQFIGIYPVSKTLRFELRPVGKTLEWIEKNKVLESDEQKAEDYPKVKTLIDEYHKVCIRESLKGAHFDWMPLRSALEKYQKSKSDEDKAILEKEQTLMRKQVAAAIKEFRHYKELTAPTPQKLIDNVFPDIYESDALKSFYRFSIYFRGFQENRNNIYSAEAISTGVPYRLVHDNFPKFLADIEVFEGIKANCPEVIEQAATELQPFLEGVMIEDIFSIDFYNSLLTQDGIDFFNQVLGGVAEEGKQKYRGVNEFSNLYRQQHPELAAKKKALTMIPLFKQILSDRDTLSYIPQQIESEQQLIELLKQFYSHITAFDYNGKTVDVLKELTKLSGNISNYNPDGIYLSAKSLTEVSQKLFSKWNVITERLSEEAIKRFGDVSITKNKKKINAYLSKDAYTLSEIPLDNDHSLSMFFAELPKTIENVGSNWLQFMEWCKGESKQLFLNNADGTEIVKNFLDSVMEILHKCSVLIVSVEHDLDKDFYNDFLPLYGELENVVIVYNRVRNFLTKKPSDTKKFKLNFGVSSLGDGWDQNKERDNKAIILFKDGKSYLGIMNAKNMPMIKESDESTPSSYKKMIYKLLADPAKDFPHTFFSKKGIDTYHPSRYILDGRVQGKYKKGETFDKKFMRDFIDFYKDAVAKHPIWSKFNFVYSPTESYEDIGAFFNEVSKQAYKIRFSYIEESQINEWINNGQLYLFQLYNKDYAEGAHGRKNLHTLYWESLFSPENLSSIVLKLNGQAELFYRPQSIKQPVSHKMGSKMLNRRDKSGMPIPEAIFRNLYQYFNGRKAESELSSVEKSYIDQVVVKDVTHEIVKDRRYTKPGFFFHVPITFNVNADGNEYINEQVMEYLKDNPDVNIIGIDRGERHLIYLTLINQRGEILKQKTFNIVGNFNYHAKLEQREQERDQARKSWQSIGKIKELKEGFLSAVIHEIAMMMIENNAIVVLEDLNFGFKRGRFKVERQVYQKFEKMLIDKLNYLSFKDRKPDEAGGILRGYQLAQQFTSFQRLGKQSGFLFYIPAAYTSKIDPVTGFVNHFNFNDITNAEKRKAFFMKMERIEMRNGDIEFEFDYRKYKTYQTDYQNIWTVNSSGKRIVMRLVENGRKQMTDYYPTQEIVRAFKEMGIQLNEGTNIKSLLVDIDASPKNASLYGALFYAFQKTLQMRNSNSTTEEDYILSPVAQNGIQFNTNDEANKGRNANGDWVSRLPVDADANGAYHIALKGLYLLMNPQTKKIENEKWLQFMVQKPYKN

SEQ ID NO: 728 - protein, 1251 aa, unidentified
  REGION 1..1251: note = Cas Enzyme sequence
VIEEALDGEAEDALGCSPRPPTQTKKGTGCQFASNRDPTFASNNDPCLGERLGLSASCIEGSHGRRRADHRAGGGGHDARQRGQATRCRLIALHGAASKFVLRPGRNTGGRGWSRLEPIPIASALGAMSWAMPVRSINLKLLIPRDDSHASLRQTLWVTHSEVNAATRYYEEQLLALRAEPYERGQTSSNQPASKVTPEEARALALSVARARQAENLRRAGSASTVVGSDDDVLAAVNDLYRKLLPEETGEGSAQDANAYLSPLTTPGSKGFAAAADKLGRPRPNWVAMPPDDPAAADAAVAWFDSAASAEWQKDTGSPAKWLRAARQNKSDWPKLFREKLEELQQKSAQGPEAVIARLQTLHLLPLFEPYFPKRMVEQVRGGVTPWDRLAFRLAVSHLLSWEAWCRRASDDRDRRIKRRDDYAAANITSDIGPLIEKIRVFETARAQELSRLGLGQAEYQLRPRQLRGWADLREAWRKAKARDAGALRTIVAEHQTRKKGKFGDPHVFLWLAEPAQHDLWSGAADVVTSVATLNAIQALVDRSRETATMTLPDARLHPRAVQWAAIGDTNLRPYRVAVDDRGIARAKLSLLGRDVSEKLVEREESFVLSPSGQMRDMRLSMREKKQSIEFLNDGGETFTGTVGSADLLLDRRHLTRAREEEIQAGAIGPAWLKLVLDLDLNMPAGWDRKHARFRLHFLSASGSKSKAEDALRAGARVLAVDLGIRAFGACSVFVLQQARPSASAMCFEVPLADGTSMHAVHERSFHLQLPSEEPGRDGELWRRSQEEQLRRIRGCFARYRRLMRLAGAEVDVRSAVLDEIIPTLGDASTFAFESAAVDVLAVQRKSPLPIWDNAVGSLLRAYRIGLAPTIRDWRKAGRERQSFTRSGKSMWAVQHLTDVRRTLMSWSLLGRQSGEVRRLDRSGRGIFAAHLLEHIDNLKADRLKTGADLIVRASMGYVRDKAGNWLQRHAPCDVVLFEDLSRYRMRTDRPRRENSQLMRWAHRAVPGEVAMQGMLHGLEICETSAAFSSRYHARTQAPGIRCRALTRDDLGNAWLRADLEQVGIDLEVCRAGDLVPRDGGEVFACLDGGGNLVRIDADINAAQNLQRRFWTRHSTAFRLPCTLGDRNGQPIWVPRPMGKRLSGAIGGTGLLVPTGHDTGSCRWEQLKTRGAARSGSEGEEVKFGGDEEEDIAALAEEAEIESGRVEVFFRDPSGGVLPADLWYPSKTFWGIVRARTIAALKRGLGAGGSA

SEQ ID NO: 729 - protein, 1251 aa, unidentified
  REGION 1..1251: note = Cas Enzyme sequence
MKDLKRFIGIYPVSKTLRFELRPVGKTLEWIEKNKVLESDEQKAEDYPKVKTLIDEYHKVCIRESLKDAHFDWMPLRLALEKYQKSKSDEDKAALEKEQAVMRKQIATAIKEFRHYKELTAPTPQKLIDNVFPGIYESDALKSFNRFSVYFRGFQENRNNIYSAEAISTGVPYRLVHDNFPKFLADIEVFGNIKANCPEVIEQAATELQPILEGVMFEDIFTIDFYNSLLTQDGIDFFNQVLGGTAEEDKQKYRGINEFSNLYRQQHPELTAKKKALTMIPLFKQILSDRDTLSYIPQQIESEQQLIDLLNLFYSHITAFDHNGKTVDVLKELTKLTGRINDYNPDGIYLSAKSLTVASQKLFSKWSVITDRLYEQAIKRFGDVSVAKNKKKIDAYLSQDAYALSEIPLDDDHSLSMFFAELPQTIEIISSYWLQFKEWCKGESKQLFLNNADGTEIVKKFLDSIMEILHKCSVLVVSVEHDLDKDFYNDFLPLYAELENVIIVYNRVRNFLTKKPSDTKKFKLNFGVPSLGDGWDQNKERDNKAIILFKDGKSYLGIMNAKDMPMIKERNESTPSSYKKMIYKLLADPAKDFPHTFFSKKGIDTYHPSRYILDGREQGKYKKGETFDKKFMWDFIDFYKDAVAKHPIWSKFNFVFSPTESYEDIGAFFSEVSKQAYKIRFSYVEESQINEWINNGQLYLFQLYNKDYAEGARGRKNLHTLYWESLFSPENLSNIVLKLNGQAELFYRPQSIKQPVTHKMGSKMLNRRDKSGMPIPEAIYRSLYLYFNSKKTESELTLFEKSYLDQVVVKDVTHEIIKDRRYTKPEFFFHVPITFNVNADGNEYINEQVMEYLKDNPDVNIIGIDRGERHLIYLTLINQRGEILKQKTFNMVGNYNYHAKLEQREQERDQARRSWQSIGRIKELKEGFLSAVIHEITMMMIENNAIVVLEDLNFGFKRGRFKVERQVYQKFEKMLIDKLNYLSFKDRKTDDAGGILRGYQLAQQFTSFQRLGKQSGFLFYIPAAYTSKIDPVTGFVNHFNFNDITNAEKRKAFFMKMERIEMRNGDIEFEFDYRKYKTYQTDYQNIWTVNSSGKRIVMRLDENGRKKMTDYYPTQEIVRAFKEKGMLLNEGADIKALLADIDASPMNASLYGVMFYAFQKTLQMRNSNSTTEEDYILSPVAQNGKQFNTDTEANKGRDTNGNWISKLPVDADANGAYHIALKGLYLLMNPQTKKIENEKWLQFMVQKPYND

SEQ ID NO: 730 - protein, 1251 aa, unidentified
  REGION 1..1251: note = Cas Enzyme sequence
DGAEFRTIARSFLSANFGTGPKSDKGGISDALTRAVGSLEKLRAGSPGSVVLSHLCKEFDLSGEDDETRERALCKRIGWKGRSSKGRLALTTAHGKARIEREDIDLLILKLNEEAAEKREGSAKAVPPWIESLKSVLENALGFGFVTERNLIGEFGVMLDHAARRVSIACSWIKLAELERRQFEADATKLDQVRDQHPDAAAFLDALGQKRGGESGTAGGSAVLIRKRAVLGWKEVVAAWARPGCKTVQDRVDAARLLQGELEKFGDNKLFEELAADNARIVWQNADSAADPTILERYSAGSVAEANQQRFKVPAYRHPDPLRHPVFGDFGVSRFEIAFAIHERVRAAASGKRAGKADAEWYADPRNLRMGLWTGQRVEKVSLRWSSKRLANDLSLRESGDADPVAVTRADRLGRASVGQTCPVHVASVFAEDNWNGRLQAPRAELDKIARLIERGKPAQARKLRDHISWLVSFSPKLAPSGPFIDYAAANGIEPNRKSGEYWPHSAMNKERKGHHAKLIYARLLGLRVLSVDLGHRFAAACAVWESVATAQVRSETNQGKVVRGGIDKNSLYAHIESKTADGKPRTTVYRRVGPDTLPDGSMHPAPWARLDRQFLIKLQGEEQPPRRAADDEEAMVEGWEKALGLQPLADSDTKPRKDVAELMARAVRLFTLAGRRHNDRARIAHNLIAKHRTKPGGVPEPLTEEGRFELLTETLALWHGLFAGDRWTDPKAQHAWDECGLPTIDLPARGDDEGSSYGGPGRKAAMEAYHAKLRPHAQRLAKTDLSKLAKRWSDRWEQDDRQWEHREKRAGFLRELRQWITPRGLRITAKDSTATRERKAAAALQARHVGGLSMQRINTLTGLYRLLKSFKNRPEPDNLRKNIPEKGDQRLAKFNRRLLDVRDRLREQRVKQLASRITEAALGVGRIKSRHVAAGAARPTSRVDAPCHAVVIESLTNYRPDELQTRRENRQLMEWSSAKLDKYLSESCQLHGLHKREVQPNYTSRQCSRTGAPGLRGVEVSAHDLLTKPWWKKDVAKAKANIEKARKEGRDGAFADRLLVNAEQWALRIPEQDRKDRKAQGSHKPSRAARIVLPRKGGDLFIAESATPNAKGHVPALQADLNAAANIGLRALLDPDWPGKWWWVPCTGGTYTPAPEKTSGADVFKGLTALLHEEPKNRTEGAAGGTEPSKKSRTKPVKAKEVRAIENRWRACSSEPLGTGEWMPSGEYWAKAEDRVRRLLDLQTTPQTRT

SEQ ID NO: 731 - protein, 1251 aa, unidentified
  REGION 1..1251: note = Cas Enzyme sequence
MKDLKQFIGIYPVSKTLRFELKPIGKTLEWIKKNKVLESDEQKAEDYPKVKTLIDEYHKVCICESLKGVNFDWNPLRLALKEYQSSKSDESKAVLEKEQALMRKQIATVIKDFRHYKELTAPTPQKLIDNVFPSIYESDALKSFNRFAVYFKGFQENRNNIYSSDAISTGVPYRLVHDNFPKFLADIEVFENIKTNCPEVIEQAATELQPFLEGVMIEDIFTIDFYNSLLTQDGIDFFNQVLGGVAEEGKQKYRGINEFSNLYRQQHPEQTAKKKTLTMIPLFKQILSDRDTLSYIPQQIESEQQLIELLKQFYSHITAFDYNGKTVDVLKKLTKLTSNINNYNPDGIYLSAKSLTDVSQKLFSKWNVITERLSEEAIKRFGDVSITKNKKKIDAYLSKDAYALSEIPLDNDHSLSMFFAEFPKTIENVGSNWLQFMEWCKGESKQLFLNNADGTEIVKNFLDSIMEILHRCSVLVVSAEHDLDKDFYNDFLPLYAELENAVMVYNRVRNFLTKKPSDTKKFKLNFGVPSLGDGWDQNKERDNKAIILFKDGKSYLGIMNAKDMPIIKERDESTPSSYKKMIYKLLADPAKDFPHTFFSKKGIDTYHPSRYILDGREQGKYKKGETFDKKFMRDFIDFYKDAVAKHPIWSKFNFIYSPTESYEDIGAFFNEVSKQAYKIRFSYIEESQINEWTEKGQLYLFHLYNKDYAEGAHGRKNLHTLYWECLFSPENLSNIVLKLNGQAELFYRPQSIKQPVSHKTGSKMLNRRDKSGMPIPEAIYRSLYQYFNGRKAESELTLVEKSYIDQVVVKDVTHEIVKDRRYTKPEFFFHVPITFNVNADGNEYINEQVMEYLKDNPDVNIIGIDRGERHLIYLTLINQRGEILKQKTFNIVGNYNYHAKLEQREQERDQARKSWQSVGKIKELKEGFLSAVIHEIAMMMIEYNAIVVLEDLNFGFKRGRFKVERQVYQKFEKMLIDKLNYLSFKDRKPDEAGGILRGYQLTQQFTSFQRLGKQSGFLFYIPAAYTSKIDPVTGFVNHFNFNDITNAEKRKAFFMKMERIEMRNGDIEFEFDYRKYKTYQTDYQNIWTVNSSGKRIVMRIDENGRKQMTDYFPTKEIVKAFSDKNITLCEGTDLKALMAVIDTSPKNASLYGILFYAFQKTLQMRNSNSATEEDYILSPVTQNGKQFNTKDEADKGQDSAGNWVSKFPVDADANGAYHIALKGLFLLMNQQTKKIENQKWLQFMVQKPYKS

SEQ ID NO: 732 - protein, 1251 aa, unidentified
  REGION 1..1251: note = Cas Enzyme sequence
MKDLKRFIGIYPVSKTLRFELRPVGKTLEWIEKNKVLESDEQKAEDYPKVKTLIDEYHKVCIRESLKDAHFDWMPLRLALEKYQKSKSDEDKAALEKEQAVMRKQIATAIKEFRHYKELTAPTPQKLINNVFPGIYESDALKSFNRFSVYFRGFQENRNNIYSAEAISTGVPYRLVHDNFPKFLADIEVFGNIKANCPEVIEQAATELQPILEGVMFEDIFTIDFYNSLLTQDGIDFFNQVLGGTAEEDKQKYRGINEFSNLYRQQHPELTAKKKALTMIPLFKQILSDRDTLSYIPQQIESEQQLIDLLNLFYSHITAFDHNGKTVDVLKELTKLTGRINDYNPDGIYLSAKSLTVASQKLFSKWSVITDRLYEQAIKRFGDVSVAKNKKKIDAYLSQDAYALSEIPLDDDHSLSMFFAELPQTIEIISSYWLQFKEWCKGESKQLFLNNADGTEIVKKFLDSIMEILHKCSVLVVSVEHDLDKDFYNDFLPLYAELENVIIVYNRVRNFLTKKPSDTKKFKLNFGVPSLGDGWDQNKERDNKAIILFKDGKSYLGIMNAKDMPMIKERNESTPSSYKKMIYKLLADPAKDFPHTFFSKKGIDTYHPSRYILDGREQGKYKKGETFDKKFMRDFIDFYKDAVAKHPIWSKFNFVFSPTESYEDIGAFFSEVSKQAYKIRFSYVEESQINEWINNGQLYLFQLYNKDYAEGARGRKNLHTLYWESLFSPENLSNIVLKLNGQAELFYRPQSIKQPVIHKMGSKMLNRRDKSGMPIPEAIYRSLYLYFNSKKTESELTLVEKSYLDQVVVKDVTHEIVKDRRYTKPEFFFHVPITFNVNADGNEYINEQVMEYLKDNPDVNIIGIDRGERHLIYLTLINQRGEILKQKTFNMVGNYNYHAKLEQREQERDQARRSWQSIGRIKELKEGFLSAVIHEITMMMIENNAIVVLEDLNFGFKRGRFKVERQVYQKFEKMLIDKLNYLSFKDRKTDDAGGILRGYQLAQQFTSFQRLGKQSGFLFYIPAAYTSKIDPVTGFVNHFNFNDITNAEKRKAFFMKMERIEMRNGDIEFEFDYRKYKTYQTDYQNIWTVNSSGKRIVMRLDENGRKKMTDYYPTQEIVRAFKEKGMLLNEGADIKALLADIDASPMNASLYGVMFYAFQKILQMRNSNSTTEEDYILSPVAQNGKQFNTDTEANKGRDTNGNWISKLPVDADANGAYHIALKGLYLLMNPQTKKIENEKWLQFMVQKPYND

SEQ ID NO: 733 - protein, 1251 aa, unidentified
  REGION 1..1251: note = Cas Enzyme sequence
MKNLKQFIGIYPVSKTLRFELRPIGKTQEWIEKNKILESDEQKSLDYPKVKALIDDYHKVCIRESLKGVHLDWVPLKQALENYQETKSDEGKAALEKEQTLMRKQIASAIKDFRHYKELTAPTPQKLIDNVFPGIYDNEALKSFNRFSVYFRGFQENRNNIYSSDAISVGVPYRLVHDNFPKFLADIEVFENIKANCPEVIEMAAKELLPFLEGVMIDDIFTIDFYNSLLTQDGIDFFNQVLGGVAEEGKQKYRGINEFSNLYRQQHPDVSAKKKALTMIPLFKQILSDRDTLSYIPQQIESEHQLIELLNQFYSHIKAFDYNGKTVDVLSELSNLICRINEFNPDGIYLSAKSLTDISQKLFGKWSAITDRLNEQAIEKIGDIAIAKNKKKVDTYMAKDAFALSEFNLDEEHPLSIYFSDIPQIFEIICSNWMQFKEWCKGDSKQLFLNNADGTEIVKNFLDSIMEILHRCSVLVVSIEHDLDKDFYNDFLPLYAELENTIMVYNRVRNYLTKKPSDTKKYKLNFGVPSLGDGWDQNKERDNKAIILFKDGLSYLGIMNAQNMPMIKENEDSTPSSYKKMIYKLLADPAKDFPHTFFSKKGIDTYHPSRYILDGREQGKYKKGDTFDRKFMRDFIDFYKDAVSKHPTWSKFNFVYSPTESYEDIGAFFNEVSKQAYKIRFSFIEESQINEWIEKGQLYLFQLYNKDYAEGAHGRKNLHTLYWENLFTPENLNNLVLKLNGQAELFYRPQSIKQPITHKTGSKMLNRRDKSGMPIPESVYRSLYQYYNGRKTKEELTSAEKSYIDQVVVKDVSHEIVKDRRYTKPEFFFHVPITFNVNADGNEYINEQVIDYLKDNPDVNIIGIDRGERHLIYLTLINQKGEILKQKTFNTVGNFNYHAKLEQREQEREQARKSWQSVGKIKDLKEGFLSAVIHEIAVMMIENNAIVVLEDLNFGFKRGRFKVERQVYQKFEKMLIDKLNYLSFKDRKADEEGGILRGYQLAQQFTSFQRLGKQSGFLFYIPAAYTSKIDPVTGFINHFNFNDIANAEKRKDFFMKMERIKMRNGNIEFEFDYRKFKTYQTDFQNLWIVNSSGKRIVMKIEENGRKQMADYYPTQEIVKVFAEKGITVSEGTDLKALLADIDASPKNASLYGTLFYAFQKTLQMRNSNSATEEDYILSPVAKNGKQFNTNDEVNKGRDADGNWNSKLPVDADANGAYHIALKGLYLLLNPQSKKIENEKWLQFMVEKPYKD

SEQ ID NO: 734 - protein, 1252 aa, unidentified
  REGION 1..1252: note = Cas Enzyme sequence
MKKFDDFTKIYPLSKTLRFELVPVGKTLESIYESGILEQDTHRADSYLKVKKIIDEYHKDFIERVLGNLKLVYEDFGKKNSLKEFYSSYMLVSKDKSKKPDFERIQDALRKQIADAFKADEKFKNLSKKELIKDDLREFVSTAEELALVEEFKDFTTYFVGFNKNRKNMYSAEAQSTAISYRLIHENLPIFINNMGVFEKVALSPVAENFSELYSELEEYLNVCKIQEMFNLDYYSNVLTQKQIDVYNLIIGGKSFEDGRKIKGLNEYINLYNQQQKEKALRLPKLKPLYKQILSDRNSISWLPEQFQSDNEMLEAIEKSYQSLYNNVLNKNVPGEHSLKELLLSLSNYDLDKLFIKNDTQLTDISQKIFGNYGYISKCLIAELKNSVPKKKKETDEAFDERCTKLLKLQDSISIRTINNCIENASEVNVKTLESYFANLGAFVSNDVQTENLFQQIENAYIAAKDLLNTSYPSDKNILQDKYSISLIKNLLDAIKTLQYFVKPLLGTGNEADKDEKFYGEFSALWSELEIITPLYNMVRNYVTKKPYSKDKIKLNFENSTLLNGWDLNNERYNTAVILRREGLYYLAIINKKHNRVFEEKNIRSNGDCYEKMEYKLLPGANKMLPKVFFCKKNIKEYAPSEELLNNYKNNTHTKGETFNLSDCHSLIDFFKSSINKHKDWKNFEFNFSETKTYNDISGFYREIEQQGYKITFRNVSVDYVNQLVEEGKIYLFQIYNKDFSLYSKGTPNLHTLYWKMLFDERNLNDVVYKLNGEAEIFYRKSSIKYEKPTHPANHPIDNKNPLREKKQSLFNYDLIKDKRYTVDKFQLHIPITMNFKSLKNDNINSAVNEYIRECRDLHIIGVDRGERHLLYLTVIDTKGNIVKQYSLNEIVNSYKGNEYRTDYHNLLSQRENERLKARQSWQTIESIKELKEGYLSAVIHKITELMVQYNAIIVLEDLNKGFIRGRQKVESSVYQKFEKMLIDKLNYLADKKKQPEEPGGVLNAYQLTNKFVSFEKIGKQCGFLFYVPAWNTSKIDPVTGFVNLFDTHYESIDKTKSFIEKFDNICYNKERTYFEFSFDYAKFTTKANGTRTYWTLCTKGKRIETYRDERQNSNWVSREVNLTEEFVQLFKDFGISVDVDLKTAMLTQSNATFFKRFMYLFKLLLQMRNSKSGTAIDYLQSPVADENGYFYNSDTCDASLPNNADANGAYNIARKGLWIVQQIKASKENDKLNLVISNKEWLQFVQTKPYI

SEQ ID NO: 735 - protein, 1252 aa, unidentified
  REGION 1..1252: note = Cas Enzyme sequence
MKDLKQFIGIYPVSKTLRFELRPIGKTQEWIKKNKVLDSDKQKVEDYPKVKALIDDYHKVCIRESLKDIHLDWNPLKTAIEANRKDKNEETKKTLEKEQDNMRKQIAAAIKDFRHYQELTAPTPQKLIDNVFPDIYDDDALKSFHRFASYFKGFQENRNNIYNAEAISTSVPYRLVHDNFPKFLANIEVYENIKAAAPIVLEQVATELMPFLEGVMIDDIFKVDFYNALLTQEGINFYNQVLGGVAKEGKQKYRGINEFTNLYRQQHPELGEKKKALTMIPLFKQILSDRETLSYIPQQIESDKQLTEVIDKFYLSIINYDKNGKTINILSELVSLIGRIDKYNPDGIFLLSRSLTDVSQKVFGHWGVLNDKLQQTAIERFGNIEAAKNKKKIDNYLAKEAFSLSELSFDDEHQISAYFATLQQEANLVHTCWLQYKEWCKGEDKQLFLNNADGTEIIKNMLDAIMEVLHRCSVLLAPEEYDVEKEFYNEFIPLYTELSNIIFVYNRVRNFLTKKPSDVKKFKLNFGVASLGDGWDLNKEKNNKTIILFKDGLSYIGIMNAKNLLRIVGSNHPDKDSYSKMVYKFLPSPNKMLPKVFFSKKGLDTFKPSKHILDIYESGSFKKGSPHFSLVNLHALIDFYKDAISRHVDWRKFGFLFSPTSSYEDISSFYSEIAKQAYNVSFTYIPEQQVNEWVDNGQLYLFQLYNKDYAEGTHGRKNLHTLYWENLFSQENLNDIVLKLNGQAELFYRPQSIKTPITHKMGSKMLNRRDKSGMPIPEPIYRNLYQYFNGRRESSELTDAEKAYISQVVVKNVTHEITKDRRYTKPEFFFHVPITFNLYADGNDYINDKVLEYLKDNSDVNIIGIDRGERHLIYLTLINQRGEILKQKTFNMVGDYNYQAKLTQREQERDEARKSWRSIGKIKELKEGFLSAVIHEIAVMMVENNAIVVLEDLNFRFKRGRFKVERQVYQKFEKMLIDKLNYLSFKDIKVEEEGGILRGYQLAQQFTSFQRLGKQSGFLFYIPAAYTSKIDPVTGFVNHFNFNDLTNAKSRKEFFMRMERIEMKSGNVEFEFDYRKFKTYQTDFKYVWTVNTSGKRIVMQIDENGRKQMHDYYPTQEIVAAFKDKGIVLDDGMDLKTLISDIEVNPTNATFFSRLFYAFQKTLQMRNSNAATGEDYILSPVAIDGKQFCTIDEATKGKDANGNWLSKLPVDADANGAYHIALKGLYLVKNPQTKKIENEKWFQFMAQKPYLM

SEQ ID NO: 736 - protein, 1252 aa, unidentified
  REGION 1..1252: note = Cas Enzyme sequence
MKNLKQFIGVYPISKTLRFELRPVGKTQEWIEKNKVLENDESKAADYPVVKKLIDEYHKVCIRESMKNVHLDWNPLKEAIEEYQKTKSDEAKKRLETEQTMMRKQIATAIKDFKHYKELTAATPSDLITSVLPEFSDNEALKSFRGFASYFIGFQENRNNIYSPDAISTGVPYRLVHDNFPKFLSNLEVYDKIKATCPEVIQQASEEMQPFLEGVMIDDIFSLDFYNSLLTQDGIDFFNRVIGGVSEEDKQKYRGINELVNLYRQQHKDLAGSKKAMTMIPLFKQILSDRDTLSYIPAQIETEEELVTSITQFYEHITHFERDGKTIDVLNELAALLSKIDTYNPDGICVTANKLTDISQKVFGKWSIIEEKLKDKAIQQYGDISVAKNKKKVDAYLSRKAYCLSDLCFDDEFHISQYFSDIPQTLNAIDGYWQQFNEWCKNEEKQKFLNNPTGTDVVKSLLDAMMELSHKCSVLVMPEEYEVDKSFYNEFIPLYEELDTLFLLYNKVRNYLTRKPSDVKKFKLNFESPTLANGWDQNKEMKNNAILLFKNGKSYLGVINAKNKAKIKNAKYDASSTSYKKMIYKLLSDPSKDLPHKIFAKGNLDVYKPSEYILEGRESGKYKKGPSFDKKFLHDFIDFYKAAIAIDPDWSKFNFKYTPTELYEDIGSFFSEIKKQAYKISFTDIPESQVDEWVGNGQLYLFQLYNKDYAEGAHGRKNLHTLYWENLFTDENLNNLVLKLNGQAELFCRPQSIKKPVSHKVGSKMLNRRDKSGMPIPESIYRSLYQFYNGKKKESELTAAEKQYMDQVIVKDVTHEIIKDRRYTRQEYFFHVPITFNANADGNEYINENVLNYLKGNPDVNIIGIDRGERHLIYLTLINQRGEILKQKTFNVVNSYNYQAKLEQREKERDEARKSWDSVGKIKDLKEGFLSAVIHEISKMMIENNAIVVLEDLNYGFKRGRFKVERQVYQKFEKMLIDKLNYLSFKDREAGEEGGILRGYQMAQKFVSFQRLGKQSGFLFYIPAAYTSKIDPVTGFVNHFNFNDITNAEKRKDFLMKMERIEMRNGDIEFEFDYRKFKTFQTDYQNLWTVSTYGKRIVMRMDDKGYKQMVDYEPTKEIINVFKKKGIQLTEGSDLKVLIADIEANAVNASFFNTLLYAFQKTLQMRNSNAATEEDYILSPVAKDGHYFCSTEEANKGRDTQGNWVSRLPVDADANGAYHIALKGLYLLRNPETKKIENEKWLQFMVEKPYLE

SEQ ID NO: 737 - protein, 1252 aa, unidentified
  REGION 1..1252: note = Cas Enzyme sequence
MYNLKQFIGIYPVSKTLRFELRPVGKTQEWIEKNRVLENDESKAADYPVVKSLIDEYHKVCIRESMKNVHLDWAPLKEAIEDYQKTKSEEAKKRLEAEQAMMRKRIAAAIKDFRHYKELTAATPSDLITSVLPEFSNNEALKSFRGFASYFIGFQENRNNIYSPDAISTGVPYRLVHDNFPKFLSNLEVYDKIKATCPEVIQQASEEIQPFLEGVMIDDIFSLDFYNSLLTQDGIDFFNRVIGGVSEEGKQKYRGINEFSNLYRQQHKELAGSKKALTMIPLFKQILSDRDTLSYIPVQIETENELVACVSQFYEHITHFERDGKTINVLNELVVLLSKIDSYNPDGICVTANKLTDISQKIFGKWSIIEEKLKEKAVLQFGDISVAKNKKKVDAYLSRKAYCLSDLCFDDEYHISQYFSDMLQTLNAIEGYWMQFNEWCKNDEKQKFLNNPTGTEVVKSLLDAMMELCHKCSVLVMPEEYEVDKSFYNEFIPLYEELDTLFLLYNKVRNYLTRKPSDVKKFKLNFESPSLADGWDQNKERANKAILLFKDGLSYLGIMNAQNMPDINQQWPKDDNHYSKMVYKLIPGPNKMLPKVFFSKKGLDTFNPSRHILRIKEEETFKKGSPNFKLADLHDLIDFYKDGINRHPDWSKFNFQFTDTESYEDIAGFYRDIANQAYKISFSDIPVWQINDWIDNGQLYLFQLYNKDYAEGAHGRKNLHTLYWENLFTDENLTSLVLKLNGQAELFCRPQSIKKPVSHKVGSKMLNRRDKSGMPIPESIYRSLYQFYNGKKKESELTTAEKQYMDQVIVKDVTHEIIKDRRYTRQEYFFHVPITFNANAEGNEYINENVLNYLKDNPDVNIIGIDRGERHLIYLTLINQRGEILKQKTFNVVNSYNYQAKLEQREKERDEARKSWDSVGKIKDLKEGFLSAVIHEICKMMIENNAIVVLEDLNFGFKRGRFKVERQVYQKFEKMLIDKLNYLSFKDREAGEEGGILRGYQMAQKFVSFQRLGKQSGFLFYIPAAYTSKIDPVTGFVNHFNFNDITNAEKRKEFLMKMERIEMKNGHIEFEFDYRKFKTFQTDYQNLWTVSTYGKRIVMRIDDKGYKQMVDYEPTKDIINAFKNKGIQLSEGSNLKALIADIEANAANAGFFSTLLYAFQKTLQMRNSNAATEEDFILSPVARDGHHFCSTDEADKGRDEQGNWVSKLPVDADANGAYHIALKGLYLLRNRETKRIENEKWLQFMVEKPYLE

SEQ ID NO: 738 - protein, 1252 aa, unidentified
  REGION 1..1252: note = Cas Enzyme sequence
MKNLKQFTNLYPVSKTLRFELQPIGKTKENIEKNGILTRDEKRAKDYQVVKGFIDEYHKQFIKDRLWDFKLPLISEGNLDSLEEYQMLYEMARRDDAQEAEFSEIKDNLRAIIAKRLTENGSAYDRIFKKELIREDLVDFLDNEEDKALVRQFADFTTYFSGFHENRRNMYSAEEKSTAIAYRLIHQNLPKFMDNMKAFTKIAETSVAEHFINIYKGWEEYLNVGSIEEIFRLDYFSETLTQPHIEVYNYIIGKKVLEDGTEIKGINEYVNLYNQQQKDKSKRLPFLVPLYKQILSDREKLSWMAEEFDSDEKMLAAINESYTHLHELLMGNENESLRSLLLHLREYDLSQINITNDLSLTDISQHLFGRYDVYTNAIKEQLKIITPRKKKETDEDFEDRISKIFKTQKSFSISFLNNLPHPETEDGKPRSVEEYFISTGAINTETTQKENLFAQIENAYENVRVILKMKDTDDALSQNKPAVTKIKALLDAFKDLQHFIKPLLGSGEELEKDELFYGSFQMIWDELDNVTPLYNKVRNWLTRKPYSTEKIKLNFDNSQLLGGWDVNKEPDCTGILLRKDGFYYLGIMDKKSNRVFEADVTPSDGDCYEKIDYKLLPGANKMLPKVFFSKSRIDEFAPSKSIVSSYKRGTHKKGKDFNLSDCHRLIDFFKRSINKHEDWCKFGFHFSDTHTYDDISGFYREVEDQGYMLSSHSVSSSYINQLVDEGKLYLFRIWNKDFSEYSKGTPNLHTLYWKMLFDERNLSNVVYKLNGQAEVFYRKASIQPENRIIHKAKQSIANKNELNKKRTSTFEYDIIKDRRYTVDKFQFHVPITINFKGTGQFNINPIVQETIRQGDFTHIIGIDRGERHLLYLSLIDLNGNIVKQMTLNDIINEYKGQTYKTNYHDLLVKREGDRTNARRSWDTIETIKELKEGYLSQVVHVISKMMVEYKAIVVLEDLNSGFMRGRQKIERQVYEKFEKMLIEKLNCYIDKQADATEVTGLLHPLQLTCEAKKWKRSHQCGCIFYIPAWNTSKIDPVTGFVNLLDTRYDTREKARLFFSKFQRISFNTEKGWFEFTFDYNDFTTKADGTRTQWTLCTYGERIRTFRNSQKNNQWDNERIILTDEFKKLFDEKEIDISGNIKEAICNQADAQFYRDLLGLMKLLLQMRNSITNSEEDYLLSPVADENGHFFDSRESISNLPIDADANGAYNIARKGLWIVRKIRDNPEDEKLSLTITNKEWLLFAQNKSYLND

SEQ ID NO: 739 - protein, 1252 aa, unidentified
  REGION 1..1252: note = Cas Enzyme sequence
MKDLRQFIGIYPVSKTLRFELRPVGKTQEWLEKNKVLESDEQKAEDYPKVKALIDDYHKVCIRESLKGIHLDWYPLKDAIETNRKNNSDDTKKVLEKEQEIMRKQIAAALKDFRHFKELTAPTPQKLIDNIFPEIYDDEALKSFNRFSIYFRGFQENRNNIYSSDAISAGVPYRLVHDNFPKFLADIEVYENIKALCPEVIDQVSVELQPILEGVMIDDIFKIDFFNALMTQYGIDFFNQVLGGVSEGGKQKYRGINEFSNLYRQQHPELSNKKKALTMIPLYKQILSDRETLSYIPQQIESEQQLTESINQFYSFITNYEKNGKTVNILRELALLIGNICKYNPDGIFLSSKNIMDVSQKVFGHWRIINDKLQELAIGKFGNIDVAKNKKKIDSYLAKDAFSLSELPFDDEHKLSDYFADLSQSVNNIHSYWMQYKEWCKGNGKQLFLNNPDGTEIIKNLLDSMMDVLHKVSVLLVPEEYDVDKDFYNEFIPLYAEFSNVIFLYNKVRNFLTKKPSDIKKFKLNFGVPSLGDGWDLNREKNNKGIILFKDGFSYLGIMNAQNLPNITGSDHHDEKSYSKMIYKFLPGPNKMLPKVFFSKKGLETFSPSKQILDIYESGSFKKGSPQFSLVNLHTLIDFYKDAISKHEDWSKFGFKFSPTSSYDDISSFFNEISKQSYVIRFTNISEQQLNEWIDNGQLYLFKLYNKDYAEGAHGRKNLHTLYWENLFSPENLKDLVLKLNGQAELFYRPQSIKTPVTHKMGSKMLNKRDKSGMPIPESIYRSLYQYFNGRKQESELTDAEKAYISQVVVKDVTHEITKDRRYTKSEFFFHVPITFNLNADGNDFINEKVQEYIKGNPDVNIIGIDRGERHLIYLTLINQKGEILKQKTFNMVGDYNYQAKLVQREQERDEARKSWKSVGKIKDLKEGFLSAVIHEIAKMMIENNAIVVLEDLNFGFKRGRFKVERQVYQKFEKMLIDKLNYLSFKDCKADEEGGILRGYQLAQQFTSFQRLGKQSGFLFYIPAAYTSKIDPVTGFVNHFNFNDITNAEKRKDFFMKMERIEMKNGDIEFEFDYRKFKTYQTDFQNVWTVSTYGKRVVIHMDDKGYKKMVDFYPTQEIIQAFEKKGISIEEGTDIKSLLVTVEANPTNASFYSTLFYAFQKTLQMRNSNAATEEDYILSPVAANGEYFSSIDEANKGRDANGNWVSKLPVDADANGAYHIALKGLYLIMNPQTKKIENEKWLQFMVEKPYKV

SEQ ID NO: 740 - protein, 1252 aa, unidentified
  REGION 1..1252: note = Cas Enzyme sequence
MKDYSRFENLYSVSKTERFELIPIGETLAHIQADGIIAEDAQRSKNYCEAKNIIDNFHRSFIEQCLSQAKIEWKPLANTILDYHNSKNDKTDKALADILKKKRKEIVSSFKNDDRFKKLFNEKLFAEVLPSTLNKEEFAILKNFNKFSTYFTAFHENRKNIYSDEAISTAVSYRVVHQNFPKFIDNITTFQQIQRFAPEIIKQTETELQSFLDGITLSEIFSIEFYNSVLTESGISFYNTVIGGISEKGQKKRRGLNESSNLYKQQHKNDTHHYRMNTLYKQILSDRVSASFIPEAFKDDENVREGIKDYWTLLNGSEKNCLKEAEKLFDSFSIYQSDKVYIDGKKLTVLSQILFGQWNTLNQLMFAYKEAEIGTAEKSKNKKAIEKWLKSSVFSVAQLDTCIDFGKKEGLLSEKESHVSAYASQATYYIDKINDAHQKYESYNWENVSLISDNDTISCIKTYLDAIQDLYHFLEIFQVEESEERDIAFYAAFDEIYHVLSLVIPIYNKVRNYVTQKPYSEEKCKLNFKNPTLADGWDKNKEQANTSIILLKNGLYYLGIMNVGNKPAEDNFEEDGSKSDCYRKMVYKLLPGPNKMLPKVFFSKKGIETFNPPQYILDGYKQEKHKKGDQFDLDFCHRLIDYFKKVIPLYPGWDTFNFDFSPTETYEDISGFYREISEQGYKLSFINISTEKIDNMVRDNQLYLFQIYNKDFAPGTTGRPNLHTLYWKALFDEENLKDVVYKLNGEAELFYRKKSIEDPTIHKKGSFKVNKRDNDGKPIPDDLYKAISFLVNHQETRIKDEKLLPLAKEYVNKKKVRVSEVTHDIIKDKRYTEDKFFFHVPLTANFKARGTVNINRDVITYLKDNPDINIIGIDRGERHLLYLTLINQKGDILLQKTLNLVGNTEKGYTDYHQKLDQKEKDRDKARKNWQEIGKIKDMKTGYLSQIVHEISKLMVENHAIVVLENLNFGFKRGRFKVEKQVYQKFEKMLIDKLNYLVFKDAAPNSPGSIYHALQLTSVLESFQKLGRQSGFLFYVPAAYTSKIDPVTGFADFFRYREYPTIEKRHEFLSQFDSICYDTEKDAFAFKFNYDNFKNIHSAYKKDWTAYSHGERLITKKTKDDKFITEKVNPTEELKIALESNKIPYQYGENFLKNLDNKMVNPIFYALKNTMQMRNSRRDTEEDYIISPILDANGTFFDSRKQIKTLPLDADANGAYHIALKGRYLLNAINEDNKLKVENKDWFRFVQEKPYRK

SEQ ID NO: 741 - protein, 1252 aa, unidentified
  REGION 1..1252: note = Cas Enzyme sequence
MERTLFKEFVSQYPVSKTLRFELIPQGKTKEFIEQKGLLKRDEDRAEKYKKVKKTIDEYHKDFIEKSLSGVVLKGLQDYMDLYLKPNKEDKDKKAFEKEKEILRRQIANAFKNHEKFKTLFAKELIKEDLMSFAREEEKENVKEFQNFTTYFTGFHQNRENMYVADAKATAIAYRLIHENLPKFIDNLKIFEKIKKEAPELTAKLNNVLHDMKEIINGKTLEEIFSLDYFNETLTQKGIDLHNTIIGGRTAEEGKTKIKGLNEYINTDYNQKQTDKKKRQPKFKQLYKQILSDRQSLSFIAEAFKNDNDILEAIEKFYANELLNFSIEGKSINILDAIKNAVSNFESFNLSKIYFRSGTSLTDISQKVFGDWSLINRALQDYYEKTYPMKSKEKSEKYEERKVKWLKQDFDISLLQTAIEKYDNETVKEKNNGKVITGYFAGFCDDKGTDLVRKVNQNYKAVKDLLNTPYPENEKLGSNKEHVSQIKAFLDSIMDIMHFVKPLSLKDTDKEKDEIFYSLFTPLYDQLTHTISLYNKVRNYLTQKPYSTEKIKLNFENSTLLDGWDLNKETDNTAIILRKYNLYYLGIMDKKHNKIFRRVTETDNKGSCYEKMVYKLLPGANKMLPKVFFSQSRIQEFSPSATLLDNYENETHKKGDNFNLVHCHRLIDFFKTSINKHEDWKQFDFRFSVTSTYADLSGFYREVEHQGYKISFQRIDDSFIDDLVNEGKLYLFQIYNKDFSPYSKGKPNLHTLYWKILFDSKNMEDVVYKLNGQAEVFYRKKSIAEKNNIIHKANENLPNKNPDNPKATSKFDYDIVKDRRYTLDKFQFHVPITMNFKADGILNINPRVNKFLKNNPDVNIIGIDRGERHLLYFTLINQKGEILKQDTLNIIANEKQKVDYHNLLDKKEGDRATARQDWGVIETIKELKEGYLSQVIHKLTDLMIANNAIIVMEDLNFGFKRGRQKVEKQVYQKFEKMLIDKLNYLVDKNKKANELGGLLNAFQLANKFESFQKMGKQSGFIFYVPAWNTSKTDPATGFVDFLKPRYENLKQAKEFFEKFDLIHFNSKANYFEFAFEYKNFTEKAEGGRTKWIVCTTNEDRYAWNRTLNNNRGGQEKYDVTERLKSLFDEKGVEYKNGKDLKPQIVNRESADFFKALMKYLSITLSLRHNNGEKGDREQDYILSPVANSTGRFFDSRKAGDEMPKDADANGAYHIALKGLWCLQQINKADDIKKIKLAISNREWLEFVQTLKG

SEQ ID NO: 742 - protein, 1252 aa, unidentified
  REGION 1..1252: note = Cas Enzyme sequence
MEKTLFKEFVSQYPVSKTLRFELILQGKTKEFIEQKGLLKQDEDRAEKYKKVKKTIDEYHKDFIEKSLSGVVLKGLQDYMALYLKPNKEDKDKKAFEKEKDLLRRQIANAFKSHEKFKTLFAKELIKEDLISFCREEDKENVKEFQNFTTYFTGFHQNRENMYVADAKATAIAFRLIHENLPKFIDNIKIFEKIKNDAPELATKLNNVLHDMKEIIKGKTLEEIFSLEYFNETLTQKGIDLYNTVIGGRTAEEGKTKIKGLNEYINTDYNQKQSDKKKRQPKFKQLYKQILSDRQSLSFIAEAFNNDNDVLEAIEKFYSNELLNFSIEGKSINILEAIKNAVSSFESFNLSKIYFRSGTSLTDISQKVFGDWGLISRALQDYYGRTYPMKSRGKSEKYEERKDKWLKQDFDISLIQTAIDEYDNETVKEKNNGKVIIGYLAGFCDDKETDLIQKINQSYKAIKDLLNTPYPENEKLSSNKAQVSQIKAFLDSIMDIVHFVKPLSLKDTDKEKDEIFYSLFTPLYDQLTQTISLYNKVRNYLTQKPYSTEKIKLNFENSTLLDGWDLNKETDNTAIILRKDNLYYLGIMDKKHNKIFRKIAEMDNKDSCYEKMVYKLLPLVNQQLPRVFFSKSRIQEFSPSAKLLENYENETHKKGDNFNLNHCHMLIDFFKTSISKHEDWKQFDFRFSVTSTYADLSGFYREVEHQGYKISFQRIADSFIDDLVNEGKLYLFQIYNKDFSPYSKGKPNLHTLYWKMLFDSKNLEDVVYKLNGQAEVFYRKKSIAEKNNVIHKANENLPNKNPDNPKATSKFDYDIVKDKRYTLDKFQFHVPITMNFKADGILNINPRVNKFLKDNPDVNIIGIDRGERHLLYYTLINQKGEILGQNTLNIISNEKQKVDYHNLLDKKEGDRATARQEWGVIETIKELKEGYLSQVIHKLTDLMIANNAIIVMEDLNFGFKRGRQKVEKQVYQKFEKMLIDKLNYLVDKNKKANELGGLLNAFQLANKFESFQKMGKQNGFIFYVPAWNTSKTDPATGFVDFLKPRYENLKQAKEFFEKFDSIHFNSKANYFEFAFDYKNFTEKAEGGRTKWTVCTTNEDRYAWNKTLNNNRGGQEKYDVTERLKSLFDEKEVEYKNGNDLKPQIARQESADFFKALMKNLNITLSLRHNNGEKGDKEQDYILSPVADDKGRFFDSRKAGDDMPKDADANGAYHIAMKGLWCLEQISKADDLKKVKLAISNKEWLQFIQEKVT

SEQ ID NO: 743 - protein, 1252 aa, unidentified
  REGION 1..1252: note = Cas Enzyme sequence
MFMEEFNFTNLYSQSITLCFGLIPQGKTLQHIQENGLLEQDAQRAVDYVEVKKMIDEYHKLFIDRVLNNFKLKVDSDGKKDSLEEYFLYYNIGKKTDSQKADYEKVQTNLRKAIADHLTKDKYFKNLNKKELLTEDLYNINLMRELSSDERLLVEGFHNFTTYFKGLNEARQNMYSAENQSTAIPYRLIHDNLPKFIDNIKTFDIVANSDVATQFNSLYAQMKEYLNVERISEMFRLDYFNVVLTQTQIAVYNAIIGGKSLEDGSRIQGLNELINLYNQKHKDAKLPKFKLLFKQILSDREAISWLPEKFENDNELLRAIQQEYQILSEMILGDRNLKNLLVSIDSYDLNRIYIANDVQLTQISQRLYKDWNAIHHAVLLDLQRTVTRGKKETDGDYLDRLERLVKKADSYSIGYLNDCIDKSELSIKSHVETYFASLGAINESTEQRVNLFTQISIHYMEAQSLLTQEYPMDGNLAQNQDAVDRIKSLMDALKALQHFVKPLLGKGDEPDKDERFYGELDGLWRAMDEITPLYNKVRNHMTRKPYSTEKIKLNFENATLMDGWDLNKEPSNTTVILRKDGLYYLAIMDKQSNRVFMADRLPDGGECYEKMEYKLLPGANKMLPKVFFSKSRIKEFNPSPTLLAHYAEGTHKKGTNFSKADCHELIDFFKVSIQKHPDWSKFDFHFSDTSTYEDMSGFYREVEQQGFKLSFRPVSVAYIDKLVEAGKVYLFQIYSKDFSPFSKGKPNLHTLYWRMLFDERNLKDVVYKLNGEAEVFFRKASLKKERPEHPAHQPIVNKNPNNPKKTSTFEYDLVKNRRYTVDNFQFHVPITMNFKATGGDMINGRVYDYLKETKDTYVIGIDRGERHLLYLTLIDPHGRIVKQCSLNEMVNEYQNVVRKTNYHDLLDVREAERKQARQSWMTIQNIKELKEGYLSQVVHMISQMMVEYKAIVVMEDLNMGFKRGRQKVEKQVYQKFEKMLIDKLNYLVDKDADVDSMGGLLHAYQLTNKFRSFKQLGKQCGFLFYVPAWNTSKIDPTTGFVNLLDTRYESIASSCSFLHKFKLIRYNAQSDWFEFKLDYNDFDKRAEGTRTEWTLCTYGERVVTFRNKEKNSEWDNKTVNLTEEFKKFFYQYNVDIHGNLKDQILERNEKSFFEGLYGLLKMTLQMRNSIMGTDVDYLVSPVMNAEGSFYDSRKAGQGLPENADANGAYNIALKGLWVLQQIRQSKEQKDVKLAITNKEWLRFVQDRPYSKD

SEQ ID NO: 744 - protein, 1252 aa, unidentified
  REGION 1..1252: note = Cas Enzyme sequence
MKQFTDLYPVSKTLRFELQPIGKTKEHIEKNGILQRDEKRAEDYKIVKGFIDEYHKQFIKERLWSFKLPLHSEGHLDSLEEYQALYELSKRNDAQEAEFTEIKDNLRSIIAKRLTESGSAYERIFKKELIREDLIDFLESEEDKDIVRQFADFTTYFSGFHENRRNMYVAEEKSTAIAYRLIHQNLPKFMDNMKAFAKIAETSVAEHFTDIYEGWKEYLNVGSIEEIFRLDYFTETLTQPHIEVYNYIIGKKILEDGTEIKGVNEYVNLYNQQQKDKSKRLPFLVPLYKQILSDRDKLSWLAEEFDSDEKMLAAINESYSQLHDLLMGNENESLRSLLLHIKDFNLSQINITNDFSITDISQHLFSRYDVFTNGIKDELRNITPRKKKESDEAFEDRISKIFKTQKSFSIDFLDKLPQPMMDDGKSRTIEDYFMTLGAINTETTQKVNLFAQIENAYEDARAILQMKDTGDTLSQNKSAVAKIKALLDALKDLQHFIKPLLGSGEENEKDELFYGSFQMMWDELDTVTPLYNKVRNWLTRKPFSTEKIKLNFDNSQLLGGWDVNKEPDCTGVILRKDSYYYLGIMDKKFNRIFEADATPSDGDCYDKIDYKLLPGANKMLPKVFFSKSRIDEFAPSEAIVSSYKRGTHKKGADFNLAECHRLIDFFKQSINKHEDWSKFNFHFSDTKTYEDISGFYREVEQQGYMLSSHPISSSYVNQLVDEGKLYLFRIWNKDFSESSKGTPNLHTLYWKMLFDERNLADVVYKLNGQAEVFYRKASIKPENRIVHKANQPIANKNELNTKRASTFEYDIIKDKRYTVDKFQFHVPITINFKAAGQTNINPIVQDAIRQGGFSHIIGIDRGERHLLYLSLIDLKGNIVKQMTLNDIINEYKGQTYKTNYHDLLAKREGDRTEARRSWETIETIKELKEGYLSQVVHIISKMMVEYNAIVVLEDLNTGFMRGRQKIERQVYEKFEKMLIEKLNCYIDKQLSSTDEGGLLHPLQLTCDAQKWKRAHQCGCLFYIPAWNTSKIDPVTGFVNLINTSRYDTREKARGFFSKFQRISFNEKKDWFEFTLDYNDFDYIAKAEGTRTQWTLCTQGERIRTFRNPQKNHQWDDERIVLTDAFKQLFDKYDIDINGNLKEAISAQTDAQFFKELLGLTKLLLQMRNSITNSEEDYLLSPVADGAGHFFDSREGISSLPIDADANGAYNIARKGLLVIRKIQETPDGEKPSLTITNKEWLLFAQTKPYLID

SEQ ID NO: 745 - protein, 1252 aa, unidentified
  REGION 1..1252: note = Cas Enzyme sequence
MKNLKQFIGIYPVSKTLRFELKPIGRTQEWIEKNRVLENDESKAADYPVVKKLIDEYHMVCILESMKNVHLDWTPLKEAIEDYQKTKSDEAKKRLEAEQTMMRKQIAAAIKDFKHYKELTAATPSDLITSVLPEFSDNEALKSFQGFASYFIGFQENRNNIYSPDAISTGVPYRLVHDNFPKFLSNLEVYDKIKATCPEVIQQASEEMRPFLEGVLIDDIFSLDFYNSLLTQDGIDFFNRVIGGVSEEGKQKYRGINEFSNLYRQQHKELAVSKKALTMMPLFKQILSDRDTLSYIPAQIETEEELVASIVQFYEHITHFERDGKTINVLNELVALLSKIDTYNPDGICVTANKLTDISQKLFGKWSVIEEKLKEKAVQQFGDISVAKNKKKVDAYLSRKAYCLSELCFNNDNNFSHYYSELPQTLNAICGYWMQFNEWCKSDEKQKFLNNPTGTEVVKSLLDAMMEISHKCSVLVMPEEYEVDKSFYNEFIPLYEELDTLFLLYNKVRNYLTRKPSDVKKFKLNFETPSLADGWDQNKERANKAILLFKDGLSYLGIMNAQNMPNLNQKWSADESHYSKMVYKLIPGPNKMLPKVFFSKKGLDTFNPSRHILRIKAEETFKKGSPNFKLADLHDLIDFYKDAINRHPDWSKFNFQFADTNAYEDIAGFYRDIANQAYKITFSDIPAWQISDWIDNGQLYLFQLYNKDYAEGAHGRKNLHTLYWENLFTDENLSNLVLKLNGQAELFCRPQSIKKSVSHKMGSKMLNRRDKSGMPIPESIYRSLYQFYNGKKKESELTAAEKQYVDQVVVKDVTHEIIKDRRYTKQKYFFHVPLTFNANADGNEYINENVLNYLKDNPDVNIIGIDRGERHLIYLTLINQRGEILKQKTFNVVNSYNYQAKLEQREKERDEARKSWDSVGKIKDLKEGFLSAVIHEITKMMIENNAIVVLEDLNFGFKRGRFKVERQVYQKFEKMLIDKLNYLSFKDREVGEEGGILRGYQMAQKFVSFQRLGKQSGFLFYIPAAYTSKIDPVTGFVNHFNFNDITNAEKRKEFLMKMERIEMKNGHIEFEFDYRKFKTFQTDYQNLWTVSTFGKRIVMRIDDKGYKQMLDYEPTKDIINAFKNKGLQLTEGSDLKAMIADIEANAANASFFSTMLYAFQKTLQMRNSNAATEEDFILSPVARDGHYFCSTDEANKGKDAEGNWVSKLPVDADANGAYHIALKGLYLLRNPETKKIENEKWLQFMVEKPYLE

SEQ ID NO: 746 - protein, 1252 aa, unidentified
  REGION 1..1252: note = Cas Enzyme sequence
MKNLKKFIGVYPISKTLRFELRPVGKTQEWIEKNKVLENDESKAADYPVVKKLIDEYHKVCIRESMKNVHLDWNPLKEAIEEYQKTKSDEAKKRLETEQTMMRKQIATAIKDFKHYKELTAATPSDLITSVLPEFSDNEALKSFRGFASYFIGFQENRNNIYSPDAISTGVPYRLVHDNFPKFISNLEVYDKIKATCPEVIQQASEEMQPFLEGVMIDDIFSLDFYNSLLTQDGIDFFNRVIGGVSEEDKQKYRGINELVNLYRHQHKDLAGSKKAMTMIPLFKQILSDRDTLSYIPAQIETEEELVTSITQFYEHITYFERDGKTIDVLNELAALLSKIDTYNPDGICVTANKLTDISQKVFGKWSIIEEKLKDKAIQQYGDICVAKNKKKVDAFLSRKAYCLSDLCFDDEFHISQYFSDIPQTLNAIDGYWLQFNEWCKNEEKQKFLNNPTGTDVVKSLLDAMMELSHKCSVLVMPEEYEVDKSFYNEFIPLYEELDTLFLLYNKVRNYLTRKPSDVKKFKLNFESPSLANGWDQNKEMKNNAILLFKNGKSYLGVLNAKNKAKIKNAKCDASSTSYKKMIYKLLSDPSKDLPHKIFAKGNLDVYKPSEYILEGRESGKYKKGPNFDKKFLHDFIDFYKAAIAIDPDWSKFNFKYTPTELYEDIGSFFSEIKKQAYKISFTDIPESQVDEWVGNGQLYLFQLYNKDYAEGAHGRKNLHTLYWENLFTDENLNNLVLKLNGQAELFCRPQSIKKPVSHKVGSKMLNRRDKSGMPIPESIYRSLYQFYNGKKKESELTAAEKQYMDQVIVKDVTHEIIKDRRYTRQEYFFHVPITFNANADGNEYINENVLNYLKGNPDVNIIGIDRGERHLIYLTLINQLGEILKQKTFNVVNSYNYQAKLEQREKERDEARKSWDSVGKIKDLKEGFLSAVIHEISKMMIEHNAIVVLEDLNFGFKRGRFKVERQVYQKFEKMLIDKLNYLSFKDREAGEEGGILRGYQMAQKFVSFQRLGKQSGFLFYIPAAYTSKIDPVTGFVNHFNFNDITNAEKRKEFLMKMERIEMRNGNIEFEFDYRKFKTFQTDYQNLWTVSTYGKRIVMRMDDKGYKQMVDYEPTKEIINAFKNKGIQLSEGSDLKVLIVDIEANAVNASFFNTLLYAFQKTLQMRNSNAATEEDYILSPVAKDGHYFCSIDEANKGRDTKGDWVSKLPVDADANGAYHIALKGLYLLRNPEKKKIENEKWLQFMVEKPYLE

SEQ ID NO: 747 - protein, 1252 aa, unidentified
  REGION 1..1252: note = Cas Enzyme sequence
MKNLKKFIGVYPISKTLRFELRPVGKTQEWIEKNKVLENDESKAADYPVVKKLIDEYHKVCIRESMKNVHLDWNPLKEAIEEYQKTKSDEAKKRLETEQTMMRKQIATAIKDFKHYKELTAATPSDLITSVLPEFSDNEALKSFRGFASYFIGFQENRNNIYSPDAISTGVPYRLVHDNFPKFLSNLEVYDKIKATCPEVIQQASEEMQPFLEGVMIDDIFSLDFYNSLLTQDGIDFFNRVIGGVSEEDKQKYRGINELVNLYRHQHKDLAGSKKAMTMIPLFKQILSDRDTLSYIPAQIETEEELVTSITQFYEHITYFERDGKTIDVLNELAALLSKIDTYNPDGICVTANKLTDISQKVFGKWSIIEEKLKDKAIQQYGDICVAKNKKKVDAFLSRKAYCLSDLCFDDEFHISQYFSDIPQTLNAIDGYWLQFNEWCKNEEKQKFLNNPTGTDVVKSLLDAMMELSHKCSVLVMPEEYEVDKSFYNEFIPLYEELDTLFLLYNKVRNYLTRKPSDVKKFKLNFESPSLANGWDQNKEMKNNAILLFKNGKSYLGVLNAKNKAKIKNAKCDASSTSYKKMIYKLLSDPSKDLPHKIFAKGNLDVYKPSEYILEGRESGKYKKGPNFDKKFLHDFIDFYKAAIAIDPDWSKFNFKYTPTELYEDIGSFFSEIKKQAYKISFTDIPESQVDEWVGNGQLYLFQLYNKDYAEGAHGRKNLHTLYWENLFTDENLNNLVLKLNGQAELFCRPQSIKKPVSHKVGSKMLNRRDKSGMPIPESIYRSLYQFYNGKKKESELTAAEKQYMDQVIVKDVTHEIIKDRRYTRQEYFFHVPITFNANADGNEYINENVLNYLKGNPDVNIIGIDRGERHLIYLTLINQRGEILKQKTFNVVNSYNYQAKLEQREKERDEARKSWDSVGKIKDLKEGFLSAVIHEISKMMIENNAIVVLEDLNYGFKRGRFKVERQVYQKFEKMLIDKLNYLSFKDREAGEEGGILRGYQMAQKFVSFQRLGKQSGFLFYIPAAYTSKIDPVTGFVNHFNFNDITNAEKRKDFLMKMERIEMRNGDIEFEFDYRKFKTFQTDYQNLWTVSTYGKRIVMRMDDKGYKQMVDYEPTKEIINAFKNKGIKLSEGSDLKVLIADIEANAVNASFFNTLIYAFQKTLQMRNSNAATEEDYILSPVAKDGHYFCSTEEANKGRDTQGNWVSRLPVDADANGAYHIALKGLYLLRNPETKKIENEKWLQFMVEKPYLE

SEQ ID NO: 748 - protein, 1252 aa, unidentified
  REGION 1..1252: note = Cas Enzyme sequence
MKDLKQFTNQYSVSKTLRFELQPIGKTKENIEKNGILQRDEKRAEDYKIVKEFIDEYHKQFIKERLWDFKLPLHSKGRLDTLEEYQALYELSKRDDAQEAEFSEVKDNLRSIIAKRLTESGSAYERIFKKELIREDLIDFLESEEDKDIVRQFADFTTYFSGFHENRRNMYVADEKSTAIAYRLIHQNLPKFMDNMKAFAKIAETPVAEHFADIYEGWKECLNVGSIEEIFRLDYFSETLTQTHIEVYNYIIGKKILEDGTEIKGINEYVNLYNQQQKDKSKRLPFLVPLYKQILSDREKLSWLAEEFDSDEKMLAAINESYNHLHDLLMGNENESLRSLLLHIKDFNLSQINITNDLSLTDISQHLFGRYDVFANGIKDELRNITPRKKKEGEEDFEDRISKIFKTQKSFSIDFLDKLPQPVMDDGKPRSIEDYFMTLGAVNTETTQKENLFAQIENAYADAHAILQMKDTGDTLSQNKPAVAKIKALLDVLKDLQRFIKPLLGSGEENEKDELFYGSFQMMWDELDTVTPLYNKVRNWLTRKPFSTEKIKLNFDNSQLLGGWDVNKEPDCTGVILRKDGYYYLGIMDKKSNRIFEADVTPSDGDCYDKIDYKLLPGANKMLPKVFFSKSRIDEFAPSEAIVSSYKRGTHKKGADFNLAECHRLIDFFKQSINKHEDWSKFNFHFSDTKTYEDISGFYREVEQQGYMLSSHPVSSSYINQLVDEGKLYLFRIWNKDFSEFSKGTPNLHTLYWRMLFDERNLADVVYKLNGQAEVFYRKASIKPENRIIHKANLPIANKNELNEKRASVFEYDIIKDKRYTVDKFQFHVPITINFKATGQTNINPIVQDVIKQGGFSHIIGIDRGERHLLYLSLIDLKGNIVKQMTLNDIVNEYKGQAYKTNYHDLLAKREGDRTDARRSWEAIETIKELKEGYLSQVVHIISKMMVKYNAIVVLEDLNTGFMRGRQKIERQVYEKFEKMLIEKLNCYIDKQLSPTDEGGLLHPLQLTCDAQKWKRSHQCGCLFYIPAWNTSKIDPVTGFVNLLDTHYDTREKARVFFSKFQRISFNAQKNWFEFALDYNDFTAKAEGTRTQWTLCTQGERIRTFRNPQKNHQWDDERIVLTDAFKQLFDKYDIDINGNLKEAISAQTDAQFFKELLGLMKLLLQMRNSITNSEEDYLLSPVADDAGHFFDSREGISSLPIDADANGAYNIARKGLWVIRKIQETPEGEKPSLTITNREWLQFAQTKPYLND

SEQ ID NO: 749 - protein, 1252 aa, unidentified
  REGION 1..1252: note = Cas Enzyme sequence
MKDLKKFIGIYPVSKTLRFELRPVGRTQEWIEKNKVLESDEQKAEDYPKVKALIDDYHKVCIRESLKSVHLDWQPLKAAIEANRKENNDDTKKALEKEQENMRKQIATTLKDFRHFKELTAPTPQKLIDNVFPDIYDDEALKSFNRFAIYFRGFQENRNNIYSADAISTSVPYRLVHDNFPKFLANIEVYENIKAICPEVIDQVATEMQPFLEGVMIDDIFTLDFFNSLLTQDGIDFFNQVLGGVTEEGKQKYRGINEFSNLYRQQHPELGSKKKALTMIPLFKQILSDRETLSYIPQQIESEQQLIEAINQFYTYITNYEKNGKTVNILSELTILINGISNYNPDGIFFSAKQIIDVSQKVFGHWSIINDKLQELAIEKFGSIEVAKNKKKIDSYLAKDAFSLSELPFDDEHKLSDYFATFPQAVNNIHSYWLQYKEWCKGESKQLFLNNPNGTEIVKNLFDSMMDVLHKASVLLAPEEYDVDKDFYNEFIPLYVEFSNVIFLYNRVRNYLTKKPSDIKKFKLNFGVPSLGDGWDLNKERNNKAIILFKDGLSYLGIMNAKNQPRIVGSDQPDGKCYSKMIYKFLPGPNKMLPKVFFSKKGQETFKPSRQILDIYESGSFKKGSPQFSLINLYALIDFYKDAISKHEDWSKFGFKFSPTESYEDISSFFKEISKQSYIIRFTNISELQVNEWIENGQLYLFQLYNKDYAEGAHGRKNLHTLYWENLFSPENLNNLVLKLNGQAELFYRPQSIKTPVTHKMGSKMLNRRDKSGMPVPESIYRSLYQYFNGRKPESELSDAEKAYISQVVVKDVTHEITKDRRYTKPEFFFHVPITFNLNTDGSDFINEKVQDYLMDNLDVNIIGIDRGERHLIYLTLINQKGEILKQKTFNVVSDYNYQAKLAQREQERDEARKSWQSVGKIKELKEGFLSAVIHEIAKMMIENNAIVVLEDLNSGFKRGRFKVERQVYQKFEKMLIDKLNYLSFKDHKADEEGGILRGYQLAQQFTSFQRLGKQSGFLFYIPAAYTSKIDPITGFVNHFNFNDITNAEKRKDFFMKMERIEMRNGDIEFEFDYRKFKTYQTDYQNLWTVSTFGKRIVMQPDERGHKIMKDFYPTEQIIQAFESKGIMIEEGTDFRALLSSIEANAANASLYSSLFYAFQKTLQMRNSNAATEEDYILSPSAVDGKHFCSTDEANKGRDANGNWISKLPVDADANGAYHIALKGLYLLMNPQTKKIENEKWLQFMVEKPYKE

SEQ ID NO: 750 - protein, 1252 aa, unidentified
  REGION 1..1252: note = Cas Enzyme sequence
MKTIFENFTHQYSVSKTLRFELIPQGKTRDFIEQKGLLQQDEDRAGKYSKVKKTIDEYHKNFIEKSLNGLKLEGLEQYKTLYLKQEKDDKDKKLFDKEKENLRKQIANAFRNNEKFKTLFAKELIKNDLMNFACEEDKKNVKEFEAFTTYFTGFHQNRANMYVADEKAISIAYRLINENLPKFIDNLKIFEKIKREAPELFAKLNNVLNDMKEFIKDNTLEEIFSLDYFNETLTQKGIDLYNAVIGGRTAEEGKKKIKGLNEYINTDFNQKQADKKKRQPKFKQLYKQILSDRQSLSFIAEAFKNDTEMLEAIEKFYVNELLHFSNEGKSINVLDAIKNAVSNLESFNLTKIYFRSGISLTDVSKKVFGDWSIINRALDNYYATTYPIKPREKAEKYEERKEKWLKQDFNVSLIQTAIDEYDNETVKEKNNGKVIADYFAKFCDDKESDLIHKVNEGYIAVMDLLNTPYPENEKLGSNKDQVKQIKAFMDSIMDIMHFVRPLSLKDTDKEKDETFYSLFTPLYDRLTQTIALYNKVRNYLTQKPYSTEKIKLNFENSTLLGGWDLNKETDNTAIILRKDNLYYLGIMDKRHNRIFRNVPKADKKDSCYEKMVYKLLPGANKMLPKVFFSQSRIQEFTPSAKLLENYENGTHKKGDNFNLNHCHKLIDFFKDSINKHEDWKNFDFRFSATSTYADLSGFYHEVEHQGYKISFQSVADSFIDALVNEGKLYLFQIYNKDFSPFSNGKPNLHTLYWKMLFAEENLKDVVYKLNGEAEIFYRKSSIAAKNRTIHKAKEILKNKNPDNPKATSRFEYDIVKDKRYTIDKFQFHVPITMNFKAEGIFNMNQRVNQFLKANPDINIIGIDRGERHLLYYILINQKGKILKQDTLNVIANEKQKVDYHNLLDKKEGDRATARQEWGVIETIKELKEGYLSQVIHKLTDLMIENNAIIVMEDLNFGFKRGRQKVEKQVYQKFEKMLIDKLNYLVDKNKKANELGGLLNAFQLANKFESFQKMGKQNGFIFYVPAWNTSKTDPATGFIDFLKPRYENLKQAKDFFEKFDSIHLNSKADYFEFAFDFKNFTEKADGGRTKWTVCTTNDDRYAWNRALNNNRGSQEKYDITAELKSLFDGKVDYQSGKDLKQQIASQESAEFFRTLMKYLSVTLSLRHNNGEKGATEQDYILSPVAYSMGKFFDSRKAVDDMPKNADANGAYHIALKGLWCLRQIREAKDLKKVNLAISNKEWLQFVQDRPFAK

SEQ ID NO: 751 - protein, 1252 aa, unidentified
  REGION 1..1252: note = Cas Enzyme sequence
MKDLKQFIGIYPVSKTLRFELRPIGKTQEWIEKNRVLEQDENKAADYPVVKKLIDEYHKVCIRESMKNVHLDWTPLKDAIEEYQKTKSDEAKKRLEAEQTMMRKQIAAAIKDFKHYKELTAATPSDLITSVLPEFSDNEALKSFRGFASYFIGFQENRNNIYSPEAISTGVPYRLVHDNFPKFLSNLEVYDKMKTTCPEVIQQASEEMQSFLEGVMIDDIFSLDFYNSLLTQDGIDFFNRVIGGVSEEGKQKYRGINEFSNLYRQQHKELAGAKKAMTMIPLFKQILSDRETLSYIPEQIKTDKELETSICQFQHHMFSCEIDGKDVNIVRNLSVLLQVIDCYRPEGICIAAKKLSEVSQKVFGKWSYIEEKLKERAIELYGDISVAKNKKKIDAFLSRKAYSLSDLCFDDEFRFSLYFSDLEQIINAINGYWVQFVMWCDNGEKQKFLNNPMGTEVVKGLLDAYMELYHKCSVLVMPEEYDVDKSFYNEYIPLYEELDTLFLLYNKVRNYLTQKPSDVKKFKLNFESPSLADGWDQNKERANKAILLFKDGLSYLGIMNAQNMPNLNQKWPADESHYSKMVYKLIPGPNKMLPKVFFSKKGLDTFNPSRHILRIKEEETFKKGSPKFKLADLHDLIDFYKDAIDRHPDWSKFNFQFADTKAYEDIAGFYRDIANQAYKITFSDIPVRQINEWIDNGQLYLFQLYNKDYAEGAHGRKNLHTLYWENLFTDENLSSLVLKLNGQAELFCRPQSIKKPVSHKIGSKMLNRRDKSGMPIPESIYRSLYQFYNGKKKESELTAAEKQYMDQVIVKDVTHEIIKDRRYTRQEYFFHVPLTFNANAEGNEYINENVLNYLKDNPDVNIIGIDRGERHLIYLTLINQRGEILKQKTFNVVNSYNYQAKLEQREKERDEARKSWDSVGKIKDLKEGFLSAVIHEISKMMIENNAIVVLEDLNFGFKRGRFKVERQVYQKFEKMLIDKLNYLSFKDCEAGEEGGILRGYQMAQKFISFQRLGKQSGFLFYIPAAYTSKIDPVTGFVNHFNFNDITNAEKRKDFLMKMERIEMRNGNIEFEFDYRKFKTFQTDYQNIWTVSTFGKRIVMQIDDKGYKKMVDYEPTKDVINAFKNKGIQLTEGSDLKALIAEIEANAANAGLFSTLLYAFQKTLQMRNSNAATEEDFILSPVARDGHQFCSTDEANKGKDAQGNWVSKLPVDADANGAYHIALKGLYLLRNPETKKIENEKWLQFMVEKPYLE

SEQ ID NO: 752 - protein, 1252 aa, unidentified
  REGION 1..1252: note = Cas Enzyme sequence
MKDLKQFIGIYPVSKTLRFELRPVGKTQEWIEKNRVLENDESKAADYPVVKKLIDEYHKVCIRESMKNVHLDWAPLKEAIEEYQKTKSDEAKKHLEAEQTMMRKRIAAAIKDFRHYKELTAATPSDLITSVLPEFSDNEALKSFRGFASYFIGFQENRNNIYSPDAISTGVPYRLVHDNFPKFLSNLEVYDKIKATCPEVIQQASEEMQPFLEGVMIDDIFSLEFYNSLLTQDGIDFFNRVIGGVSEEGKQKYRGINEFSNLYHQQHKELAGSKKALMMIPLFKQILSDRDTLSYIPAQIETENELVASICQFYEHITHFERDGKTINVLNELVALLSKIDTYNPDGICVTANKLTDISQKIFGKWSIIEENLKEKAVQQFGDISVAKNKKKVDAYLSRKAYCLSDLCFDDKYHISQYFSDIPQTLNAIEGYWLQFNEWCKNDEKQKFLNNPTGTDVVKSLLDAMMELSHKCSVLVMPEEYEVDKSFYNEFIPLYEELDTLFLLYNKVRNYLTRKPSDVKKFKLNFESPSLADGWDQNKERANKAILLFKDGLSYLGIMNAQNMPDINQQWPKDDNHFSKMVYKLIPGPNKMLPKVFFSKKGLDTFNPSRHILRIKEEETFKKGSPNFKLADLHDLIDFYKDGINRHPDWSKFNFLFADTESYEDIAGFYRDIANQAYKITFSDIPVWQINDWIDNGQLYLFQLYNKDYAEGAHGRKNLHTLYWENLFTDENLSNLVLKLNGQAELFCRPQSIKKPVSHKMGSKMLNRRDKSGMPIPESIYRSLYQFYNGKKKESELTAVEKQYLDQVIVKDVTHEIIKDRRYTRQEYFFHVPLTFNANAEGNEYINENVLNYLKDNPDVNIIGIDRGERHLIYLTLINQRGEIIKQKTFNVVNSYNYQAKLEQREKERDEARKSWDSVGKIKDLKEGFLSAVIHEISKMMIENNAIVILEDLNFGFKRGRFKVERQVYQMFEKMLIDKLNYLSFKDREAGEEGGILRGYQMAQKFVSFQRLGKQSGFLFYIPAAYTSKIDPVTGFVNHFNFNDITNAEKRKEFLMKMERIEMRNGNIEFEFDYRKYKTFQTDYQNLWTVSTYGKRIVMRIDDKGYKQMVDYEPTKDIINAFKYKGIQLTEGSNLKAMIADIEANAANASFFSTLLYAFQKTLQMRNSNAATEEDFILSPVAKDGRYFCSTDEANKGRDTQGNWVSKLPVDADANGAYHIALKGLFLLKNPETKKIENEKWLQFMVEKPYLE

SEQ ID NO: 753 - protein, 1252 aa, unidentified
  REGION 1..1252: note = Cas Enzyme sequence
MKDLKQFIGIYPVSKTLRFELRPIGRTLEWIQKNKILESDQQRADDYPKVKTLIDNYHKACIYESLHNVHLDWLPLKEAIVTHRKENTEDTKKRLEKEQESMRKKIASAIKDFRHYKELTAPTPKDLINKVFPSIYNDEALKSFNRFALYFKGFQENRNNIYSPEAISTGVPYRLVHDNFPKFLADIEVYENIKAVCPEVLGQVSTEMSPFLEGVMIDDIFRLDFYNSLLTQDGIDFFNQVIGGVSEKGKQKYRGVNEFANLYRQKHPELGNMKKALTMIPLFKQILSDRETLSYIPQQIESEQQLEDAINQFYTHITNYQRDGKTLNVLNELAKLTADIGSFTPEGIFISSKYLTDVSQRVFGHWGGINDKLTEYAIKKFGSIEKAKNKKKVESYLNKDAFSLSELCFDEDKSLSPYFSDLLDRTNLIHSNWLQYKEWCKGESKQLFLNNEDGTEIVKNLLDSIMEFLHRCEVLVVSVDNDLDNDFYNKFLPLYAELENVILLYNRVRNFITKKPSDIKKIKLNFDRPTLGDGWGLANEKKNKAILLFKDGLSYLGIMNVKGTLNFADARTDGEPTYKKMVCKNLSKPFMDFPHTFFSQKGKDTFLPSDNVLAIYTSGSFKKDSPSYTAENLYELINFYKEAINKHEEWREFGFVFSPTESYTDIGAFYNEVAKQAYKISFVEVSEQKVNDWVEKGELYLFKLHNKDYAEGAHGRKNLHTLYWENLFSSENLSNFVLKLNGQAELFYRPQSIKKSVVHKIGSKMVNRRDISGMPIPESVYRNLYLYFNGKKQEAELTEVEKSYLNQVVVKEVSHDITKDRRYTQPEFFFHVPISFNQNADGNEFINTKVLDYINNNPDVNIIGIDRGERHLIYLTLINQRGDILKQKTFNMVANFNYHAKLEQREQERDQARKSWKSVGKIKELKEGFLSAVIHEIAKMMIDNNAIVVLEDLNFGFKRGRFKVERQVYQKFEKMLIDKLNYLAFKDCRVMDDGGILRGYQLSQKFTSFQKLGKQSGFLFYIPAAYTSKIDPTSGFVNLFNFNDITNVEKRKDFFMRMNRIEMKSGEVEFEFDYRKFKTFQTDYQNVWTINTYGKRIVMQLDEMGHKKMEDFYPTCHIINAFKKKGITISDGIDIKAILSAIEANAANASFYSALFYAFQKTLQMRNSNAITEEDYILSPVAVDGRHFFSIDEANKGRDASGNWISNLPVDADANGAYHIALKGLYLLMNPLTKKIENKKWFQFMIEKPYRS

SEQ ID NO: 754 - protein, 1252 aa, unidentified
  REGION 1..1252: note = Cas Enzyme sequence
MKNLKKFIGVYPISKTLRFELRPVGKTQEWIEKNKVLENDESKAADYPVVKKLIDEYHKVCIRESMKNVHLDWNPLKEAIEEYQKTKSDEAKKRLETEQTMMRKQIATAIKDFKHYKELTAATPSDLITSVLPEFSDNEALKSFRGFASYFIGFQENRNNIYRPDAISTGVPYRLVHDNFPKFLSNLEVYDKIKATCPEVIQQASEEMQPFLEGVMIDDIFSLDFYNSLLTQDGIDFFNRVIGGVSEEDKQKYRGINELVNLYRHQHKDLAGSKKAMTMIPLFKQILSDRDTLSYIPAQIETEEELVTSITQFYEHITYFERDGKTIDVLNELAALLSKIDTYNPDGICVTANKLTDISQKVFGKWSIIEEKLKDKAIQQYGDISVAKNKKKVDAYLSRKAYCLSDLCFDDEFHISQYFSDIPQTLNTIDGYWLQFNEWCKNEEKQKFLNNPTGTDVVKSLLDAMMELSHKCSVLVMPEEYEVDKSFYNEFIPLYEELDTLFLLYNKVRNYLTRKPSDVKKFKLNFESPSLANGWDQNKEMKNNAILLFKNGKSYLGVLNAKNKAKIKNAKCDASSTSYKKMIYKLLSDPSKDLPHKIFAKGNLDVYKPSEYILEGRESGKYKKGPSFDKKFLHDFIDFYKAAIAIDPDWSKFNFKYTPTELYEDIGSFFSEIKKQAYKISFTDIPESQVDEWVGNGQLYLFQLYNKDYAEGAHGRKNLHTLYWENLFTDENLNNLVLKLNGQAELFCRPQSIKKPVSHKVGSKMLNRRDKSGMPIPESIYRSLYQFYNGKKKESELTAAEKQYMDQVIVKDVTHEIIKDRRYTRQEYFFHVPITFNANAYGNEYINENVLNYLKGNPDVNIIGIDRGERHLIYLTLINQRGEILKQKTFNVVNSYNYQAKLEQREKERDEARKSWDSVGKIKDLKEGFLSAVIHEISKMMIENNAIVVLEDLNYGFKRGRFKVERQVYQKFEKMLIDKLNYLSFKDREAGEEGGILRGYQMAQKFVSFQRLGKQSGFLFYIPAAYTSKIDPVTGFVNHFNFNDITNAEKRKDFLMKMERIEMRNGDIEFEFDYRKFKTFQTDYQNLWTVSTYGKRIVMRMDDKGYKQMVDYEPTKEIINIFKKKGIQLTEGSDLKVLIADIEANTVNASFFNTLLYAFQKTLQMRNSNAATEEDYILSPVAKDGHYFCSTEEANKGRDTQGNWVSRLPVDADANGAYHIALKGLYLLRNPETKKIENEKWLQFMVEKPYLE

SEQ ID NO: 755 - protein, 1252 aa, unidentified
  REGION 1..1252: note = Cas Enzyme sequence
MENLKQFIGIYPVSKTLRFELRPVGKTQEWIEKYKVLENDESKAADYPVVKKLIDEYHKVCIRESMKNVRLDWGPLKEAIEDYQKTKSDEAKKRLETEQAMMRKQIAAAIKDFKHYKELTAATPSDLITSVLPEFSDNEALKSFRGFASYFIGFQENRNNIYSSDAISTSVPYRLVHDNFPKFLSNLEVYNKIEATCPEIIQQASEEMQPFLEGVMIDDIFSLDFYNSLLTQDGIDFFNRVIGGVSEEGKQKYRGINELVNLYRQQHKEFEGSKKAMTMIPLFKQILSDRDTLSYIPAQIVTEEELVASINQFYEHITHLDRDGKVINILNELVALLSKIDTYNPDGICVTANKLTDISQKIYGKWSIIEEKLKDKAIQQYGDISVAKNKKKVDAYLSRKAYSLSDLCLDGEFHISRYFSDTPQTLNAINGYWLQFNEWCKNEEKQKFLNNPAGTDVVKSLLDAMMELSHKCSVLVMPEEYEVDKSFYNEFIPLYEELDTLFLLYNKVRNYLTRKPSDVKKFKLNFESPTLANGWDQNKEMKNNAILLFKDGKSYLGVLNAKNKAKIKQAKRDTSSTSYKKMIYKLLSDPSKDLPHKIFAKGNFDVYKPSEYILEGRESGKYKKGPTFDKKFLHDFIDFYKAAIAIDPDWSKFNFKYTPTELYEDIGSFFSEIKKQAYKISFTDIPESQVDEWVDNGQLYLFQLYNKDYAEGAHGRKNLHTLYWENLFTDENLNNLVLKLNGQAELFCRPQSIKKPVSHKMGSKMLNRRDKSGMPIPESIYRSLYQFYNGKKKESELTAAEKQYMDQVIVKDVTHEIIKDRRYTRQEYFFHVPITFNANAEGNEYINENVLNYLKDNPDVNIIGIDRGERHLIYLTLINQRGEILKQKTFNVVNSYNYQAKLQQREKERDEARKSWDSVGKIKDLKEGFLSAVIHEISKMMIENNAIVVLEDLNFGFKRGRFKVERQVYQKFEKMLIDKLNYLSFKDRQTSEDGGILRGYQMAQKFVSFQRLGKQSGFLFYIPAAYTSKIDPVTGFVNHFNFNDISNAEKRKEFLMKMERIEMKNGNIEFEFDYRKFKTFQTDYQNLWTVSTYGKRIVMRIDDKGYKQMVDYEPTKEIINVFKNKGIQLSEGSDLKALISDFEANTVNASFFNTLLYAFQKTLQMRNSNAATEEDYILSPVARDGHYFCSTDEANKGRDTQGDWVSRLPVDADANGAYHIALKGLYLLRNPETKKIENEKWLQFMVEKPYLE

SEQ ID NO: 756 - protein, 1252 aa, unidentified
  REGION 1..1252: note = Cas Enzyme sequence
MIDLKQFIGIYPVSKTLRFELRPVGKTQEWIEKNRVLEGDEQKAADYPVVKKLIDDYHKVCIHDSLNHVHFDWEPLKDAIELFQKTKSDEAKKRLEAEQAMMRKKIAAAIKDFKHFKELTAATPSDLITSVLPEFSDDELLKSFRGFATYFSGFQENRNNIYSQEAISTGVPYRLVHDNFPKFLSDLEVFERIKSTCPEVINQASAELQPFLEGVMIDDIFSLDFYNSLLTQNGIDFFNQVIGGVSEKDKQKYRGINEFSNLYRQQHKEIAASKKAMTMIPLFKQILSDRDTLSYIPAQIRTEDELVSSITQFYDHITHFEHDGKTINVLSEIVALLGKLDTYDPNGICITARKLTDISQKVYGKWSVIEEKMKEKAIQQYGDISVAKNKKKVDAFLSRKAYSLYDLCFDEEISFSRYYSELPQTLNAISGYWLQFNEWCKSDEKQKFLNNQTGTEVVKSLLDAMMELFHKCSVLVMPEEYEVDKSFYNEFLPLYEELDTLFLLYNKVRNYLTQKPSDVKKFKLNFESPSLASGWDQNKEMKNNAILLFKDGKSYLGVLNAKNKAKIKDAKGDVSSSSYKKMIYKLLSDPSKDLPHKIFAKGNLDFYKPSEYILEGRELGKYKKGPNFDKKFLHDFIDFYKAAISIDPDWSKFNFQYSPTESYDDIGMFFSEIKKQAYKIRFTDISEAQVNEWVDNGQLYLFQLYNKDYAEGAHGRKNLHTLYWENLFTDENLSNLVLKLNGQAELFCRPQSIKKPVSHKIGSKMLNRRDKSGMPIPESIYRSLYQYYNGKKKESELTVAEKQYIDQVIVKDVTHEIIKDRRYTRQEYFFHVPLTFNANADGNEYINEHVLNYLKDNPDVNIIGIDRGERHLIYLTLINQRGEILKQKTFNVVNSYNYQAKLEQREKERDEARKSWDSVGKIKDLKEGFLSAVIHEITNMMIENNAIVVLEDLNFGFKRGRFKVERQVYQKFEKMLIDKLNYLSFKDREAGEEGGILRGYQMAQKFISFQRLGKQSGFLFYIPAAYTSKIDPVSGFVNHFNFSDITNAEKRKDFLMKMDRIEMKNGNIEFTFDYRKFKTFQTDYQNVWTVSTFGKRIVMRIDEKGYKKMVDYEPTNDIIKAFKNKGILLSEGSDLKTLIAEIEANATNAGFYSTLLYAFQKTLQMRNSNAVTEEDYILSPVAKDGHQFCSTDEANKGKDAQGNWVSKLPVDADANGAYHIALKGLYLLRNPETKKIENEKWLQFMVEKPYLE

SEQ ID NO: 757 - protein, 1252 aa, unidentified
  REGION 1..1252: note = Cas Enzyme sequence
MKNLKKFIGVYPISKTLRFELRPVGKTQEWIEKNKVLENDESKAADYPVVKKLIDEYHKVCIRESMKNVHLDWNPLKEAIEEYQKTKSDEAKKRLETEQTMMRKQIATAIKDFKHYKELTAATPSDLITSVLPEFSDNEALKSFRGFASYFIGFQENRNNIYSPDAISTGVPYRLVHDNFPKFISNLEVYDKIKATCPEVIQQASEEMQPFLEGVMIDDIFSLDFYNSLLTQDGIDFFNRVIGGVSEEDKQKYRGINELVNLYRHQHKDLAGSKKAMTMIPLFKQILSDRDTLSYIPAQIETEEELVTSITQFYEHITYFERDGKTIDVLNELAALLSKIDTYNPDGICVTANKLTDISQKVFGKWSIIEEKLKDKAIQQYGDICVAKNKKKVDAFLSRKAYCLSDLCFDDEFHISQYFSDIPQTLNAIDGYWLQFNEWCKNEEKQKFLNNPTGTDVVKSLLDAMMELSHKCSVLVMPEEYEVDKSFYNEFIPLYEELDTLFLLYNKVRNYLTRKPSDVKKFKLNFESPSLANGWDQNKEMKNNAILLFKNGKSYLGVLNAKNKAKIKNAKCDASSTSYKKMIYKLLSDPSKDLPHKIFAKGNLDVYKPSEYILEGRESGKYKKGPNFDKKFLHDFIDFYKAAIAIDPDWSKFNFKYTPTELYEDIGSFFSEIKKQAYKISFTDIPESQVDEWVGNGQLYLFQLYNKDYAEGAHGRKNLHTLYWENLFTDENLNNLVLKLNGQAELFCRPQSIKKPVSHKVGSKMLNRRDKSGMPIPESIYRSLYQFYNGKKKESELTAAEKQYMDQVIVKDVTHEIIKDRRYTRQEYFFHVPITFNANADGNEYINENVLNYLKGNPDVNIIGIDRGERHLIYLTLINQRGEILKQKTFNVVNSYNYQAKLEQREKERDEARKSWDSVGKIKDLKEGFLSAVIHEISKMMIENNAIVVLEDLNYGFKRGRFKVERQVYQKFEKMLIDKLNYLSFKDREAGEEGGILRGYQMAQKFVSFQRLGKQSGFLFYIPAAYTSKIDPVTGFVNHFNFNDITNAEKRKDFLMKMERIEMRNGDIEFEFDYRKFKTFQTDYQNLWTVSTYGKRIVMRMDDKGYKQMVDYEPTKEIINIFKKKGIQLTEGSDLKVLIADIEANTVNASFFNTLLYAFQKTLQMRNSNAATEEDYILSPVAKDGHYFCSTEEANKGRDTQGNWVSRLPVDADANGAYHIALKGLYLLRNPETKKIENEKWLQFMVEKPYLE

SEQ ID NO: 758 - protein, 1253 aa, unidentified
  REGION 1..1253: note = Cas Enzyme sequence
MKKIDRFINCYPLSKTLRFSLIPIGKTEDNFNAKMMLEEDEKRAESYEKVKEYIDRYHKSYIESVLSALTLSDLDSYAELYYKSGKSDADKDKLNKAEETLRKQISKALTETEGYTAMFSADIIKKILPEFLTDKEEKAVVAEFDSFYTYFIGFAENRKNMYSKEAKASAIPYRCINDNLPKFLDNAKSFNLIKAMITQDSLNKLNEDFIGLTGTTVECIFELKYFSSVLSQSGIDKYNEVIGGYTCSDGTKVQGLNEHINLYNQQVAKEDKSKHLPLLKPLFKQILSDKDSVSFIPEKFSSDDELLQTVNTFYKCSTADTESAEITIEKIRALFSEFDSYDTNAIYVSNGIAVTEISNAVFGSWNTISDGWNAEYSIAHPIKKNQNLEKYEDERRKSYKKIESFSIAELQRLGNIAKSDSSDRTIIKHLSSAVSTAVSDIRNKYIAVEKLLTEKYTAEKKLFSNDDAIALVKNFLDSIKTLERLIKPLNGSGKEEDKDSFFYGEFSPAISALASIDRLYDKVRNYLTQKPYSKDKIKLNFENPVFLSGWTTTKERNNSSIILKDEKYFYLGIMDKDSKSAFVNYPKPQGEDDILQKMCYYQIADPSKDVHNLMVIDGNTVRKTGRIDKKDNQNHILEELKETYLPKDINRIRKTRSFSVLSENFSRDNLNTFIDFYKERIFQYYAEVEFHFKPSCEYKDFSEFTNDAKSQSYHVTFSSISRKHIETLIEKGQLYLFRIYNKDLSEHSKGIPNLHTLYFKMLFDERNIKNVVYQLNGGAEMFYRKASISDAEKVVHPKNQPIKNKNPENQKSESLFSYDIIKDRRFTKRQFSLHIPITLNFKAQGISGINERVRRSLKHSDDNCVIGIDRGERNLIYICVVNSKGEIVEQTSLNEIIGDNGYKVDYRDLLDRKEKERESARQNWTSVENIKELKEGYLSQVVHKICELVIKYDAVIAMEDLNSGFKNSRIKVEKQVYQKFEKMLTDKLNYLVDKKLDPEMNGGILNAYQLTNKDYNRKGVQDGFIFYIPAWLTSKIDPSTGFTDLLKPKYTTVPAAKDYFSRFKSIIYNREADMFEFSFDYSDFPKGSQDYLNSWTICSNGERILTFRNAEKNSAWDNKTVVLTAEFKRLFKEYGIDICSDIKAAILEREEKDFFLRLTNILKLTLQMRNSITGNVDIDYLISPVRNSTGQFYDSRYSDGTLPENADANGAYNIARKALWSIDVLKNTADEDLSKAKLSITNKDWLKYAQEAK

SEQ ID NO: 759 - protein, 1253 aa, unidentified
  REGION 1..1253: note = Cas Enzyme sequence
MKDLKQFIGIYPVSKTLRFELRPVGRTQEWIEKNKVLESDEQKAEDYPKVKALIDDYHKVCIRESLKGVHLDWLPLKAAIEANRKDNNDDTKKALEKEQENMRKQIAAALKDFRHFKELTAPTPQKLIDSVFPDIYDDEALKSFNRFALYFRGFQENRNNIYSADAISTGVPYRLVHDNFPKFLADIEVFENIKTICPEVIKQVATELQPFLEGVMIEDIFTLEFYNSLLTQEGIDFFNQVLGGVSEEGKQKYRGINEFSNLYRQQHPELGNKKKAMTMIPLFKQILSDRETLSYIPQQIESEQQLTETINQFYSYITNYERNGKTVDILRELTILIGGLNDYTPDGIFLSSKSITDVSQKLFGHWSIINEKLQELAVEKFGSIEVAKNKKKIDSYLAKDAFSLSELPFDDEHKISDYFAFLPQDVNNIHSCWLQYKEWCKGESKQLFLNNPDGTEIVKNLLDSMMEVLHKCSVLLAPEEYDVDKDFYNEFVPLYVEFSNIVFLYNRVRNFLTKKPSDIKKFKLNFGVPSLGDGWDLNKERENKAILLFKNGLSYLGIMNAKNYPKIEGTDEVEGESYSKMIYKFLPGPNKMLPKVFIKSKSGLEKYKPSQQIIDICENGSFKKGSPQFSLVNLHALIDFYKDAISKHEDWSKFDFIFSPTESYEDISSFFKEISNQSYKIRFTNISEKQVNEWVENGQLYLFQLYNKDYAEGAHGRKNLHTLYWENLFSPENLNDLVMKLNGQAELFYRPQSIKKPVTHKVGSKMLNRRDKSGMPIPESIYRSLYQYFNGRKQESELTDAERAYISQVVVKEVSHEITKDRRYTKPEYFFHVPITFNLNADGNDYINEKVLEYLKDNPDVNIIGIDRGERHLLYLTLINQKGEILKQKTFNIVGDYNYQAKLVQREHERDEARKSWQSVGKIKDLKEGFLSAVVHEIAKMMIESNAIVVLEDLNFGFKRGRFKVERQVYQKFEKMLIDKLNYLSFKDRKADEEGGILRGYQMAQQFVSFQRLGKQSGFLFYIPAAYTSKIDPVTGFVNHFNFNDITNAEKRKDFFMKMERIEMKDGDIEFEFDYRKFKTYQRDFKNVWTVSTYGKRIIMQPDEMGHKVMKDFYPTQQIVKAFESKGITLEEGTDIKALLSAIEANAANASFYSTLFYAFQKSLQMRNSNTATEEDYILSPVAVDGKHFCSTDEANLGRDANGNWISKLPVDADANGAYHIALKGLYLLMNPQTKKIENEKWLQFMVEKPYKE

SEQ ID NO: 760 - protein, 1253 aa, unidentified
  REGION 1..1253: note = Cas Enzyme sequence
MESNNKIFTETIGTSSIAKTMRNSLVPTESTKRNIEKNGIIIDDQLRAEKRQQLKEIMDEYYRTYIDNKLSNVALTRTIDWKELFQAIEDNYKQNTTKTKNELEKKQKEKRAEIYKILSDDEEFKQLFNAKLLTNILPEFIKNQNIDNEEKQEKISTVELFQRFTSSFTDFFKNRKNVFSKDEISTSICYRVVQENAWIFYQNLLAFEEIKKTAEQEIEKIEAENRDSISDYSLKEIFDFDFYGLLLNQGGIRFYNDVCGKINYHMNLYGQKHNIKSNKFKMKRMHKQILSIDESTFEVPTMFENDKEVYQVLNEFLSDLASKKILERVKKIGENVSEYEINKIYIQSKNFENFSSFMCGNWQIINDSLKAYYNETIKSKGKAKEEKVKKAIKAIEYKSLADIDELVEKYNKDELNRKAEEYISAINEKIKDLDVNEIEYDEKINLIENETKSEEIKSKLDSIMEIMHWTKMFIIEEEIEKDVNFYNEIEEIYDELQPLVTIYNRIRNYVTQKPYSEEKIKLNFGIPTLANGWSKTKEYDNNAIIMIRDGKYYLGIFNAKNKPDKKIMEGHQSEENGDYKKMIYRLLPGPNKMLPKVFMSKTGIAEYKPSQYILEGYGQNKHIKSNKNFDIKFCRDLIDFFKTSINRHPEWSKFNFKFSETSEYEDISTFYREVEKQGYKIEWTYIGEKEIKELDENGQLYLFQIYNKDFSEKSKGKENLHTMYLKNLFSEENLKNIVLKLNGEAEVFFRKSSIKKPIIHKKGSVLVNKTYNENGERKSIPEEQYTEIYKYLNSIGTNELSEKSKKLMEEGKVEYYKANYDIVKDYRYSVDKFFIHLPMTINFKAAGFSPINNIALKNIALKDDMHIIGIDRGERNLIYVSVIDTKGNIVEQRNFNIVNGIDYKEKLKQKELDRDNARKNWKEIGKIKDLKEGYLSLVVHEIAKLVVKYKAIITMEDLNQGFKRGRFKVERQVYQKFETMLINKLNYLVDKEGGLLRGYQLTYIPESLKVLGRQCGYIFYVPAAYTSKIDPTTGFVAIFNYKGMTDKDFVTSFDSIKYDDERGLFAFEFDYENFVTHKVEMARNKWTVYTYGERIKRKFKNGSWDTAEKVDLTYQMRSILEKYEIEYNKGQDILEQIEELDEKAQNGICKEIKYLVKDIVQMRNSLPDNAAEDYDAIISPVINNNGEFFDSTRGDEDKPLDADANGAYCIALKGLYEVMQIKKNWNEETEFPRKELKIRHQDWFDFIQNKRYL

SEQ ID NO: 761 - protein, 1253 aa, unidentified
  REGION 1..1253: note = Cas Enzyme sequence
MQVQKCIWDDFTNKYSLSKTLRFELRPVGKTLEYIKERGLIEVDKQREEEFNKIKKIMDEYYKEFIEIVLSNIEINLSDLKEYQTIYNKLIKDKSNLMLKKQYKHIQDKIRKQIYEIIKKTDNYNKLFGKELINDILPNWLGSKDRLADKELVMKFSKWATYFSGFFKNRENVFSEKPIPTSIIYRIVNDNLPKYLDNLIKFEAIKQLNNFSYSYMETELSTKLNNSSIDSFFILNNFNKHLTQKGVDLFNLVIGGYSENGIKKQGLNELIYLYSQKPENKEYSKMIRKLKMMPLFKQILSDKESFSDKFDTFINNEEVIKEITDYYTKIYSQWLPELKKLITDINNFDLTQIYINSSSISSISKKLCGDWETINKGLIEYAVNKLNLKTKAKKEAFLKNKYFSLYEIDESIKLLNLENPISICNYFSKFGESKTEQADLFKTVVNNYDSFKKIVLIDKHKFSEMDIEIIKSFLDSILGVIHFIKPIYINLNIKEEDNSQDAYETDADFYVRFNEIYMNNFNRIISIYNKTRNYTTKKPYSTKKFKLNFENSQLLNGWDANKEKDYYSLLFRKDDYYYLGIMAKGHNKIFENINNNQDIDSFEKIKCKLLPDPNKMLPKVFFSNSNIDYYKPSQEIKNIINYSTHTKGGIPKDGFEKKDFNLSDCHKLIDFYKSSLYKHPEWNCFNFKFKDTNLYHDISEFYDDISEQGYKLEFSKIRENYISDLVDSGKLYLFKIYNKDFSKNKAKKNKNSNPNLHTIYWREIFSKENLDNVRYQLNGGGEVFFREKSITSNKTIHPKKTTIDAKNPIKGKFKCTFDYDLIKDKRYTEDKFLFYCPITINFKAKGSGKDIHKQINEFISNTDKPVNVIGIDRGERHLVYYTLLDPNGDIIKSGSFNLVSDDLDRKFDYQDRLDTREKERDAARKSWQSIEPIKNLKEGYLSKVVHNISKLAIENNAIIVLEDLNFGFKKGRFKIEKQIYQKFEKMLIDKLNYLVFKDIPSTKIGGSLNGYQLTNKFESFSRLRKQSGILFYVNASYTSKIDPCSGFFNMILPNYESVEKSKELLKKFEYVRYNKNEDLFEFNFNFANFNKDIKLKKDNWSIYSNGTKLVNFRNKNKNNEWNTEEVNINEQLKVLFKIYNLDYMNSKNLMNSFNRIDSKDFFEQLIGLLKLILQLRNSRINTFNDYILSCVKDKNGHFFDSRTSGNNLPKNGDENGAYNIGLKGLIILDKIKKKEELKISKEEFVNYLIDKNM

SEQ ID NO: 762 - protein, 1253 aa, unidentified
  REGION 1..1253: note = Cas Enzyme sequence
MKEKFKNLYSVSKTLRFELIPEGKTQESFNTSDILITDEDRSESYKEVKKIMDRYHEWFINESLKDFKFNEGILNEYYRLSLKSRSEKENTAFNEIKKSLRSNIVKIAFKKNEIFEKLFKKDVIFLLEEFVKTGKFFDDLSDEEKRKHLDYINKFKKFSTYFTGFFENRKNVYSDEAKHSSIVYRSVDENLPLFLSNLKIFEDIKKKDSSLVDSFNINEFRLIRERSVEKFENVEIDSIDDMFTLTFFNRLLTQNGIDFFNSMLGGFADKQKEKSIEGLNQKLNQSKIEKIKFKPLKKQILCESSHLSKPIEKFESDDDMIQAIQYYYQETQGAIANLAQLWNELLNGDFDYSGIYLSNNQTLTTLSNRWLGHWDAIKECAIDYNTRGETLTVAKNKKENALFNKRQSIKLSDVQVWINNRYENKNLIDFLKMCDWQPPKKVSLQDTFNSFNQSYQEFETIIKNLNNNSLRTSDKAKEKIQSFLDLGITIYKALELFKGNGDELDRDLKFYSTLDTEMNILEDILYSVYNKSRNYLTKKPYSLEKFKLNFDTTTLLNGWAKSKEKDNLGVLLQKDDNYYLAILNTKYKKVFDQVTELKQGAVYKKMTYNLLPGPNKMFPKVFFSKGRQKEFEPSEHILRIYEKGSFKKGADFNLEDCHALIDFFKASIAKNSDWSSYKFKFSDTHTYADLSEFYKEVEQSGYNVQFTDYSAEYIDNLVNEGKLYLFQIYCKDFSPNSKGRPNLHTIYWRALFDPKNLEKPKIKLNGEAQVFYRKKSIFDSSITHPKRKAIKNKQKDADGTVKEKVFNYDLIKDKRFRMDKFQFHVNITLNHGVEQKTTKQINQLVRSELAKNKKINIIGIDRGENHLLYYSLIDQDGNILEQNSLNKIKPSGYIESKEINYHELLDNKEKERGTSRKNWGAIHNIKELKAGYLSQVIHKITQLMIEKNAIVVLENLNMGFKATRSKVEKQVYQKFEKMLIDKLSFMVGKTKSYDEDGGVYQAYQLSTKFVTFEKMGLQNGWLFYVDPSYTSTTDPTTGFAPVYKFKRSEKVEAIKEALKHITQFRLNIEEDYFEFDMNFAELKPNFPHKYNFRVDKSERHIFNVKSKRDKTLEKYIALNLKQELEELFNKYNIDYATGNDVSRSIQGIKQRAFFDQLTFILNTLFKLRYRDEQDDYILSPTPNAEGVCFDSREERNKSLPKFPIDGDANGAYHIALKGLQIIHKIELNVETPKIASKQEEWFKFLKEKVVTMT

SEQ ID NO: 763 - protein, 1253 aa, unidentified
  REGION 1..1253: note = Cas Enzyme sequence
MKEKFKNLYSVSKTLRFELIPEGKTQESFNTSDILITDEDRSESYKEVKKIMDRYHEWFINESLKDFKFNEGILNEYYRLSLKSRSEKENTAFNEIKKSLRSNIVKIAFKKNEIFEKLFKKDVIFLLEEFVKTGKFFDDLSDEEKRKHLDYINKFKKFSTYFTGFFENRKNVYSDEAKHSSIVYRSVDENLPLFLSNLKIFEDIKKKDSSLVDSFNINEFRLIRERSVEKFENVEIDSIDDMFTLTFFNRLLTQNGIDFFNSMLGGFADKQKEKSIEGLNQKLNQSKIEKIKFKPLKKQILCESSHLSKPIEKFESDDDMIQAIQYYYQETQGAIANLAQLWNELLNGDFDYSGIYLSNNQTLTTLSNRWLGHWDAIKECAIDYNTRGETLTVAKNKKENALFNKRQSIKLSDVQVWINNRYENKNLIDFLKMCDWQPPKKVSLQDTFNSFNQSYQEFETIIKNLNNNSLRTSDKAKEKIQSFLDLGITIYKALELFKGNGDELDRDLKFYSTLDTEMNILEDILYSVYNKSRNYLTKKPYSLEKFKLNFDTTTLLNGWAKSKEKDNLGVLLQKDDNYYLAILNTKYKKVFDQVTELKQGAVYKKMTYNLLPGPNKMFPKVFFSKGRQKEFEPSEHILRIYEKGSFKKGADFNLEDCHALIDFFKASIAKNSDWSSYKFKFSDTHTYADLSEFYKEVEQSGYNVQFTDYSAEYIDNLVNEGKLYLFQIYCKDFSPNSKGRPNLHTIYWRALFDPKNLEKPKIKLNGEAQVFYRKKSIFDSSITHPKRKAIKNKQKDADGTVKEKVFNYDLIKDKRFRMDKFQFHVNITLNHGVEQKTTKQINQLVRSELAKNKKINIIGIDRGENHLLYYSLIDQDGNILEQNSLNKIKPSGYIESKEINYHELLDNKEKERGTSRKNWGAIHNIKELKAGYLSQVIHKITQLMIEKNAIVVLENLNMGFKATRSKVEKQVYQKFEKMLIDKLSFMVGKTKSYDEDGGVYQAYQLSTKFVTFEKMGLQNGWLFYVDPSYTSTTDPTTGFAPVYKFKRSEKVEAIKEALKHITQFRLNIEEDYFEFDMNFAELKPNFPHKYNFRVDKSERHIFNVKSKRDKTLEKYIALNLKQELEELFNKYNIDYATGNDVSRSIQGIKQRAFFDQLTFILNTLFKLRYRDEQDDYILSPTPNAEGVCFDSREERKKSKPKFPIDGDANGAYHIALKGLQIIHKIELNVETPKIASKQEEWFKFLKEKVVTMT

SEQ ID NO: 764 - protein, 1253 aa, unidentified
  REGION 1..1253: note = Cas Enzyme sequence
MKLTDFTNLYPLSKTLRFELIPQGRTLEYIQQKGLINQDANRAISYQKLKKIIDEYHKVFIDEALKGLELNDLSAYEEFYQKKDKEEIDKKSLDKIKAALRKQISDSFKEQEKFKNLFSKELIKEDLLTFVKEEEKSLVNEFKDFTTYFTGFHDNRKNIYVADEKATAIAFRLVNENLPKFIDNLNAFQKIQNDVPDLAEQLRLALPDMEIIHETKLEEFFSLNFFNNTLTQKGIELYNTVIGGRTSDEGKNKIKGLNEYINLYNQKQEKKNRVPKFKQLYKQILSDRNSSSFVIDQFENDTQLLETLEQFYQSGICNYETEGNTINILTTLQNFLSSLNSFDLSKIHLKNDRSITDISQSIFGDWNVIKSALGDYYEITFPLKPKEKPQRFEERKEKWISKTSYFDINTIQDAVGGYDSENIKEKNTPAPIVKYFGAMGFDPETESNLVDKISQSYSAIKDLLNSPYPEDEKLNNDKQNVALIKQFLDNLMGFAHFIKPLIANDESLDKDETFYSLFEPLYDQLSKLISIYNKVRNYLTQKPYSIEKIKLNFENSTLLDGWDVNKEADNSCVILKKHGLYYLGIMDKKSNRIFERDVPECKNLETAYKKVNYKLLPGANKMLPKVFLSKKGVDTYHPSLEILENYQKETHKKGDTFDIVQMRILIDYFKESISIHPDWKEFGHKFSNTENYDDLSGFYREVEQQGYKVSFKNIDASYIDNLVDEGKLYLFQIYNKDFSTYSKGTPNMHTLYWKMLFDEENLADTVYKLNGQAEVFFRKSSVKPKNTVIHKAGEILKSKNELDPKKKSIFKYDIIKDRRFTVDKFQFHVPITMNFKATGNENINQDVNRFLQNNSDVKIIGLDRGERHLIYLTLINQKGEILKQESLNIISNKKQKVNYKELLQKKEGDRTQARKDWNTIENIKELKEGYLSQVVHQIVTMMVEENAVVIMEDLNQGFMRGRQKVERQVYQKFEKMLIDKLNYLVSKTKEPSEPLGLLKALQLTGKFENFKNMGKQSGFLFYVPAWNTSKIDPATGFVDFLKPKYENIENAKAFFKNFEAIRFNSDKDYFEFQFDYNDFTTKVEGTRTKWTVCTHGKERYAWNRKLNMGKGDVEAIDATQALQLLFGEANIAYAAGTDLIADITDQNSADFFKKLIRLLAITLSLRHSNGKSGTEEKDFILSPVMDGDSIFFNSIEANEKLPQNADANGAYHIALKGLWALGQINKAGDLKKVRLAISNKEWLQFVQIKPYQQ

SEQ ID NO: 765 - protein, 1253 aa, unidentified
  REGION 1..1253: note = Cas Enzyme sequence
MGIFENYTNLYAVKKSIQIGAIPTERTKKTLATMGIVEKDRQRVENISKFCQVFDRFHKERAGKILEETSFKTLPAYESAYDAYHKALVEKAEDADAIRDELVNRTDEVLKEISDAFLKNDSITELFTGDFLNKEMPALLTDKKEKKLAEELSKSAGGFIRYHQARSLLYSVKHGSIAFRLINDNYPFFYKNCEIIEKFRAVSGRTEEFLEGMRKLDWFRDSYLDEISDRDNYGSCFTQAAIDRYNVMLNGFTMPDRVKIKGLNEYINEYNHTLSAAEKREKGLRLLDPLYKLPLFNDNSFSVIPEKFETDGELLDTVDRIFNDTIYTKALGEAIDEACRLFDKDLGEYDASGIYIAPRQLTAFSLMAFDKWNAIEKLFNLDYDNKNYKKLVLDNPKANEDKYEKDRRNVLNRNIFSLEDIRKLALLDEEESGDAVEALCRNVREKKAEVLAAYNEYTEARKERKEKEEREEEVVSVRRDVRLRSAIKGLCDSIKEFERSLNFILSGRSLTETGLAGDADFINAFNELHDIIREYDAAYNKIRNFISRTKTKSDSVELLFGNSSFLGGWSDMSVKGGTFIKDGDKIFFVAASHGATKLLDDEYLTYEDGEETVEVMDYYLLADAAKSIGRIFIYNGMKNKDGGPAKYKYNPDAVPAKEYGLTEELFNAYAKGMHKSNYKENGFTDEDNRKTLDALTEYLGKAMPKYFTKLDFQLEKHYDTYRDICDDLKKKASFALSFKKVSKDYIQKLENNGDICLFRLWCKDFSEHSSGREGNYTVILKNLFNTDKDAVSTIRLSGNAALRFEKASLKKEDLVVHKAGTWVENKNPNSENRKRKLEYDIIKDRRFHHDRFRLMLPYALNYTEGDFCPVNEKVREDIKAGKFKYITSVKGGMDNLLWVCVTDLKGNIVEQFPINTIGNTDWREKISIRQQEMKEGNKNWTPGTDIRTLKEGYLSLAIKLVYDTIMKYESLVVLEDNAPNFKGNKFGIDTRLYEVFTEALRQKLRYAFSRTEGERDYGGVLKGFQLVNPEKPKGMQDGIIFLINPAYTSNIDPATGFISYIRPRYENITRTKNMIEKIDGFAVKNGMFCMDIDFSRFGDVLKGTRSEWTVWANGSRIIWKRDEDLAKGGKFVEISINEAFLDFFKKNRIDIKGDIKAQLLSNNSKAFYSEFCELFGALLKLSNGKNDDNFIISPVKNKKGQFFNSKTSDTVTCSDSNSAYNLCRKMAICVRNISNDVKKPVPKSEEFIKEIQG

SEQ ID NO: 766 - protein, 1253 aa, unidentified
  REGION 1..1253: note = Cas Enzyme sequence
MNAFNQFTNLYPVSKTLRFELQPIGKTKENIEKNGILARDEQRAKDYLLVKDLIDEYHKQFIKERLWDFKLPLKSEGNLDSLQEYQEIYELSKRDDAQEAAFTEIKDNLRSIIAKRLTESGSAYERIFKKELIREDLVYFLENEEDKEIVRQFADFTTYFTGFHENRKNMYSAEEKSTAIAYRLIHQNLPKFMDNMKVFAKIAETSVAEHFADIYDGWKEYLNVGSIEEIFRLDYFSDTLTQTHIEVYNYIIGKKILEDGTEIKGINEYVNLYNQQQKDKSLRLPFLVPLYKQILSDREKLSWITEEIDSDEQMLSAINESYNHLHDLLMGKENDSLRSLLLHIKDFNLSQINITNDLSLTDISQHLFGRYDVFTSGIKDELRIITPRKKKESDEDFEDRISKIFKTQKSFSIDFLDKLPQPVMEDGKPRCIEDYFMTLGAVNTETTQKENLFAQIENAYEDARTILQLKDTGDSLSQNKSAVAKIKALLDSLKDIQRFIKPLLGSGEENEKEELFYGVFQLIWDELDTVTPLYNKVRNWLTRKPYSTEKIKLNFDNAQLLGGWDVNKEPDCTGVILRHDGFYYLGIMNKKSNHIFDAELTPSDGECYDKIDYKLLPGANKMLPKVFFSKSRIDEFAPSESIVNSYKRGTHKKGADFSLSDCHKLIDFFKSSIAKHEDWSKFGFHFSDTKTYEDISGFYREVEQQGYMLSSHPVSTSYIHQMVDEGKLYLFRIWNKDFSEFSKGTPNLHTLYWKMLFDERNLADVVYKLNGQAEVFFRKASIKPENRIIHPSNHPIANKNELNKKRTSTFEYDIIKDRRYTVDKFQFHVPITIGFKATGQTNINPLVQDTIRRGGFTHIIGIDRGERHLLYLSLIDLKGNIVKQMTLNDIINEYKGVTYKTNYRDLLAKREGDRTDARRSWDTIETIKELKEGYLSQVIHVISKMMVEYNAIVVLEDLNQGFMRSRQKIEKQVYEKFEKMLIDKLNCYIDKHSEPYSVGGILRPLQLTNKFESFRKLGKQSGCLFYIPAWNTSKIDPVTGFVNLFDTRYDTREKARLFFSKFQRINFNAEKGWFEFVFDYNDFTTKAEGTRTQWNLCTYGERIRTFRNPQKNNQWDNERIVLTDAFKQLLTKYNIDIHGNLKESISAQSDAQFFKELLGLMKLLLQMRNSITNSEEDYLLSPVADDSGRFFDSRDNIETLPNNADANGAYNIARKGLWIIMQIEQANELQKLKLAVSNKEWLQFAQTKPYLHE

SEQ ID NO: 767 - protein, 1254 aa, unidentified
  REGION 1..1254: note = Cas Enzyme sequence
MKINKFNDFKNLYQLSKTLRFELIPQGKTLEHIEKNGLLQQDEQRAKDYQQVKKIIDDYHKHFIDEALANTKLENLQQYYDLYIKRDKSDDDKKQLENIKKELRIRLIEAVKSNTKFTTIFKKELIKDDLVAWLEKQAREQENEVNLIKKFSDFTTYFSGFHENRKNMYSDEEKSTSIAFRLIHQNLPKFVDNLQIFEKVKSSGLDFSSMSLLLGDVPLEDFFKLEYFNQTLTQVGIGLYNLMLGGQSSDDGFKLQGLNELINLYNQRQDDKKNRLPKLKPLFKQILSDRDGYSFVLESFKNDGDVCNALSDYYVKKLSNSECIFERLPTIFNHINEYDTKQIYINKSALTNLSAKLYGSWDVISKALEFYYITKIDNDSNKNETAIKKKEKWLKQEYFTLCDLDEVIKFYVDNQQIDKCAVTQYLVNYFAQIFTDPNNLIAQITSQYNAVQAIIQNIQPDTKNLIQEKENVAEIKKLLDLIMELLHVCKLFVIKSDIAEKEHNFYSELEYCLALLNPVIALYNQIRNYLTQKPYSLEKFKLNFENSTLLDGWDRNKEPSNTSILLRKNGNYYLGIMNKRHNRVFEVLPQILETNNSYEKVVYKLLPGANKMLPKVFLSTKGKSTFQPSQELLDNYKSETHKKGDNFNLDHCHKLIDYFKDSINKHSDWKKFNFNFSDTATYEDISRFYREVESQGYKITFDLISEQYINELVNDGKLYLFQIYNKDFSPHSKGTPNMHTMYWKALFSEENLANIVYKLNGQAEIFYRERSITKDKIIKHAANQPINNKNIDNDKKQSTFAYDLIKDKRFTMDKFQFHVPITLNFKAQGRDDINLEVKEYLKTNPDTHVIGIDRGERHLLYVSVVNPQGEIIKQFSLNEIINEYKGNTYKVDYHNLLNNKEGDRKKARENWGVVENIKELKEGYLSQVIHKICQLVIEYQAIIIMEDLNSGFKNSRIKVEKQVYQKFEKMLIDKLQYLAFKNPRGNQPDIYNALQLASKFDSFTELEKRKQSGFIFYVPAWNTSKIDPATGFVDLLKPKYETVAKAQEFIRKFDEIKYNQNKDWFEFSFNYSKFTEKVDGTRLNWTVCTTNVNRYSWNRKLNNGKGEQQLFEISKCLKALFDIYKIDYQTSENLIEQIARQSEKDFYVCLMRYLSITLNLRHNNGKSGIDEEDYIASPVADNSGAFFDSRVEVGKGKDKNGNWVSKLPVDADANGAYHIAKKGLWVLQQLKKADDLRKVKLAISNKEWLEFTQN

SEQ ID NO: 768 - protein, 1254 aa, unidentified
  REGION 1..1254: note = Cas Enzyme sequence
MKFEDFTGLYPVSKTLRFEARPVGDTLKNIIKRGILEQDTHRAESYQKVKKLMDEYHKAFIDSVMSNFRFSCEDLEEYFVLYANKSDNDESKNKYTELQKKMRESVSKALKGDERFKKINKKELIKEDLYAFIREAGESQLVGLTREQAEELLLEFKDFSTYFGGFYQNRANMYVPDEKSTSIAYRLVNENLPRFVDNIDVFNKITSIPELRDNVKTIYDAFKEYLNVVELSNIFDVTFYSEVLTQKHIDLYNSIIGGRTDNESSKKIHGLNEYINLYNQTHKDEKLPKFKVLYKQILSDRVAVSWLPEAFSNDKETLCAIRDCYSGLEEHILGEKDLKILLESLDKFDLCGVFISNNKQLLSEISQKLYGNWKTIENAVRRHFEETSPQNVKKENEEKYRERISKIIKRYESFSIADLNEWVKKSDPDESRRIEDYFASLGVVNSENEQKEDLFSRVANVYIDVADLLFSDYPDGKRLAQDSKDVEKIKNLLDAIKELQWFVKPLNGSGDENNKDERFYGEFSMLWAELESFSLLYDKVRNYMTKKTYSQDKIKLNFANATLLKGWDRNKEVDNACVILRRNGLYYLGIMDKKYRRSFEGNYLCEGDVYEKMVYKLLPDPKKMLPKVFFSKSREKDFNPSDSILRIHKGETYKAGPQFKIEDCRELIDFYKKSISLHEDWKNFGFEFSDTSTYDDLNGFYREVEQQGYKITFKNVSVSYVEKLVGEGKLYLFQLYNKDFSSYSKGTPNIHTLYWKALFDEKNLLNVVYKLNGEAELFFRKKSINITNPTHPANVSVANKNKLNQKRESLFDYDLIKDRRYTIDKFLFHVPITMNFKSKGRPQIEQLVRGYLHSAENTHIIGIDRGERHLLYVSVIDSHGNIKEQFSLNEIINENAGNVYVTDYHALLDTKETERKEARQSWQTIENIKELKEGYLSQAVHKVTQLMIKYNAVIVLEDLNMGFMRGRQKVEKQVYQKFEKMLIDKLNYLVDKKVCVDAPGGVFHAYQLTSKFESFAKLGKQSGFLFYIPAWNTSKIDPITGFVNLFELKCDSIDRTKLFFSKFKSIRYNQRSDWFEFAFDYNDFTSKAAGTKTEWIITTHGTRIINFRNPQKNNQWDSNEVVLTDEFKSLFARYSIDFSGNLKEGITMQTDKSFFEGLLNYFKLTLQMRNSVTGTDVDYLISPVADGNGMFYDSRNCADSLPKNADANGAYNIARKGLMLIKQIKMSNDFKTVKLDITNKAWLEFAQKKPYLND

SEQ ID NO: 769 - protein, 1254 aa, unidentified
  REGION 1..1254: note = Cas Enzyme sequence
MEYHLFTKQYARSITLRMGLRPIGETLHYIKDSGILESDEHRADSYVKVKKLIDEYHKIFIDRTLKAAFPIDQDGKCEDAIWSKLLEDYYNSYQIPQKTDAQKKLFSGIQDKLRSIIVAKLTAEDVFSRIDKKELIQKDLLDTQLMRALSEEEKTLVEEFKNFTTYFTNFHENRKNMYSADAKSGTIAFRLIHENLPKFVDNMGVFERLSAVDELTAQLPELYRSMEEYLNVGSIAEMFRLDYYTLLLSQEQIDVYNAVIGGRTVEGQPEIQGLNQLINLYNQTHKESKLPKFKMLFKQILSDRSAISWMQEPFAPGKDDEVIKAIKESYDTVNYAALGNLKLLLKNISSYQLDGIYIKNDQQLNTISKKAYGDWSVIQRAIIADLKNSVKKGRKEDDAAYEERLANLVKKEDSFSIAYLDECVSKLGVPYEGSVEKYFAGIGVSEDPSEQQINLLSQIENNYTDAKELLETPYPKGLNLAQDKVSIEKIKRLLDSLKELQHFIKPLLGSGEEPEKDESFYGEFISLWETLDSITPLYDKVRNYATRKPYSEEKIKINFENAMLMKGWDQNKERDNTTVILVKDGLYYLAIMNKKFNNAFAGKVLPSSGECYQKMDYKLLPGANKMLPKVFFSKSRISEFAPSQELMEHYEQGTHKKGDKFSLKDCHELIDFFKASIEKHEDWSKFNFQFSDTSTYNDLSDFYREVEQQGYKISFRDVSVEYIDKLVSEGKLYLFQIYNKDFSPYSKGTPNIHTLYWKMLFDERNLRDVIYKLNGEAEVFFRKKSLKYERPTHPANQPIKNKGLSNPKAESVFAYDLIKDRRYTVDQFQLHVPITMNFKSTGNGHLNELVYDYLKEADDTYVIGIDRGERNLLYLCLIDSKGRICEQCSLNGIENDKNGTVTDYHKLLDKKEAERLEARQSWQSIENIKELKEGYLSQVIHKIATLMVEHKAIVVLEDLNFGFMRGRQKVEKQIYQKFERKLIEKLNYLVDKKKDPEEPGGLLHAYQLTSEFDSFQKLGKQSGFLFYIPAWNTSKIDPVTGFANLFKAKYETVEKSKSFFCKFKSIRYNSERDWFEWSFDYNDFDKSAEGTKTQWTLCTYGERIITYRNAEKNSQWDNRRVILTDECKHFFEKNAIDYHGNIKEQIAERSDKKFFEGLYQLLKLTLQMRNSWSNTDEDYLISPVMDEQGEFYDSRRSDGTLPKDADANGAYNIARKGLWVIRQIKQSSSMKELKLAISNKEWLRFAQEKPYLED

SEQ ID NO: 770 - protein, 1254 aa, unidentified
  REGION 1..1254: note = Cas Enzyme sequence
MEYHLFTKQYARSITLRMGLRPIGETLHYIKDSGILESDEHRADSYVKVKKLIDEYHKIFIDRTLKAAFPIDQDGKCEDAIWSKLLEDYYNSYQIPQKTDAQKKLFSGIQDKLRSIIVAKLTAEDVFSRIDKKELIQKDLLDTQLMRALSEEEKTLVEEFKNFTTYFTNFHENRKNMYSADAKSGTIAFRLIHENLPKFVDNMGVFERLSAVDELTAQLPELYRSMEEYLNVGSIAEMFRLDYYTLLLSQEQIDVYNAVIGGRTVEGQPEIQGLNQLINLYNQTHKESKLPKFKMLFKQILSDRSAISWMQEPFAPGKDDEVIKAIKESYDTVNYAALGNLKLLLKNISSYQLDGIYIKNDQQLNAISKKAYGDWSVIQRAIIADLKNSVKKGRKEDDAAYEERLANLVKKEDSFSIAYLDECVSKLGVPYEGSVEKYFAGIGVSEDPSEQQINLLSQIENNYTDAKELLETPYPKGLNLAQDKVSIEKIKRLLDSLKELQHFIKPLLGSGEEPEKDESFYGEFISLWETLDSITPLYDKVRNYATRKPYSEEKIKINFENAMLMKGWDQNKERDNTTVILVKDGLYYLAIMNKKFNNAFAGKVLPSSGECYQKMDYKLLPGANKMLPKVFFSKSRISEFAPSQELMEHYEQGTHKKGDKFSLKDCHELIDFFKASIEKHEDWSKFNFQFSDTSTYNDLSDFYREVEQQGYKISFRDVSVEYIDKLVSEGKLYLFQIYNKDFSPYSKGTPNIHTLYWKMLFDERNLRDVIYKLNGEAEVFFRKKSLKYERPTHPANQPIKNKGLSNPKAESVFAYDLIKDRRYTVDQFQLHVPITMNFKSTGNGHLNELVYDYLKEADDTYVIGIDRGERNLLYLCLIDSKGRICEQCSLNGIENDKNGTVTDYHKLLDKKEAERLEARQSWQSIENIKELKEGYLSQVIHKIATLMVEHKAIVVLEDLNFGFMRGRQKVEKQIYQKFERKLIEKLNYLVDKKKDPEEPGGLLHAYQLTSEFDSFQKLGKQSGFLFYIPAWNTSKIDPVTGFANLFKAKYETVEKSKSFFCKFKSIRYNSERDWFEWSFDYNDFDKSAEGTKTQWTLCTYGERIITYRNAEKNSQWDNRRVILTDECKHFFEKNAIDYHGNIKEQIAERSDKKFFEGLYQLLKLTLQMRNSWSNTDEDYLISPVMDEQGEFYDSRRSDGTLPKDADANGAYNIARKGLWVIRQIKQSSSMKELKLAISNKEWLRFAQEKPYLED

SEQ ID NO: 771 - protein, 1254 aa, unidentified
  REGION 1..1254: note = Cas Enzyme sequence
MEKENIKDFNGIYPVSKTLRFELKPIGLTMENLNNNGIITEDAKRAESYKIAKTMIDNYHRYFISNKLKTFYINWTELKDVINEFNRDSSSDNKKRLITTQDKYRKIISDLFTKDADYKKIFGKELFTELLQKDLNINKEIDKETQVEVINYFNRFTTYFTGFHENRKNVYSKEEISTSIGFRVVHDNFPKFLANINAFNRIKSKAPDIIKVLNEELEEYLNGESIEDIFGLNYFNNVISQEGIDFYNMIIGGVSTENLKTKGLNELTNQYVQQNKECGLKKNDVKMITFYKQILSEKTSYSFNIDIIEKDSEVYELIDLYMSDLKREDVINKMKTILCELDQLSLDNIYINGKYLSNVSYKIFNNWSKLKEGLNEYAIANGLNKKQTESLIKKDSYSLSELNESIEALGDKHSLDFNILEYFNDGNDIIDEIFYKYEKLQNNINGNSIIRGNKENVAILKDFADSLINLYHFWKPFKIQLALEKDVVFYSDFEKIIMNLESFVIAYNKIRNYITKKNYSKEKIKLNFTNPTLLNGWDQNKEQANTSIILIKDDKYYLGILNAKNKPKFDSLIKNCDTSKTCYYKMKYKYLAGPNKMLPHVFLSKSGIDKFDPSEYILEGYNAKKHIKGEGFDLKFCHDLIDFYKNSIAIHPDWKEFNFDFSDTESYENISDFYREISEQGYKLSKQPIESESIEELVNKNQLYLFQVYNKDFAKGATGKPNLHTMYWKALFDDKNLKDVVFKLNGEAEVFYRRKSIDDPFSHKVGEMKVNKRLLNGDPIPGDVYKELCLYYNSNKNDTLNLSDDTNEIIKHEKVGTSVVKHEIIKDRRFTEDKFFFHVPITINYKRANVSKFNEQVINFIKNNEDIKIIGLDRGERHLLYLTMINLNGDIIRQKSFNIVNKMDYHEKLDQREKERDVARKSWDTIDAIKDLKEGYLSQIIHELAIMMIENNAILAIEDLNFGFKRGRYKVEKQVYQKFEKMLIDKLNYLVDKNLDIEEDGGVLKGLQLTQPFISFNKLGKQTGFLFYVPAAYTSKIDPTTGFANIFDMRKITNMFDRLDFISKFDYIKYNESEDCFVFGFDYSNFDTFQTFTKTSWDIYSFGKRIYTHKQDNNFISKDIFPTDIIKKALNEANINYIDESNLIDSINELKDEQLLNKLSSDIIFALKLILQIRNSNATTKEDFIISCVKNQKDEIFDSRVAADNLPKDADANGAYHISLKGKMLVDRVKNGVDTREALKITNANWFEFLQKDC

SEQ ID NO: 772 - protein, 1255 aa, unidentified
  REGION 1..1255: note = Cas Enzyme sequence
MNTGFNDFTNLSSVTKTLCNRLIPTEITAKYIKEHGVIEADQERSMMSQELKNVLNDFYRSFLSENLVKVHELDFKPLFTKMKKYLETKDNKEALEKARDDMRKVIHDIFESDDRYKKMFKAEITASVLPEFILHNGAYSAEEKEEKMQVVKMFNGFMTSFSAFFANRENCFSKEKISSSACYRIVDDNAKICFDNIRIYKNIADKFADKPEMIEKIEEAAGGADIKNIFSYSFNHFVSQDDISSYNYVISEINKFMNLYCQASKEKFSPYKLRRLHKQILCIEESLYDVPAKFNSDEDIYAAVNDFLNNIRAKSVIERLQLLSKNADSYDLDKIYISKKYFANISQMLYRDFSVINTALTMSYIDTLPGKGKTKEKKAASMTKNTELISLGEIDKLVDKYNLCPDKAVSTRSLIRSISDIAADYKVSPLTMDPGIPLAENETEIAVLKEAIEPFMDIFRWCAKFKTDEPVDKDADFYTELEDISDEIHSIVSLYNRTRNYVTKKPYNTDKFGLYFGTSSFASGWSESKEFTNNAILLAKDDRFYLGVFNVKNKPAKSIIKGHETMQDGDYKKMVYSLLTGPNKMLPHMFISSSKAVPVYGLTDELLSDYKRGRHLKTSKNFDINYCRKLIDYFKHCLALYTDWDCFNFKFSDTESYNDIGEFYKEVAEQGYYMNWTYIGSDEIDSLQENGQLYLFQIYNKDFSEKSTGKPNKHTAILRSLFSDENVADPVIKLCGGTEVFFRPKSIKTPVVHKKGSVLVSKTYNAQEMDENGNIITVRKCVPDDVYMELYGYYNNSGTPLSAEALKYKDIVDHRTAPYDIIKDRRYTEDEFFINMPVSLNYKAENRRVNVNEMALKYIARTKNTYIIGIDRGERNLLYVSVIDTDGNIVEQKSLNIINNVNYQAKLKQVEIMRKLARQNWKQGVKIADLKKGYLSQAVHEVAKLVIKYNGIVVMEDLNSRFKEKRSKIERGVYQQFETSLIKTLNYLTFKDRKPLEAGGIANGYQLTYIPESLKNVGSQCGCILYVPAAYTSKIDPTTGFVTLFKFKDISSEKAKTDFIGRFDCIRYDAEKDLFAFEFDYDNFETYETCARTKWCAYTYGTRVKKTFRNRKFVSEVIIDITEEIKKTLAATDINWTDSHDIKQEIIDYALSSHIFEMFKLTVQMRNSLCESKDREYDKFVSPILNASGKFFDTDAADKSLPIEADANDAYGIAMKGLYNVLQVKNNWAEGEKFKFSRLSNEDWFNFMQERQSRQ

SEQ ID NO: 773 - protein, 1255 aa, unidentified
  REGION 1..1255: note = Cas Enzyme sequence
MKLNNFTNQFPLSKTLRFELIPQGNTLEFINKKGLLEKDNNRADSYKKLKKIIDEYHKLFISESLNGFRLFDLDTYAELYQKKEKDDKDKLTFEKVKGVLRKQISDTFKVQNKYQNLFAKELIKEDLLAFVGIEDKPLVNEFKDFTTYFTGFHENRKNMYVADEKATSIAFRLINENLPKFIDNLNISSQILGRTNGLAEEFKLALLEMEELVQDTKLHEIFNIDYFNETLTQRGIELYNTVIGGKVSEDGNKKIKGFNEYINLYNQLQQDKKNRLPKFKQLYKQILSDRNSTSFVIDNFESDSQLLESIEQFYQSGICHFESDGNSINILIAIQALLSSLANFDLSKIFISNGSSLTEISQKLFGDWSAIGAALGEYYDKEYPSKPKERPDKFQERKEHWLSKTSYFDIATIQLSLDCYQNENVKEKNKPNVLIDFLGTMGTDSATKLNLINIVEQNYAIIKDLLNNNYPEEEKLGSSKEQVAQLKIFLDGLMNVLHFIKPLNIKSEGLEKDETFYSVFIQLYEQLSHVIPLYNKVRNYLTQKPYSITKVKLNFENSTLLNGWDVNKESDNSCVILRKNGLYYLGVMDKLNNKIFERNVPKCLVESSAFEKMNYKLLPGANKMLPKVFLSKKGLETYSPSFEIVENYESESHKKGETFNIDHMRGLIDYFKNSISRHPDWKEFKHKFSPTESYIDLSGFYREVEQQGYKITYTNIDESYINHLIDDGKLYLFQVYNKDFSPFSKGTPNMHTLYWKMLFDKNNLTDTVYKLNGEAEVFFRKSSISQKNRVVHKANESIKSKNDLNLKRQSNFNYDIVKDKRFTLDKFQFHVPITMNFKATGNDNINQNVNQFLKNNQDVNIIGLDRGERHLIYLTLINQKGQILKQESLNVISNEKQEVNYKEILQKKEGDRTQARKDWNTIENIKEIKEGYLSQVVHKIALMMVEQNAIVVMEDLNQGFIRGRQKVERQVYQKLEKMLIDKLNYLVFKNKSPGESGGLLKALQLTSKFESFKSMGKQSGFLFYVPAWNTSKIDPTTGFVDFLKPKYENIDKAKAFFKKFDTISFNNEKNYFEFKFDYKDFTTKAEGTQTNWTVCSHGKERYTWNRNLNLGKGGIEIVDITQELQLLFGNVNISYAHGCNLIDDLIIQTNVDFFKKLLRLLSITLSLRHSNGLSGVEEKDYILSPIKGKDGVFFDSMKADCTLPKDADANGAYHIALKGLWVLDKINDADDLKKVKMAITNKEWLQFVQTKPYRN

SEQ ID NO: 774 - protein, 1255 aa, unidentified
  REGION 1..1255: note = Cas Enzyme sequence
MTKMTDFTKLYQLSHTLKFELRPIGKTSENLQNSGLLEEDFKRSQDYVEVKSVLDEVHKKFLQDVLSDCDLSWQELADALKIFQVNKDRKVLEDVQKKYRKLLADRFNKNKFFKTLTEATPSKLFKSLLAEPDMAERKVETFKRFACYFKGYQETRKNIYSAEAQQTAAAYRAVNENFVKYLRVVELYENFRKNFPELAEEIGRRTAELTDGELSQILRIENYNRFIAQSGIEYLNSLIAQINSAVNLYRQAHNVKLSFVPLLFKQILSDREQVFTLERIEKDADLDEKLRAFCERHIGNVEIRGETGDLFSRLKVLLTTLNDDCELYIDAASLSAIGNALTGNWSCFRDAMAAYANETLKNKSLREKYCKQPVYSFSEIKSWRVVRTDDDGNVQPVCLSDYWHGEKALELFATEKILRNKILEMVRVPHDKNFRERKNDVALVKEYLDAVVEILHLLKTLNVGSENGGDLDLLGTLTEFYEALSPVIPLYNQIRNYVTQKPSDIGKIKLMFNNPTLADGWDLNKEKDYTAVIFCRNGMYYLGIINPKSKTDFNSLATDSSTDCYQKMVYKQLQNPNQMLPKVFFSAEKIKFFAPSEELLRRYKAGEYKKGEKFDLAYCHELIDFFKRSIDRHEKWSKFEFKFSETSAYSGINEFYREVAEQGYKMSFVNIPVKAVDQLVEDGKLFLFQIWNKDFSEKSTGTPNKFTLYWKALFDRQNLSDVVFKLNGEAELFLREPAITEPVVHRPGEKLINKTVVVAIDGNGVAVRNSIPDSVYMEIYNHVNGMEDGTLSPAAREHLNRFPRLDWEPGMGLEATVKRTVVKDVKFQLVKDKRFTERKFSFHVPITVNFKSPGLKGAKLNEKVWEFLKDNPDVNVIGIDRGERNLIYVNCIDLKGRILLQKSFNIIGGFDYHQKLDLRERERGQARKSWNEIGTIKELKAGYLSGVVYEIARLMVEYNAIVVMEDLNGGFKRSRTGIEKQIYQKFEKALIDKLNYLVFKNESDWHVPGGLLNGYQLTGPLESFAKLGKQCGWLFYVPAAYTSKIDPSTGFVSLFKLSNYTNTEKRKAFFENFESIVYQTEQDAFVFAFDYKKFKDVESCWKTSWEVYSARRRLVYGRRSRQIEEINPTRLIKRALDKRGVVLSDGFDLKHYITSVEAVNENAAFFKDIFDAFGTTLQMRNSSGEEDYIESPVLNENGQFFDSRKAGKEWPRDADSNGAYHIALKGLLRMKSGQTAKLKRLDWFEFVQRRGFITE

SEQ ID NO: 775 - protein, 1255 aa, unidentified
  REGION 1..1255: note = Cas Enzyme sequence
MNDFIRLYPLSKTLRFKLIPLRKTLEYIVSNGLLEQDRHRAESYVRVKDIIDNYHKAFIERVLSTFKLQYADRQSKDSLEEYYTYYMVGNKTEEQLKVFSEIQEKLRKQIAGCLVSDPVFKRIDKKELIKEDLVDFVSTEEERQLIAEFKDYTTYFTGFHENRRNMYSSEAQSTAIAYRLIHENLPKFIDNLQVFSKMAATSVAEKLPQLYADFEEYLNVAEINDMFRLDYFNVLLTQTQIDVYNAIIGGKALEDGTRIQGLNEYINLYNQQQKDKHVRLPKFKLLYKQILSDRNAISWLPDEFVSDNETLEAIERCYEDLESQILNRKVEGEHSLKTLLEGLEEYDLAKIYVRNDLQLTDISQKIFGDWSVVQRTYIDTFKNENPLTKKETMDKYEERIEKYWKGLKMLSIADIDARLILSGKDKTQTFACYFRRLGKDVKNDVEQNVFERIEIAYLNVKDLLNTPYPAHKNLAQDKESVEKIKLFLDAVKDLQYFVKPLLEKGLEVEKDERFYGEFIPLWEELDKITPLYNKVRNYLTRKPYSTQKIKLNFENSTLMDGWDENKERDNCTVILRKDGLYYLAIMNRNHRKIFDKKIMPSSGECYEKMVYKLLPGANKMLPKVFFSKSRIGEFNPSVRVREIYEKGTFKKGNDFNLEDCYAMIDFFKESINKHEDWSKFGFHFSKTEDYKDLSDFYKEVEQQGYKVSFVNVSQSYVDQLVDEGKLYLFQIYSKDFSPYTKGTPNMHTLYWKMLFDEQNLADVVYKLNGQAEVFYRKASIKSDRPTHPANVPIANKRKGTEKKESVFAYDLIKDKRYTVDHFQFHVPITLNFKSRGADNINQLVNEYIKQTGDELKIIGIDRGERHLLYLTLIDTKGRIVSGMQFSLNQVDQTDYHQLLTQREEERLKARQSWRTIENIKELKEGYLSQVVHTIATLMVEHNAIVVLEDLNMGFMRGRQKVEKQIYQKFERMLIDKLNYLVDKKKESSEAGGLLKAYQLTSKFESFQKLSKQSGFLFYVPAWNTSKIDPVTGFVNLFDIRYESVDKSKIFLAKFDDIRYNAGKDWFEFSFDYSHFTSKAQDTRQNWTVCSYGERIETYRNPTKNMNWDNREVLLTDEFKNLFQTYGIDYSAGSLKEQILNQTEKSFFCNEKLDKKTPIGLLQLLKLTLQMRNSITGTEVDYLVSPVVDEKGQFYDSRTCGGDLPQNADANGAYNIARKGLWVVQQIRQSTDLKKLKLTISNKEWLRFVQQKLYLE

SEQ ID NO: 776 - protein, 1255 aa, unidentified
  REGION 1..1255: note = Cas Enzyme sequence
MNPNNKFDKMRGIFPLSKTIAFQLIPIGKTQEHLTAKNTTENAEVLAEDYKNLKGAADRVHKRFIEETLKKFHLKYLSDGEQDSIQEYAEIYLDPSVGSDEKDYLLNEIIENLKAQVSKAFENAEFTENQQMLEALASQNLLKKILPAEQLTEEERTSLGRLQKYTSYMRPYFTMRDRIYRADEKGHTIPVRIVEDNLPIHLSNVHTFLSLPTEVVDGAYDIFNLIAPFLQAYNLEDVFTPSFYSTLCPQSAIDAYNQLIGGVSNEDNTRVQGLNELINQYNQAHEDKQIKPLKKLMKQILTDRESLSWIPAEIVNDEEVISAIVNLHETVTEKFRAPENTDWDPSRVYVKADRLNDYSHAMFGDWSLASLALKEEFVKKSLPRKKKESEKKYSERLDKLFKTYKNFSLSKIHRSIREYSADDTEKEIPEASPALRLYFMNRILEKHNAALADYNALKEHVHDGKPDSKLGQDPKDGTLGAGALVKSTLDNLIEAKNAANIFTDHNGTLAVDPGFYTDVVEPYEEIASTLIPVYNSVRNYLTKKPYSDKKVQLYFDTPDLMKGWDINKETINRAVIIREDETLYLGILPEHAKRLFSSDASNDEGSTLKKMDVKFIPNPHMQLPHVAFSRKALASGNIPSEVLRLRESGKEVKNYDRDEVAMMIDFYKNVIKSNHDWDVFGFEFKETGEYGRLADFFTDVEKQSYRTVYHGISRDFVEKAVEAGNLYLFKISCQDMLEKHHGKDGDYKILLYEALSGKKDCDVRLCGGGAIYHRKASLKPRVTHPAGIPIENKNPNSKNRTRTFKYDIIKDRRYTVDRYMFHVPVEIFPTADKRGGNRVNDKVKEIIKANPDMYVLGINRGERNLISMSVTAPDGTIVEQRNLNVFDNFDYCRKLADREKERNENRKNWTSVKEIKNLKAGYLSRVVGEIAKLVRKYGCVVAMERLEKEFKNKRRKFEKNVYEQFERDLVSKLSFLMDKDVKDGRIKTTVQLSNPGSTETERTKYTQNGIIFFMNPSWVSKTDPLTGFVNRLNTRHKSVKDAEAFLSSLDGFKYNGKTGRFEITFHYDKAAPDKETGDGERVWKIETYGERIEQIYDKSENPKGVWKDVTVNLTDKMKSLLESQGIGYSDSSDILETITSTMTGKKKAGEFYKELLHLIYLTLQNTNWNSETKEYRVIGCTADSTGKFFDSRTAPERMPKDGDTLAAWNIARKAHMALKNIREFVPGETLDMEGKKAKTPHLAVYDQEWFTEVQK

SEQ ID NO: 777 - protein, 1255 aa, unidentified
  REGION 1..1255: note = Cas Enzyme sequence
MRIDDFTNQYPLSKTLRFELIPQGKTLEHIQEKGFLEQDDKRAIDYQKLKKLIDEYHKVFIENSLKGLQLDNLDDYAEWYQKKDKDESDKKAFQKTKDQLRKQIADAFTSQEKFKNLFAKELIKEDLLQFVKKEDQSLVNEFKDFTTYFTGFHENRRNMYVADEKATAIAYRIINENLPKYIDNLNIFYLIKDESESLIEEFKTALVEMEEVTQGRSLEDIFTLSFFNETITQRGIELYNIIIGGRTADEGKIKIKGINEYINLFNQQQKDKRKRLPKFKQLYKQILSDRNSISFVLDNFENDNQLLECIEQFYQSGICHFESDGNTIDLLNTIRSFLNSVESFDLSKIYLRNDTSITDISQRVFGDWSLIRDALGSLYEIHSPLKTKERRDKFEERKERWVIKTSYFDINTLQDAIDNYDSETVKAKNSPNCIAKHLGAMGKNEETSSDLVEDIRQNYAAIRDLLNNPYPENEKLSNAKDQVGLIKNLLDSILNLVHFLKPFNINNEVFEKDESFYSIFTPLYEQLASGIPLYNKVRNYLTQKPYSISKVKLNFENSTLLNGWDVNKEVDNSCVLFRRNDHYYLGIMDKKHNKVFDRDVPECSNPATSYEKMNYKLLPGANKMLPKVFLSKKGVETYNPSFEIIENYKSETHKKGEHFIINDMRKLIDYFKECISLHPDWKHFEHKFSATESYEDLSGFYREVEKQGYKITFKNIDASYIERLVDEGKLYLFQIYNKDFSPFSKGTPNMHTLYWKMLFDKINLINVVYKLNGEAEVFYRKSSIKEGNKIVHKANKPLQSKNELNIKKESSFAYDIIKDRRYTLDKFQFHVPITMNFSATGTDNINQIVNRFLKNNTEINIIGLDRGERHLIYYTLINQQGEILEQGSLNEISNEKQKVNYKDLLVKKEGDRTQARKDWNTIENIKEIKEGYLSQVVHKIATLMVEKKAIVVMEDLNIGFMRGRQKVERQVYQKLEKMMIDKLNYLVFKTKSPNIPGGLLKALQLTNKFESFKSMYKQSGFLFYVPAWNTSKIDPTTGFVDFLKPKYESIEKSKTFFSKFHSIRFNGTDNYFEFDFDYNDFTGKAEDTKTLWTVCTQGNERYSWNNRLNKGAGTIEKINVTESLQLLLDEKKIPYAGGNNLINDINEQESAEFFKKLTKLLSITLCLRHSNGQSGASEKDYILSPVKNGDGLFFNSNETDNSLPKDADANGAYHIALKGLWALQQINHSEDMRKINLAITNKEWLQFVQNKLYKL

SEQ ID NO: 778 - protein, 1255 aa, unidentified
  REGION 1..1255: note = Cas Enzyme sequence
MNTTVFTNQYPLSKTLKFELIPQGKTLENIQHEGLLEQDNNRAVSYQKIKRLIDEYHKVFIENSLKGMKLVELEVYSEWYQKKDKVDADKKAFEKVKEALRKQISLTFSSQDIYKTLFSKELIKEDLLAFVKQEDKSLVNEFKDFTTYFTGFHENRKNMYVADEKSTAIAYRLINENLPKFIDNLNIFLQIEDKSVSLIADFNKALQEMEEIAQGRTLEDIFTLSFFNETVTQHGIELYNIIIGGRTGENGKSKIKGINEYINLYNQQQNNKLNRLPKFKQLYKQILSDRNSVSFVLDNFENDNHLLECIEQFYQSGICHFESDGNSIDLLTTIRQFLNGLDSFDQTKIYIRNDNSITDISQKIFGDWNVIRAALTAFYEKTNPIKPRERLDKFEERKESWVSKTGYFDINTIQTALDSYDSEAIIDKYSPDCIVKHLGNIGKSKESTIDLVDTIQQNYAVIKDLLNNPYPEDEKLGTAKELVAQIKTFLDSLLNLIHFLKPLNVGNDELEKDESFYSIFTPLYEQLSEVIPLYNKVRNYLTQKPYSINKVKLNFENSTLLNGWDVNKEVDNSGILFRKNGLYYLGIMDKNNNKIFDRNVPQCQDLTTSFEKINYKLLPGANKMLPKVFLSKKGVETYNPTLEIIENYNNETHKKGDTFNIDDMRKLIDYFKESISLHPDWKHFEHKFSETKSYEDLSGFYREVEKQGYKISFKNIDEAYINKLVEEGKLYLFQIYNKDFSPFSKGTPNMHTLYWKMLFDISNLKNVVYKLNGEAEVFYRKSSIKEKNMIVHKANEPLQSKNELNTKKESSFTYDIIKDKRFTLDKFQFHVPITMNFKATGTDNINPSVNQFLQNNKDVNIIGLDRGERHLIYYTLVNQKGEILEQGSLNEISNEKQKVNYKDLLVKKEGDRTQARKDWNTIENIKEIKEGYLSQVVHKIATLMVERNAIVVMEDLNMGFMRGRQKVERQVYQKLEKMMIDKLNYLVFKTKATDEPGGVLKALQLTSKFESFKSMGKQSGFLFYVPAWNTSKIDPTTGFVDFLKPKYESIDKAKSFFSSFKAIRFNASSNYFEFEFDYNDFNGKAEDTQTNWTVCTVGTERYSWNKKLNMGKGAIEKIDITQALQLLLDEANILYAAGNNLIQDINDQNNADFFKKLIKLLSVTLSLSHSNGLSGEAEKDFILSPVKNDQGQFFNSNDFDGRLPKDADANGAFHIALKGLWVLRQINEAEDMKKVKLSITNKEWLQFVQNKHYKS

SEQ ID NO: 779 - protein, 1255 aa, unidentified
  REGION 1..1255: note = Cas Enzyme sequence
MLYYDNYTKRNQVTKSIRFGLEPQGKTLQTIDKKGDRIYDKALYAALDRMKPVIDSFIIDIVQKSLESMRDFDFVSMNVAMTEKDTKTYNKLEKDLFKALAKQVDNTLPNKITASKIKSALFINDVLKEYVQTTSDLGIDKDKALKDIEELKGCQALFSKFLTSRVTALTVSMPKRVVDNFRIYCANIPKVEALLQSGCFDDLSDEISQMKSVSYYNKVLSPKDIDGYNSIISGINDGNKTVEKGLNQRINEYNTRVKNEKLDTPYLRRINPLYKQILIPSDKKFTINSISSDDEVRTVIKEAWQAYEKPAEEIVRLINDKSASSGGQGVFAKNTRLHMLSFYLTGDHNKISDSLINTALSEINEMLKNKNLKPSMKKELEKRIEILPALISKTDYELSALNDAIVPDDKSLTTPSRTVMEMYAKKIMEAYEMTKVCYKILEGGGVYTDRRIKGDRHVQELLVDFFGALTDFREALSIIYFPSDSENDEKKDYAFYNVFEELFENVRLTYKAENLVRNYITKSIKETSSEKQTLFGTTARLRTQWWNGEDKFSKDNAAIILHEDKYYYFILAGDSKPVEITSNGKHNARLSTLKKGQKSFMMLPKILFTGHAVPFFEGNKDADTCIINDESVVRPVAVSRELYDIYKNGLFKKEAIDQGLITEKQYKENIQKLIEKYIEFANAYVQYKKFNFEDITDSTEYNDIGEFFSDVDTHTAAMTWVDIDFKQIESYVESENAYLFLLDNKFLSSEKEHSEDRNLYTRTLFSIFSDMNMDKTTILLNSNPVVFFRPQSIERKVTHKAGSILVNRRTKDGEHIPKRIHETIYKIKNNIESITDKDYKDAKEYMQTHDVIFFTSKYDKSYKSQYMSDKYILQLTYTKNNDVSDRYNDLLNNRVNDDIKDGCNIVSIARSTKDMVYVMVLDSKLQVIKEESLNVIDGIDYYKLLRDTYRDKLFDKKVWVYDTENADLKSAYVDLAITKILEISRKYNAVIVCENIADSVKNKYAYLDNQVFRRFELRLAQRLSDLSFKYITDGEPGSVSNPLQLSNNNANMYQDGVLYYVKGTFTRCIDPETGFINLFDFSRLNSIGAKRQFFAKMESIRYTGDSIIFKFDYNDYPVKIDTAKKDWQIRLFGSMPIYDTQKHAVKIIKDVVNDRIMPLAGAMDVDGNIAEAITDKKVPGVFVDELLKWFKEAIRGYHRQTGSSSEFYRSPVSGKDYDISSTQAYVLAQKFMFSQSYSGDSKDFSAKWINYLQKQ

SEQ ID NO: 780 - protein, 1255 aa, unidentified
  REGION 1..1255: note = Cas Enzyme sequence
MGTLKQFTRVYPLSKTLRFELKPIGRTLEFINSSGLLEQDQHRADSYIKVKGIIDEYHKAFIETVLNDFKLNYTDEGKKNSLEEFYTCYMCKAKDEAQKKLFEEIQGKLRKQIADCFSKDDKFKRIDKKELIKEDLVNFVTNQEDRLLIDEFRDFTTYFTGFHENRKNMYSAEAQSTAIAYRLIHENLPKFIDNMLVFDKVAASPVSEHFAGLYSNFEEYLNVMNIAEMFRLDYFNIVLTQKQIDIYNYIIGGRTLDDGTKIKGLNEYINLYNQQQKDKSVRLPKLKPLYKQILSDRNAISWLPEQFESDEKALEAIQKAYQELDEQVFNRNKEGEHSLKELLQTLAEYDLDKIYIRNDLQMTDISQKVFGHWGIISKALLEQLKKELPKKSKKETDEAYEERLNKVLKSQGSISIAQINNSVWAMGMEEQNSIQAYFARLGAVNTETVQQENIFSHIENAYTEVKDLLNTPYPSNKNLAQDKVNVEKIKNLLDAIKSLQHYVKPLLGDGTESEKDEKFYGEFVALWEDLDKITPLYNMVRNYMTRKPYSTEKIKLNFENSTLMDGWDLNKEQANTTVILRKDGLYYLAIMNKKHNRVFDVKNMPESGDCYEKMEYKLLPGANKMLPKVFFSKSRINEFAPSEQLMANYRNETHKKGASFNIHDCHALIDYFKSSINKHEDWSRFGFHFSDTNTYEDLSGFYREVEQQGYKISFRNVSVDYIHSLVEEGKIYLFQIYNKDFSPYSKGTPNLHTLYWNMMFDERNLADVVYKLNGQAEVFFRKSSITCERPTHPANQAIDNKNTLNMKKQSVFTYDLIKDRRYTVDKFQFHVPITMNFKSTGNDNINQSVNEYIQKCDDLHIIGIDRGERHLLYLTVIDMKGQIKEQYSLNEIVNTYKGNEYRTNYHELLSKREDERMKARQSWQTIENIKELKEGYLSQVIHKISELMVKYNAIVVLEDLNMGFMRGRQKVEASVYQKFEKMLIDKLNYLADKKKNPEEEGGILNAYQLTNKFTSFQKMGKQSGFLFYTQAWNTSKIDPVTGFVNLFDTRYETREKTKVFFCKFDFIRYNRDKDWFEFAFDYNKFTTKAEGTRTQWTLCTCGNRMETFRDEKQNSQWTSQECDLTDKFKEFFAKYGIDIHTNLKEAIAQQDSADFFKGLLYLLKLTLQMRNSKTGTDIDYMQSPVADANGNFYNSELCDNSLPKNADANGAYNIARKGLWIVRQIKASDDLRNLRLAISNKEWLQFAQNKPYLND

SEQ ID NO: 781 - protein, 1255 aa, unidentified
  REGION 1..1255: note = Cas Enzyme sequence
MRTSVFTNQYPLSKTLKFELIPQGKTLEHIQHKGLLEQDNNRAISYQKIKRLIDEYHKVFIENSLKGLQLEELVVYSEYYQKKDKVDADKKAFEKVKETLRKQISLTFSSQEVYKTLFSKELIKEDLLAFVKQEDKSLVNEFKDFTTYFTGFHENRKNMYVADEKSTAIAYRLINDNLPKYIDNLNIFLQIEDKSVSLIADFNKALQEMAEITQGRTLEDIFTLSFFNETVTQHGIELYNIIIGGRTAENGKSKIKGINEYINLYNQQQNNKLNRLPKFKQLYKQILSDRNSVSFVLDNFENDNHLLECIEQFYQSGLCHFESDGNSIDLLTTIRQFLNGLGSFDLTKIYLRNDTSLTDISQKLFGDWNLIKAALTNYYEKTNPFKPRERVDKFEERKEHWVSKTGYLDINTIQIAIEGYDSEVIKDKYTPDCIVNYLGIIGKNKETTFDLVDVIRQNYAGIKDLLNNPYPEDEKLGNAKDQIAQIKIFLDSILNLIHFLKPLNVNNDGLEKDESFYSIFTPLYEQLSEVIPLYNKVRNFLTQKPYSINKVKLNFENSTLLNGWDVNKEVDNTSILFRKNGLYYLGIMDKKHNKIFDRNVPKCQELNTSFEKINYKLLPGANKMLPKVFLSKKGVETYNPTLEIIENYNNETHKKGDAFNIDDMRMLINYFKDSISLHPDWKHFEHKFSETKSYEDLSGFYREVEKQGYKISFKNIDESYINKQVEEGKLYLFQIYNKDFSPFSKGTPNMHTLYWKMLFDENNLKNVVYKLNGEAEVFYRKSSIKEKNMIVHKANEPLQSKNELNLKKESSFTYDIIKDKRFTLDKFQFHVPITMNFKATGTDNINPSVNQFLQNNKDVNIIGLDRGERHLIYYTLVNQKGEILEQGSLNEISNEKQKVNYKDLLVKKEGDRTQARKDWNTIENIKEIKEGYLSQVVHKIATLMVERNAIVVMEDLNMGFMRGRQKVERQVYQKLEKMLIDKLNYLVFKTNAPDENGGLLKALQLTSKFDSFKSMGKQSGFLFYVPAWNTSKIDPTTGFVDFLKPKYESIDKAKTFFSSFKSIRFNAANNYFEFEFDYNDFNGKAEETQTKWTVCTAGTERYSWNKKLNMGKGGIEKIDITQTLQLLLDESMIPYAAGNNLIQDINEQTNADFFKKLIKLLSITLSLRHSNGLSGEAEKDFILSPVKNDQGQFFNSNDSDGRLPKDADANGAFHIALKGLWVLRQINEAEDLKKIKLAITNKEWLQFVQNKLYKV

SEQ ID NO: 782 - protein, 1255 aa, unidentified
  REGION 1..1255: note = Cas Enzyme sequence
MRTSVFTNQYPLSKTLKFELIPQGKTLEHIQHKGLLEQDNNRAISYQKIKRLIDEYHKVFIENSLKGLQLEELVVYSEYYQKKDKVDADKKAFEKVKETLRKQISLTFSSQEVYKTLFSKELIKEDLLAFVKQEDKSLVNEFKDFTTYFTGFHENRKNMYVADEKSTAIAYRLINDNLPKYIDNLNIFLQIEDKSVSLIADFNKALQEMAEITQGRTLEDIFTLSFFNETVTQHGIELYNIIIGGRTAENGKSKIKGINEYINLYNQQQNNKLNRLPKFKQLYKQILSDRNSVSFVLENFENDNHLLECIEQFYQSGLCHFESDGNSIDLLTTIRQFLNGLGSFDLTKIYLRNDTSLTDISQKLFGDWNLIKAALTNYYEKTNPFKPRERVDKFEERKEHWVSKTGYLDINTIQIAIEGYDSEVIKDKYTPDCIVNYLGIIGKNKETTFDLVDVIRQNYAGIKDLLNNPYPEDEKLGNAKDQIAQIKIFLDSILNLIHFLKPLNVNNDGLEKDESFYSIFTPLYEQLSEVIPLYNKVRNFLTQKPYSINKVKLNFENSTLLNGWDVNKEVDNTSILFRKNGLYYLGIMDKKHNKIFDRNVPKCQELNTSFEKINYKLLPGANKMLPKVFLSKKGVETYNPTLEIIENYNNETHKKGDAFNIDDMRMLINYFKDSISLHPDWKHFEHKFSETKSYEDLSGFYREVEKQGYKISFKNIDESYINKQVEEGKLYLFQIYNKDFSPFSKGTPNMHTLYWKMLFDENNLKNVVYKLNGEAEVFYRKSSIKEKNMIVHKANEPLQSKNELNLKKESSFTYDIIKDKRFTLDKFQFHVPITMNFKATGTDNINPSVNQFLQNNKDVNIIGLDRGERHLIYYTLVNQKGEILEQGSLNEISNEKQKVNYKDLLVKKEGDRTQARKDWNTIENIKEIKEGYLSQVVHKIATLMVERNAIVVMEDLNMGFMRGRQKVERQVYQKLEKMLIDKLNYLVFKTNAPDENGGLLKALQLTSKFDSFKSMGKQSGFLFYVPAWNTSKIDPTTGFVDFLKPKYESIDKAKTFFSSFKSIRFNAANNYFEFEFDYNDFNGKAEETQTKWTVCTAGTERYSWNKKLNMGKGGIEKIDITQTLQLLLDESMIPYAAGNNLIQDINEQTNADFFKKLIKLLSITLSLRHSNGLSGEAEKDFILSPVKNDQGQFFNSNDSDGRLPKDADANGAFHIALKGLWVLRQINEAEDLKKIKLAITNKEWLQFVQNKLYKV

SEQ ID NO: 783 - protein, 1255 aa, unidentified
  REGION 1..1255: note = Cas Enzyme sequence
MIEQFTNRYPVTKTLRFSLIPIGKTEENFNKKQLLKEDEERALKYYPVAKKVIDKYHKDFINDVLSKTYLDSDILSDYSTLYYKSDKSDKELDMMVKLEENMRTIIAKELKNDSRFNFLNKKELIRTVLPEYLSNQDIPEEDLKAVESFRDFTTYFTGFYENRKNMYTDEAKSTAIPYRCINVNLPKFLDNIKNFEKVLSALPSKDIEELDRDCFSAFGINLKNAFSLDYFNFALSQSGIDRYNGITGGYTCSDGSKVQGLNEKINLYNQQVAKNFRIPQMKPLYKQILSDSKSISFIPERFNSDEELLKGVNEFYTKADENTYSVCEAIAELKKLFDDFASFNTDGIYIKSGLPVTDLSNAVFGSWRSIRDGWNAEYENVNPPKKGKNEKYIENEDNTFKKSKSFSLSNLQHYGESGHSDDSEVTSSITKYYVSKIAELTKAIGTKYNAAHDLLTSPYNDKKKLCNNNEAIELIKDFLDSIKELEKLVKPLLGTGKEDKKDEIFYGRFVPLYETISLVDRIYDKARNYLTQKPYSTDKIKLNFDNSSFMSGWAQDYDTKGAVLFRNNGLYYLGIVDKKLSSDEKKYLAENTDGQSFEHIIYDFQKPDSKNTPRLFIRSKGTSFAPAVDKYNLPIDDIIDIYDKGYFKTQFRNTDPQKYKDSLTKIIDYFKLGFSRHESYNHYHFNWKPSEQYNNISEFYDDTISSCYDIKFEKINYNHLEEFVNNGKIYLFRIYSKDFSEYSKGNPNLHTLYFKMLFNEDNLKNIVYKLNGEAEMFYRKKSIDDEEKIIHKANNPIKNKNPLNDKKFSEFNYDIVKNKRFTSRQFSLHVPITMNFKANSSEILNSDIRKAVKSNKENYIIGIDRGERNLLYICVINSKGEIVEQTSLNEIIDCANHKVDYHELLDTKEKERDEARKSWGTIENIKELKEGYLSQVIHTICKLVLKYDAVIAMENLNFGFKNGRFKVEKQVYQKFENMLICKLNYLVDKSADINSDGGLLKAYQLTNKFNGLNKSKQNGIIFYVPAWNTSKIDPVTGFVNLLNPRYTSVDDAKNLFESSAILDVRFNGKTDMFEFDIDYSNVPRGSADFRKQWTVCTNSDRIRTFRSSENNNQFVSERVILTDEFKKLFAANGIDIGGNIKSQIMSKDSKMFFKEFIKLLALTLQMRNSVSGSTAPEDDYLISPVRNSEGVFYDSRDYLGNNAGLPADADANGAYNIARKALWAIELFKNTADEELENADISITNKQWLEYTQNI

SEQ ID NO: 784 - protein, 1256 aa, unidentified
  REGION 1..1256: note = Cas Enzyme sequence
MNTGFNDFTNLSSVTKTLCNRLIPTEITAKYIKEHGVIEADQERNMMSQELKNILNDFYRSFLNENLVKVHELDFKPLFTEMKKYLETKDNKEALEKAQDDMRKAIHDIFESDDRYKKMFKAEITASILPEFILHNGAYSAEEKEEKMQVVKMFNGFMTSFSAFFTNRENCFSKEKISSSACYRIVDDNAKIHFDNIRIYKNIANKFDYEIEMIEKIEEAAGGADIRNIFSYNFNHFAFNHFVSQDDISFYNYVVSGINKFMSLYCQASKEKFSPYKLRRLHKQILCIEESLYDVPAKFNSDEDVYAAVNDFLNNVRAKSVIERLQMLGENADSYDLDKIYISKKYFANISQTLYRDFSIINTALTMSYIDTLPGKGKTKEKKAAAMAKNTELISLGEIDRLVDKYNLCPDKAVSTKSLIRSISDIAAGCKASPLTMNSGLPLAENEVEITVFKDALEPFMDIFRWCAKFKTDEPVDKDADFYTELEDISDEIHSIVPLYNRTRNYITKKPYSIDKFGLYFGTSTFASGWSESKEFTNNAILLVKDNKFYLGVFNAKNKPAKSIIKGHDTMQDGDYKKMVYSLLTGPNKMLPHMFISSSKAAPVYGLTDELLSDYKKGRHLKASKNFDIDYCHKLIDYFKHCLALYTDWDCFDFKFSDTESYNDIGEFYKEVAEQGYYMNWTYIGSDEIDSLQENGQLYLFQIYNKDFSEKSFGKPSKHTAILRSLFSDENVADPVIKLCGGTEVFFRPKSIKTPVVHKKGSVIVSKTYNAQEMDENGNIITVRKCVPDDVYMELYGYYNNSGTPLSAEALKYKDIVDHRTAPYDIIKDRRYTEDEFFINMPVSLNYKAENRRVNVNEMALKYIAQTKDTYIIGIDRGERNLLYVSVIDTDGNIVEQKSLNIINNVDYQAKLKQVEIMRKLARQNWKQGVKIADLKKGYLSQAVHEVAELVIKYNGIVVMEDLNSRFKEKRSKIERGVYQQFETSLIKTLNYLTFKDRKPLEAGGIANGYQLTYIPESLKNVGSQCGCILYVPAAYTSKIDPTTGFVTLFKFKDISSEKAKTDFIGRFDCIRYDAEKDLFAFEFDYDNFETYETCARTKWCAYTYGTRVKKTFRNRKFVSEVIIDITEEIKKTLAATDINWTDSHDIKQEIIDYALSSHIFEMFKLTVQMRNSLCESKDREYDKFVSPILNASGKFFDTDAADKSLPIEADANDAYGIAMKGLYNVLQVKNNWAEGEKFKFSRLSNEDWFNFMQKR

SEQ ID NO: 785 - protein, 1256 aa, unidentified
  REGION 1..1256: note = Cas Enzyme sequence
MGTINFSDFTNLSSVTKTLCNRLIPTEITAKYIKEHGVIEADQERNMMSQELKNILNDFYRSFLNENLVKVHELDFKPLFIEMKKYLETKDNKEALEKAQDDMRKAIHDIFEGDDKYKKMFKAEITVSVLPEFILRNGAYSAEEKEEKMQVVKMFNGFMTSFSAFFTNRENCFSKEKISSSACYRIVDDNAKIHFDNIRIYRNIADKFADKSEMIEKIEEAAGGADIKNIFSYNFNHFVSQNDISSYNYVVSEINKFMNLYCQATKEKLSPYKLRRLHKQILCIEESLYDVPAKFNCDKDVYAAVNDFLNNVRTKSVIERLQMLGENADSYDLDKIYISKKHFANISQMLYRDFSVINTALTMSYIDTLPGKGKTKEKKAASMTKNTELISLGEIDRLVDKYNLCPDKAVSTRSLIRIISDIVAGYKASPLTMSSGIPLAENETEIAVLKEAIEPFMDIFRWCAKFKTDEPVDKDTDFYTELEDISDEIHSIVSLYNRTRNYVTKKPYNTDKFELYFGTSSFASGWSESKEFTNNAILLAKDDKFYLGVFNAKNKPAKSIIKGHDTMQNGDYKKMVYSLLTGPNKMLPHMFISSSKAAPVYGLTDELLSDYKKGKHLKASKNFDIDYCHKLIDYFKHCLTLYTDWDCFDFKFSDTKSYNDIGEFYKEVAEQGYYMNWTYIGSDDIDSLQENGQLYLFQIYNKDFSEKSFGKPSKHTAILRSLFSDENVADPVIKLCGGTEVFFRPKSIKTPVVHKKGSVLVSKTYNAQEMDENGNIITVRKCVPDDVYMELYGYYNNSGTPLSAEALKYKDIVDHRTAPYDIIKDRRYTEDEFFINMPVSLNYKAENRRVNVNEMALKYIARTKNTYIIGIDRGERNLLYVSVIDTDGNIVEQKSLNIINNVNYQAKLKQVEIMRKLARQNWKQGVKIADLKKGYLSQAVHEVAKLVIKYNGIVVMEDLNSRFKEKRSKIERGVYQQFETSLIKTLNYLTFKDRKPLEAGGIANGYQLTYIPESLKNVGSQCGCILYVPAAYTSKIDPTTGFVTLFKFKDISSEKAKTDFIGRFDCIRYDAEKDLFAFEFDYDNFETYETCARTKWCAYTYGTRVKKTFRNRKFVSEVIIDITEEIKKTLAATDINWTDSHDIKQEIIDYALSSHIFEMFKLTVQMRNSLCESKDREYDKFVSPILNASGKFFDTDAADKSLPIEADANDAYGIAMKGLYNVLQVKNNWAEGEKFKFSRLSNEDWFNFMQERQSRQ

SEQ ID NO: 786 - protein, 1256 aa, unidentified
  REGION 1..1256: note = Cas Enzyme sequence
MATRSIKLKLAVGPLKKKPADDPENKRREQLRQAIWTTHKVFNEGVRYYMQWLMRMRQRPFRKKQHEDEDDEIVGLSAGQDYFFHEAALKEELLCKTGAEEKGGANFDRPAVLELLGKFYGVIVDLGGREKKQNAKKKSKKKGRGKSAEHVVVDTSADEPDALEVSEVNDDDRDAVSAQKAASLAGSYLGILTKAKKPISPAKESESTKAKDAGDASRIAMEKAPPWARSWLEEPKKKKKILTDSLQEILKWGLETNVDYVKKSAKWLGPLNEWMTTNQKDGQDEVPRWVDGYLKWLKTQKKKNDEFGPIKAELCQRNLTPLFPKFTESAHVDVKGNAKLLDKACLAEAIVRMGQFEINSIKVSSRKNDLDQAKDKLAKEREEIPEIIRNLLQKYEKERTYDLGRESLEPRDQYRIMPSGSRRFKEIVAAWKDRLETNGTASDDELKAIVGKLHGKFRKRGFGDPKLFRALVEQPFRPVWQDGPAHLNKWAEANDAERDASRAKERPRLTLPDPVHRPVWMRYEGAGGSNLGCVWFKREGEGTTARTFICCDLIEPDDPNKPDGPYHVRGTDGQKTRKKAKPKPNSTDTVIPLRSTEQIELTNIGSLAKTIRNADGKKKWAYQKLEMRDLSTREELKGELKGSQIIFGEKGPCLESFVEKGTPKCFLSAVVDVAPKTLQQNYAEPVQPFKFKNRKPIGWNADFLQEGRRVLSLDLGIRQFAAYSVFVLTQNRPDNKLYFDVWKAAGWYAVHDVSGSLKLDGEKEAQKIMERREAIRDRRFELQRAINLLGDLFSLGRLSKPEKKQEELNDLKESLKNASDFIRSTFPPCDLDPLDALAEKNKDPRWWKQEEDGSNECDGVCKIHRKWEIALGQQIHKWREEHKHFIRRIWDGTETRGIGGLSFWRLEELDAERRLTLCWSLHSRKYSAEEREDGTRKAVFMKSKARGVTSGSQNVEWVDTDTKLREHINKFKEDRRKVGANKIVMAALGYQFKARYGEGENKGEKKPKHEKWEKRSVGIRSNYILFENLSEYGFRKDRPRRENSKLMKWAHRAIPKEVKMQGQLFGLRVGDVLPQFTSRVYARNLSPGIRCHLVRAIDLKQGGYYHTKWQEEIDDQEHPRTKLPEPGDLVPEPLGEWFVTLVKDKNGDAKMCRVDADVNAAWNLQRRFWTHEFTGPFYRWDEVSKKRLFRDPSGIVVPHNMGADGWFSQEDFRAAVEKRILPFLGPGIREPICETDILEDSDGDLDYPEPPDDLNF

SEQ ID NO: 787 - protein, 1256 aa, unidentified
  REGION 1..1256: note = Cas Enzyme sequence
MKQFINQYQVAKTLRFKIIPTKKTKEILAEKRKQSKLLLEADKKRAKDFKVAKEVIDRFHRDFIDSVLDKMKNDSNIIESLQDCSTEDGKNELRKKISERFLTDPLYNSLFGKDLFVQANSEKGLYSFAKNESERDALLAFEGFTIFFAGYHENRKNMYVSKKQTTAIAYRIVNVNLQKFENNMIVFSEIMKTVLATTLSKNTKLKKLLKGKPCEDIFQLGFYINVWKQEEIEYYNDIVGIINSDIKQFNDTLASKKSELPLMEKLYKQILGFKEEDKNDWMFRGFNSDKELLKAVGQFYSLFESKIAEPLRQLLENINTYDLAGIHIHQKSLRTISSSIFDDGYAIARTLIPQNTNESYEEYKERIKKGNKSFTIQSVNKKASTNICQYFSKHSFKPITEDSDNREEKDIFETIKVAYENVKEIICNAKSYSKKELAGSGNEEKLKTLLDSLKILQNFVQPLLGKGDEKKKDWSFYNEFTELWEELRPLNILYDKVRNRMTRKPFSTDKIKVIFDVKRNFLNGWTDSMTKSDNGTQYGGYIFRKKNAIGEYDYYLGVCKNAKILRKRDGVHGDYERLDYYQIDSKTFYKYYYCGANGFEEDKNSLMKAIRSFLEITAQDENDEQLLKDVNSKDTPIAMITAIQERSQSKLSELLNDKDFADINKTVIENLRKSILSLSRIPEAQDYKDKEYLLFSEVQHDIEVLCRTKRVFEYFQVSDEEIRNAQDDDTKPLLLFKISNKDLSYAETYCEGKRTSRGTENLHTMYFKTLMEGNQKVFDIGAGQIFFREKSIPRKVTHKAGVPIENKNERVHAERPTRTLCYDLVKDKRYTEDNYLFHLSIVINYQKSELPKSDKKKAVNDFLCEFNNMTLEYLRQNKGNVNIIGIDRGERNLIYVSLLNAKGEHLTTEFPRSYNLIGNFDYQKKLKQVAKNRDEERKNWTIPERIADIKKGYLSQVVHEIASLAVRHHAIIVMENLSRGFKNGRFPIEHQVYQLFENMLIEKLSYFAFKKDSPSEGYGNIINGVQLAVPINKADGVKQNGWIFYVPAGYTSKIDPATGFADLFNLNGAAKDIRNFFRAFDSIRYENGLFHFEFDYSKQETKGIRKTTITPWHLSSHGKRIEKKELVDLTSKFRSFFAKSDVSISLDKVSIESICNLDDIQLNEFFGLFKLLLKMRNSYDEQDFIISPVADDKPFITGEGNPMGIKDADANGAYNIALKGLYWLYFNFPTDENGYLKYIKDEDWFDFIQTKPYLND

SEQ ID NO: 788 - protein, 1256 aa, unidentified
  REGION 1..1256: note = Cas Enzyme sequence
MKKIDNLTNKYPLSKTLRFRLIPVGKTMEHFTANRCLEVDEQRAEDYKAAKKIMDRRHRAFIEQVLQGLSLRGVEEYAELYYSSEKSDSDRKRMYSLADDLRSQIAVAFTRHADFTALRPYDMVSDGLTDYVDGDSEADIIENFRGFTSYFTGFHENRQNLYSAEDKHTSVAARCISENLPRFLDNAKNFKQIYDALPAENIAALSKNFMSLCSSDISVFFKPENFSFFLSQQQIDKYNTLIGGYTMEDGTKIQGINEYVNMHNQICDRSARLPLLVPLYQQLLGDHTTASFVADQFTTDAELLYALNGLFNAEGEGGMDLYKTLHTLQDLMTALSQQDVSRIYMKSGAAVSDLSLALCGDRAAIADAWNSTYDGQNMQKKPKNMTKYLAARNAAYKKVKSYSLSDLQALCNRATERKADVLNYICSHFAEAKASVNIMYTAAAGVLNRPAGNSKALMQDTDAVARIKDLLDSIKAVSHVVLPLLGSGLETDRDELFYSQFIPCCDVLTEVNRLYDRVRNYLTQKPYSDEKIKLNFGNPSFLGGWSAGFEKQYSSCLFRSGNDIFLGVMDKGHKSAFGDFPAPKNAEDMFEKMEYRQMASPSKDIPCLMVIDGVTVRRVGKKEKTGPHAGENLLLEDLKNTHLPPEINRIRKARSFSINSENFSKADLTAYIDYYKARVSEYNSAFTFTFKPSEEYANFAEFTDHVDSQAYQVKFVPVSKQHIDLLVDTGALYLFRLYNKDFSADSKGRPNLHTLYFRMLFDERNLKDIHYQLCGGAEMFYRKASISDENKILHPANQAVKNKNPLNKKGESTFTYDLVKDRRYTEDQLFLHLPVALNGNSEGKKNINLDVRETLREAGGTNVIGISRGEHDLLYICVIDRFGEVLEQESLNIVDSGTAETPNKHDYKALLTRLDEEKRDAQRAWQSAKNSKEIKTGYLSQVVNKVCNLVVKYDAVIAMEDMNHGKNKGAYQLQNDVYKAFEKMLIDKLNFFVLKGADIDAPGGLLNAYQLTNKFESFQKLGRQNGIIFYVSPGMTNNLDPVTGFIDFLRPRYTTEAAASEFFSFFDSIYYNAEENHFEFSFNYDMFPSGELSSRKAWKVCTKGTRINSYRNRYNNTVVHEELDITKEMKKLFKEYGIDYTAGNLVDAIVKQGGKDFYMKLMRLLALTLQMRNQSDTDSYFISPVRSFDGVPYDSRRFPADAILPCAADGVTAYNMARKALLAVQMIFEAPAETLAKTNLFLSYEDWLRYAQANWN

SEQ ID NO: 789 - protein, 1256 aa, unidentified
  REGION 1..1256: note = Cas Enzyme sequence
MLSHFTNQYQLSKTLRFELKPVGETLKHIELKGLLAQDETRSQEYQEIKIIIDKYHKAFIEEALHDVSLSKLAEYETAFFDKNRDEKAFEKLQDALRKEIVMQFKKDAHYATLFKKELIKADLQNWQELSDAEKELVSHFDNFTTYFTGFHENRANMYTDEAKHSSIAYRIIHENLPIFLTNKKLFEIISQKAPQLAQETQDALLEHLNGAIVADMFELSYFNRLLSQSHIDLYNQMIGGVKKDELKIQGFNEKINLYRQANGLSKRDLPNLKPLHKQILSDRETLSWLPEAFENYEELVQGVQAYFNSEVLTFECCDGKVNLLEKLPELLNQIQDYDLSKIYFKNDVALTSASQAIFKDYRIIKEALWEVNKPQKSKDLAADEEKFFNKKNSYFSIEQIDDALKEAKLFASMMAYFQSESSKTIEQIQVAYAQWKQNTSNKELLKAFLEVLLSYQRLLKPLNAPNDLDKDVAFYVYFDTYFASLSGIVKLYDKVRNFMTRKPYSLEKFKLNFENKGDFLGGWVDSHTENSDNGTQAGGYLFRKKNHIGEYDYYLGISKDTKLFRSHLQNEIQEEDKSEFERLDYYQLKSASVYGNSYIGGSYDEDKKMLLKSIYKFAENNHPLKADFDKYIASQKGDNQPTPNGMINIVVEKYPQLMQELVKNEEFEAANKMVIERLKQTILSLHRVPKSQDYRDKVFSLFIEPIQIIEELSKEKSFFYFHVSDNEFKSALARDEKPLLLFKITNKDLSFADSFASGKRKSRGTENLHTLYFKALMSGNQNVYDIGTGEIFFRKKSIEYSEERLKKGHHFDDEKKLKDKFAYPIIKDRRFAFDKFQFHMSIIQNYMYPKQPKGFEEKVNLAIHDADNIKVIGIDRGERHLLYLSLIDSNGKIIFQETLNSIVNTFNNEPIDYHSKLDAKEKDRDKARKEWGVVENIKELKEGYLSHVVHKIATLIVEHGAVVAMEDLNFGFKRGRFKVEKQVYQKFEKALIDKLNYLVDKKKQPDELGGILNALQLTNKFQSFEKMGKQNGFLFYVPAWNTSKIDPVTGFVDLFDTRYASVEKSKAFFAKFKTIRYNEAKDYFEFAFDYNDFTDKAKDTRSEWTLCTYGERIVSFRNAEKNHQWDSKTLHLTTEFKNLFGSYTGDLKATILAHDDKEFFEKLLRLLRFTLQMRNSITGTDIDYLVSPVADEQGNFYDSRKADASLPKDADANGAYNIARKGLMLMRRIQKAEDPKKVNLAISNRDWLRCAQGLEK

SEQ ID NO: 790 - protein, 1256 aa, unidentified
  REGION 1..1256: note = Cas Enzyme sequence
MNTFEKFTKTYPLSKTLRFELIPIGQTKENVIRDGLLEQDEHRDASYQQVKKIIDEYHKAFIEDVLENVRLAYTSEGKKNSLEEFYTDYMCKSKDETLKKHFEEVHKNLRKQIADSFSADERFKRIDKKDLIQKDLVSFVERIEERQLIEEFKDFTTYFTGFHENRKNMYSAEAQSTAIAYRLIHENLPRFIDNMSVFEKIAASSVADNWFAALREDFAEYLNVEKIAEMFRLDYYNTVLTQKQIDVYNAIIGGKTIEESNIKIKGLNEYINLYNQKQKDKAARLPKLKPLYKQILSDKNAISWLPEHFESDEKLLEAIQKAYQELEELVLNCNREGEHSLIQLLQSMDTYDLEKIYISNDQQLTDISQKVFGHWNIISKALLEELKRVVPKKSKKESDEAYEERLGKILKAQGSISIAKINQSVQALNGEVPNTLQAYFAALGAVDTDTLQKENLFAQIENAYAEVKELLKTPYPADKNLAQDKRNVEKIKNLLDAVKALQHFVKPLLGDGTESDKDEKFYGELTALWDELDKITPLYNMVRNYMTRKPYSTEKIKLNFENSTLMDGWDLNKETDNTTVILRKDGLYYLAIMNKKHNKVFSIKNIVSEGECYEKMEYKLLPGANKMLPKVFFSKSRIGEFAPSEALLENYRNETHKKGPNFNIEDCHALIDFFKASIDKHEDWCKFGFQFSDTSTYEDLSGFYREVEQQGYKITFRNVSVDYVNTLVEEGKIYLFQIYNKDFSPYSKGTPNLHTLYWKMLFDERNLADVVYKLNGQAEVFFRKHSINYEHPTHPAHQPIDNKNAQNEKRQSTFTYDLIKDKRYTVDKFQFHVPITMNFKSTGNENINQSVNEYIRQADDLHIIGIDRGERHLLYLTVIDLKGNIVKQESLNEIINEYKEFPSINYHDLLTKREENRMKSRQSWQTIENIKELKEGYLSQVIHKIAELMVRYNAIVVLEDLNQGFMRGRQKVEASVYQKFEKMLIDKLNYLADKKSQPEEPGGILNAYQLTSKFVSSQKMGKQSGFLFYVPAWNTSKIDPVTGFVNLLDTRYETREKAKAFFCKFDTIRYNDAKGWFEFAVDYSKFTTKADGTRTHWIICTYGKRIETFRDEMKNSNWSSREIDLTEEFKAHFAKYGINIHGNLKDTIVCQDNTDFFKGMLYLLKLTLQMRNSTTGTEIDYIQSPIADEHGVFYNSTTCSDTLPQNADANGAYNIARKGLWVVNQIKASEDLEHLKLAISNKEWLQFAQNKPYLND

SEQ ID NO: 791 - protein, 1256 aa, unidentified
  REGION 1..1256: note = Cas Enzyme sequence
MKNQHLFSGFTNQYAISKTLRFELKPVGRTLEHIEKKGLITQDNQRAEDYKEVKILIDEYHKNFIEKSLDGFALNGLQEYYDLFIKTNLEEIDKKALDKEKDNLRKQIANRFKKHDKFKSLFAKELIKEDLIGFVSEENKELVNKFKNFTTYFTGFHENRKNMYVADDKATAIAYRLIHENLPKFIGNIIIFEKIKKDAPDLVSQLNNVLSEMEEIIQGKTLEEIFSLDYFNETLIQTGIDLYNIVLGGRSEDGKDKIKGLNEYINLYNQKQTEKKNRQPKLKQLYKQILSDRDSVSFIAEEFKEDTEVLEAIEKFYQGELCNYESDGQAINVFNVSKKNLIGNLSSFDLSKVYLRNDRAITYISQQMFSDRSIVGNALQEYYRAQNPQKGKEKTENFEKRIDKWVKKSDYFDIQTVQEALSQCSIEAVKEKNKQNAIVNYFADMGLNEEIKMNLFDKVIADYKNVKDLLNTSYPENKKLGNQKGKDSDIEKIKTFLDSVMNIIHFIKPLNLKDESKEKDETFYSLFLPLFDQLNKTILLYNQVRNYVTKKPYSTEKIKLNFENSTLLDGWDVNKEQDNTSVILRKDGLYYLAIMDKSNKKIFLNAPKADDKKDSFKKMNYKLLPLVNQQLPRVFFAKSRIEYFNPSSKIVQNYKNNTHKKGDTFNINDCHALIDFFKASLEKHEDWKHFNFKFSPTKTYQDLSGFYREVEQQGYKMTFENIPTDYINEMIEEGKLYLFQIYNKDFSPYSKGKPNMHTIYWKMLFDEQNLKDVVFKLNGQAEVFFREKSIKDNIIVHKSNNSIENKNPDNPKKQSKFNYDIIKDKRYTIDKFQFHVPITLNFKATGRDYINEDVNRFLKNNKEVNIIGIDRGERHLAYYMIINQKGEILEQTSFNIISSKHKENKYSTNYHALLEKKEMARDKARKSWDTIGTIKELKEGYISQVVHKIAQLMVKHNAIVVLEYLNPGFKDSRKKVEKQVYQKLEKMLIDKLNYLVFKDYEANTTGGVLKALQLANKFTSFDRLGKQSGFLFYVQAALTSKIDPATGFVNFLYPKYESIKKAKKFLDKFDKIIYNNSKNYFEFAFDYNNFTTKAEGTRTKWVVCTHGDTRYRYNPQTKTSEEVNITQEIKYLLIKHNIQYENGNCFKNKLIQAEDKKFYSKLLHLLAITVSLRHAKSGTDIDFILSPVADKNGVFFDSRKANDTMPKDADANGAYHIALKGLLALNKISNTPDDKLNKVDLKITNKEWLAFAQKKN

SEQ ID NO: 792 - protein, 1257 aa, unidentified
  REGION 1..1257: note = Cas Enzyme sequence
MPRTESIWDGFTNQYSLSKTLRFELKPIGKTQEYIKERGLITEDKEREKNFDVVKNMMDDYYRHFIEESLVNVAINTNHLKRYQEIYNSLKKDRTNQKLQKEFSQAQGYLRKQILKGINENPNFQHLFKQEFLTKILPTWLGDKDRTEDAKRVLEFNKWSTYFTGFFDNRKNVFSEKEIPTSVIYRIVNDNLPKFLDDISRFEELKKLNGFDYSEVESNLKQELEGKCLNDVFSLDNFNNCLNQSGIDLFNLIIGGKSDEGGTHFKGLNNIINEFSQQQDNKAIRRLKLIPLFKQILSDRESFSFISEKFDNDKELMEELLDFYEKIRSIQIIDKLKDITLKLPEYDLERVYLKNDANLTQISQEIFDNWAYITSALQEYAVSVLGLKESKAKAWVQKQSYFSIYELEEAIRQKSKDAAKNPICTYLSRFDKGERNLFEKMENNSKPLFDITVSDDRKLLTRSREADMETIKAFLDSILGILHFVKPLHLEPKKKSEEGLQDAFETDPDFYLEFNAAYDALNKISPLYDKVRNYITQKPFSTKKFKLNFQNSTLLAGWDKNKERDNWSVIFRKDGLYYLGIMSSEDNKIFSKTMPNLKDCSDYFEKMNYKLLPGPNKMLPKVIFSKKNIAFFNPSKEILSIRDHASYTKGGTPQTDFDKKEFDLDDCHQMIDFYKTCLEKHPEWCEYGFRFKATDDYADISEFYNDIANQGYRIFFEKIDSDYITKLVDDGKLYLFKIWNKDFSKFSKGKKNLHTIYWEELFSEKNLSDVVYKLNGEAELFYREASLEGCITHPKNEPIQNKDPIKGKKTSTFPYNLIKDKRYSKDKFLFHCPMTLNFKAGDKNWETNKKVNEHVAKNCDDICILGIDRGERNLASYVLIDSKGKIISQSSLNVTSDDFERTRDYQNKLDTLEGSRNEARKNWKKIANIKELKEGYLSQVVHQISNIAIDNNAIIALEDLNFGFKRGRFKIEKQVYEKFEKKLIDKLNYLVFKDRLEDEIGGALHAYQLTKKFESFKVLGKQSGILYYVPASYTSKIDPATGFVNLLYPRFENIEKAKAFFKKFDSIKFNSSKDYFEFSFRYSNFIEDMEKDAIIKDDWTVCSVGNRLVNKRLEKSRGYETIEKDLTEELKSLFSKNQIEFEEGNDLIEAISSQDNAEFFKNLIYLLKCTLQLRNSRTGTNEDYILSCVKDKNGRFFDSREANDNEPKDADANGAYNIALKGLMLVERLKNSDLESKKLDLRIDRNEFLNFVMKRAL

SEQ ID NO: 793 - protein, 1257 aa, unidentified
  REGION 1..1257: note = Cas Enzyme sequence
MINSSKSIWDGFVNKYSLSKTLRFELQPISRTLDFIKEKGLIEQDKEREKEFNLVKKIIDSYYIEFIENVLSKITIDSDLLKEYSAVYKNLKNDKYSSDLKKEFKLIQDKVRSEVYKQIYNFPNFKLLFGKELIKVILPKWLEYKNRLEDKELILKFDKWTTYFVGFFENRKNVFSKDPIPTSVIYRIVHDNLPKFLDNIEKFNKIKLLDNFDYFSIEKELSVELNNKNLDYYFNLSNFNLFLNQRGIELFNTIIGGKSTENIKIKGLNELINLYSQKEKDLIKSKNIRKLKMSPLFKQILSEKQSFSDKFDLIKDNSSLITQINTFYTDEFNTNLPKILELISKLDQYDLDQIYINKNSITNISSNIFKDWSIISSGLKEYFIKNYNLSNKKIESRLNQKYFSISEIQEGVKLLNLDRINYNDFSDHFISDYFKNLINEKIIDEITNHKLDFDKINYNNLNSFSDNEKQLIKILLDSILGFYNSIKPLYVNIKSSQEEKTQEAYELDSDFYNDFQIIIDSFKKIIPIYNKTRNYLTKKPYTTKKFKLNFDNSTLLDGWDINKEKDNYSLLFKKDNQYYLGICSKGNSTDISKYIQKKVFNSGDYFEKIDYKLLPGPYKMLPKVFFSKTNIEYFSPSEEIISIRNYASYSKNGTPQKDFDKEEFNITDCHKLINFYKFSLNKHHEWKNFNFNFKPTDQYKDINEFYQDVEDQGYNLSFKNIDSKYILDLVDSGKLFLFKIYNKDFSKFSKRTPNLHTIYWNELFSEENLSKLIYKLNGKAEIFFREKSNIKNNTIHGKNQLIQNKNPINNKTESIFEYDIIKDKRYTQDKFLFHCPITINFKSRGNGKDIHKQINNYIKDFEGNINILSIDRGERHLLYYTLLNSDGKIISQNSFNNISDGFNRSFDYQDKLDQREKERDQSRKSWTAIENIKYLKEGYLSRVIHEIAKIAIENNAIIVLEDLNFGFKRGRFKIEKQIYQKFEKMLIDKFNFLIFKKRSKESIGGALNGYQLTNKFESFSKLGKQSGILFYVPASYTSKIDPTTGFFDLIRPKYESVDKSIQLIKKFEYIKYNSDMDMFEFNYNYFNFNNELKLDRKNWCIYSNGSRLYNFRNKDKNNEWDTKEINLTKELKDLFESYSIDYNSTQNLIDRIILIDHKDFFEKLIYILKLMLQLRNSIPNSKEDYILSCVKNKDGLFYDTRKNMTSKSLPVNADSNGAYNIGIKGIMIIDKIKNNLEIKITKEEYVNFIINKNDYGK

SEQ ID NO: 794 - protein, 1257 aa, unidentified
  REGION 1..1257: note = Cas Enzyme sequence
MGKGCMEKVKKQRVTKAVKVKMDPVSATKRAIERDKLMEKDRSIRAMWNELHEPVDAYVKSILARNLAAFSFDFEELYGAWKSGDRTNYNKMRDKLKKSASAALTKIPGYKLADLNSAKLAGKMLPEFLSCTDFYPADKKGTYLNICEQLKGTSSFSTKFMRTRITVLETWGGERMVENFELYAGNIAPAEEFLHSPYADDFLADFPEFEMITEGEGYEDYLTPAAIDRYNRMLGGVFREDGTLLKKGYNQLISEINAKNASDKGYHGKRYRKMNPLYKQVLTPKEKAFSVVSVTDNTEAGQLTREILECVTPDLLKESVSFLKASDTAGIFVKGSGARTLSYLACKDHGVVPEILIAKFIRDQEQALLDLDALELTAKERRERRVTLKQKINRASTEVSDLDYSIEELEASSGMNLFDPYLSDLSEKASDYKKAHEVLSKSTFLVGGTSCRKNPTKQEVHALMSALTEFARAWSLLRDRSLDHRGDAAFYTEFTRIDETLQETGKAVKKVMDYAVAAPKDLAEEYICAFGSGSKISNGWYNTGCGKAFSQKHVTILTKEDGKGILHYYFAELNPVSGKTFWPEFLADDDPREAYRMFLQKTSQKAVNCATSATFIHSGAREFFEANPDAMAYEVTEHVTEPFTIYRTAYACWLDKTLYTGDSPEATRNRRVLIDTYKEALEKLTRFSGFAFDFKPTKDYANLGEFFAHTDTFMLKSEFARVSEEQIDALVESGKLLMFEINTSGMYSGKKRKGYTALLQRLLSDENLRNGIMRVNSRPSVTFRPACTPRVVTHPKGSMLVDKLYKNGKKIPSSTYREIYEHANGRRKNLSSYAQEALDSGQVSIHEATFDFIKDKRYTEDCFFLSISYIKNVKVSAMEPNSITEDVQEEMKNGYSTVSVSRGVNDLLRMNVYDRNHVLVESRSLNVIGGVDYADKLDTLSKDRSLAKSEDWEYTKRIADIKTAYVSQAISEVIKTAVSHDAVIAIEELSENFKDKMSALDNQIFRKFDTMLESRLCDYFTSDIADGEPGSVENPLQLANNDSHRMGRPQNGILFRVSPAYTLMDPETGFVNLFDLSRLKNAEMRANFLARFDSIRWNPDINLFVARFNYKNFDIKIPEDRGAKDLAHTEWTIYIGKPRTDYDRTARANVYNEKPWLKVVGMLENEGLLERDLAKEDIGKILTNQLYDLFEQALKGQVVRACEGNPVEYFTSPAVIKDSGMGPTEVKAYNLARKLWYTVTREDTKGNYTVDWLNSVA

SEQ ID NO: 795 - protein, 1257 aa, unidentified
  REGION 1..1257: note = Cas Enzyme sequence
MNDLKTFIGIYPVSKTLRFELRPIGKTQEWIVKNKVLESDEQKSADYPKVKALIDEYHKVCIHESLKDVSFDWAPLKKALEKYQKEKSDESKAVLDREQTNMRKKVAAAIKSFQHYEQLTAPTPQKLIDDVFPGRYESEALKSFKRFAIYFRGFQENRNNIYSADAISTGVPYRLVHENFPKFITNNEVYNNIKANCPEVIEQVETELQPFLKEIRIESIFNLDYYNSLLTQDGIDFYNQVLGGVAEEGKQKYRGINEFSNLYRQQHPEMAGKKKALTMIPLFKQILSDRETLSYIPQQIESERQLVSMLKQFHTHILNYEYNGNSVNVLRALSRMISKVGEYNPDGIYIAAKSLTDISQVLYGKWSVLSDKLYDSAVKKYGEPSTAKNKKKIDAYVSKEAYSLSEVGLIGDVGLSSYFSSVSQSIEQVDEKWARFIRWCDNDEEQLFLNNPEGTELVRALLDSYMDILHRCGVLVVSVENDLDKDFYNDFFPIYAELENVIIIYNRVRNYLTMKPYDTKQFKLNFGVPTLGDGWDQNKEKDNKTILLFKGGLSYLGIMNPYNTPKIKECKVDSEDTYSKMVYKLLPGPNKMLPKVFFSKKGLQSFSPSEHIQEIYRNGSFKKGSPDFNHERLHELIDFYKDSISKHPDWSKFDFKFSPTESYEDISAFYDEISKQGYKIQFINISEQQVNEWVANGQLYLFQLYNKDYAEGAHGRKNLHTLYWENLFTPENLNNLVLKLNGQAELFYRPSSIKTPVKHVVGSKMLNRRDKSGMPIPETVYKSLYQYFNGKKLKSELTADEIAYIDQIVVKDVTHEIIKDRRYTKPEYFFHVPITFNANAEGNEYINEKVLDYIKDNPDVNIIGIDRGERHLIYLTLINQHGEILKQKTFNLVGNYNYHAKLEQREKERDAARKSWQSIGKIKDLKEGFLSAVIHEIAVMMIENNAIVVLEDLNSGFKRGRFKVERQVYQKFEKMLIDKLNYLSFKDCKADEVGGILRGYQLAQKLTSFQKLGKQSGFLFYIPAAYTSKIDPVTGFVNHFNFNDVTNAEKRKSFFMNMNRIEMKNGDIEFEFDYRKFKTYQSDYRNVWTVNTSGKRIVFDAEKRQSKDYYPTKEIVAAFKDKDIILKDGMNVKSLIANIEANARNASFFGSLFYAFQKTLQMRNSNATTEEDYILSPVVHNGKQFCTIDEVNKGKNAEGNWISKLPVDADANGAYHIALKGLYLLMNPQTKKIENEKWFKFMVEKPYIELKNIDNFV

SEQ ID NO: 796 - protein, 1257 aa, unidentified
  REGION 1..1257: note = Cas Enzyme sequence
LKASDMKNLKQFTNLYPVSKTLRFELQPIGKTKENIEKNGILTRDEKRAKDYQVVKGFIDEYHKQFIKDRLWDFKLPLISEGNLDSLEEYQMLYEMARRDDAQEAEFSEIKDNLRAIIAKRLTENGSAYDRIFKKELIREDLVDFLDNEEDKALVRQFADFTTYFSGFHENRRNMYSAEEKSTAIAYRLIHQNLPKFMDNMKAFTKIAETSVAEHFINIYKGWEEYLNVGSIEEIFRLDYFSETLTQPHIEVYNYIIGKKVLEDGTEIKGINEYVNLYNQQQKDKSKRLPFLVPLYKQILSDREKLSWMAEEFDSDEKMLAAINESYTHLHELLMGNENESLRSLLLHLREYDLSQINITNDLSLTDISQHLFGRYDVYTNAIKEQLKIITPRKKKETDEDFEDRISKIFKTQKSFSISFLNNLPHPETEDGKPRSVEEYFISTGAINTETTQKENLFAQIENAYENVRVILKMKDTDDALSQNKPAVTKIKALLDAFKDLQHFIKPLLGSGEELEKDELFYGSFQMIWDELDNVTPLYNKVRNWLTRKPYSTEKIKLNFDNSQLLGGWDVNKEPDCTGILLRKDGFYYLGIMDKKSNRVFEADVTPSDGDCYEKIDYKLLPGANKMLPKVFFSKSRIDEFAPSKSIVSSYKRGTHKKGKDFNLSDCHRLIDFFKRSINKHEDWCKFGFHFSDTHTYDDISGFYREVEDQGYMLSSHSVSSSYINQLVDEGKLYLFRIWNKDFSEYSKGTPNLHTLYWKMLFDERNLSNVVYKLNGQAEVFYRKASIQPENRIIHKAKQSIANKNELNKKRTSTFEYDIIKDRRYTVDKFQFHVPITINFKGTGQFNINPIVQETIRQGDFTHIIGIDRGERHLLYLSLIDLNGNIVKQMTLNDIINEYKGQTYKTNYHDLLVKREGDRTNARRSWDTIETIKELKEGYLSQVVHVISKMMVEYKAIVVLEDLNSGFMRGRQKIERQVYEKFEKMLIEKLNCYIDKQADATEVTGLLHPLQLTCEAKKWKRSHQCGCIFYIPAWNTSKIDPVTGFVNLLDTRYDTREKARLFFSKFQRISFNTEKGWFEFTFDYNDFTTKADGTRTQWTLCTYGERIRTFRNSQKNNQWDNERIILTDEFKKLFDEKEIDISGNIKEAICNQADAQFYRDLLGLMKLLLQMRNSITNSEEDYLLSPVADENGHFFDSRESISNLPIDADANGAYNIARKGLWIVRKIRDNPEDEKLSLTITNKEWLLFAQNKSYLND

SEQ ID NO: 797 - protein, 1258 aa, unidentified
  REGION 1..1258: note = Cas Enzyme sequence
MGTINFSDFTNLSSVTKTLCNRLIPTEITAKYIKEHGIIEADQERSMMSQELKNILNDFYRSFLSENLVKIHELDFKPLFIEMKKYLETKDNKEALEKAQDDMRKAIHDIFESDDRYKNMFKAEITASILPEFILHNGAYSAEEKEEKMQVVKMFNGFMTSFSAFFANRENCFSKKKISSSACYRIVDDNAKIHFDNIRIYKNIANKFDYEPEMIDKIEEAAGGADIRNIFSYNFDHFAFNHFVSQDDISFYNYVVSGINKFMNLYCQATKEKLSPYKLRHLHKQILCIEESLYDVPAKFNSDEDVYAAVNDFLNNVRTKSVIERLQMLGENADSYDLDKIYISKKHFANISQMLYRDFSVINAALTMSYIDTLPGKGKTKEKKAASMAKNTELISLGEIDRLVDKYNLYPDKAVSTRSLIRSISDIVAGYKTNSLTMNSGIPLAENETEIAVLKEAIEPFMDIFRWCAKFKTDEPVDKDADFYTELEDISDEIHSIVSLYNRTRNYVTKKPYNTDKFGLYFGTSSFASGWSESKEFTNNAILLAKDDKFYLGVFNTKNKPAKSIIKGHDTMQDGDYKKMVYSLLTGPNKMLPHMFISSSKATPVYGLTDELLSDYKKGKHLKASKNFDIDYCHKLIDYFKHCLALYTDWDCFNFKFSDTESYNDIGEFYKEVAEQGYYMNWTYIGSDDIDSLQENGQLYLFQIYNKDFSEKSFGKPSKHTAILRSLFSDENVADPVIKLCGGTEAFFRPKSIKTPVVHKKGSVLVSKTYNAQEMDKNGNIITVRKCVPDDVYMELYGYYNNSGTPLSAEALKYKDIVDHRTAPYDIIKDRRYTEDEFFINMPVSLNYKAENRRVNVNEMALKYIAQTKDTYIIGIDRGERNLLYVSVIDTDGNIVEQKSLNIINNVDYQAKLKQVEIMRKLARQNWKQGVKIADLKKGYLSQAVHEVAELVIKYNGIVVMEDLNSRFKEKRSKIERGVYQQFETSLIKTLNYLTFKDRKPLEAGGIANGYQLTYIPESLKNVGSQCGCILYVPAAYTSRIDPTTGFVSLFKFRDISSEKVKTDFIGRFDCIRYDAEKDLFAFEFDYDNFETYETCAKTKWCAYTYGTRVKKTFLNRKFVSEVIIDITEEIKKTLAATDINWTDGHDIKQEIIDYALSSHIFEMFKLTVQMRNSLCESKNREYDKFVSPILNASGKFFDTDAADKSLPVEADANDAYGIAMKGLYNVLQVKNNWAKGEKFKFNRLSNEDWFNFMQKRQ

SEQ ID NO: 798 - protein, 1258 aa, unidentified
  REGION 1..1258: note = Cas Enzyme sequence
MELNDFIGQYSLTKTLRFELKPINETNEWVEKKGIISMDNQRAEDYNKIKKIIDQFHKHHIDVSLMNFIDNLKNGEHKDDFLNDLHICCSNMGQNDPVLKKKFDAAQAALRKAIRKALYDKKLFEKDLIQKYIKEYLSELREKGGTLPDGMTIDEGETIRDKFHGFTTYFSGFNENRNNIYTDEAKVTGVAFRLIHDNLPKYVNNMHVFEKSKEAIEINMATLQKEFAFLLRGYKIEDFFTKEDTFIDCMRQEDIDRYNTILGGFSQGDKKFKGINEYINLYNQQHKTRLPRMTQLYKMILSDREAVSWLPKSFERDSELLEAIEKYYQIFKLYVMDGDKDNCSLRYLIANISLYDPRGIYVKNDTSLTDLSKNIYGDWNTISEAMGYQYDKVYWKKNKKKIDTYMSNRKKWIDSFDSISINDIDEYVKEFYTAKGITDEKSVIDYFSNLGKDENGTTLFEIVELVYSEVKDVLNTTPQGNLRDEKHSDEVNKIKKLLDSLKKLQWFALYLKGSGEESDRDNAFYADYNRLMEVVQEVNPLYNSVRNYLTQRPYSEEKIKLNFESSQLMNGWDLNKERDCLGVILRKDGLYYLAIMNKQDNTVLSADSIKSDGDCYEKMILKSISMSTGVGGFVRKCFGTAQKCGWVCPANCLNHEGKIIVADSEVTNILTQLIDCYKDFFNKYEKDGFKYKDFGFKWAESSEYRSLKEFFNDIRRQSYMMKFQRVSVSYINQLVKEGKIYLFKIYNKDFSPYSKGTPNMHTMYWRALFSEDNLHNLVYTLNGNAELFYRKKSLEYDAKTMKYGHHHAELKDKFNYPIIKDRRYTEDKYFLHVPITLNFKAVEDNKISIKVRELIKENGIEHIIGIDRGERNLLYLSMIDLKGNIVKQLSLNEILNTYSGEMVDYHAKLDKRENEHDEARKNWQTIEGIKNLKEGYMSQVVHIVSKMMVEYKAIVVLEDLNGGFMRSRQKVEKQVYQKFETMLIEKLNYLVDKKKPVSEAGGLMNAYQLADEYKGFQKVGKQSGFLFYVRAWNTSKIDPATGFVSLIHAKYENIENAKKLISIFDEIRYNKEKDFFEFVISDYSKFNAKAIGTRLNWTLCSFGDRIVTYRDKNNGGNWEHKKVKLSQEFKNLFDQTNIDYTKSLKESILSQNEAPFFRKMLDLLGLMLQMRNSNPNTGEDFILSPVANDKGEFYDSRNYKEEDNLPIDADANGAYNIARKGLWTMQQIKKSDNLEKVDLALKDVDWLCFAQQKPYLVD

SEQ ID NO: 799 - protein, 1258 aa, unidentified
  REGION 1..1258: note = Cas Enzyme sequence
MKTNKINSFTNRYTLLKTLQFQLLPNKKTEEYFNEKILSDDKQRSEEYKVLKTIIDKYLKTTNDIILSKSIGDEFNNILMEFKDYYFKKTKSPTDYDRIKKIKSSLREMIMQHFIDNIDEKDDKNFLIPKRKAKKLEISNSKLTNVILPGLEYENHEHKEVVDRFYKWATYIKDFTKNRNNMYTTEDKSTAIPHRIINDNLPRFLDNCRIFAKIKESLPKEMLDNYNETCKLLGIYDIENYFDINFFQFTLSQKGIDAYNRIIGAYKNSDQSQEEGLNQIINRYNQENKDDRLPLLKRLYKQILGDSETISYVPERFNDDEDNDVLHEIENRYQSLVSIWDDTLKIFNHLNDYDIKGIYIRNDSISNISKTVTGDWSAISEQWNSEYDDKNHKKKKDEKYYKDRNKAYKNTRLTIYDLQRLIDKYSASNEKEDVCIRVIDYYCNTVGSMIKDIISNYKNAESLLTSEYNHSKKLAKNDEAIEKIKMLLDSIKKLEWLIKELMGDDSQGIKDEVFYGDIQPIYDALRAFDRLYDKVRNYITKKPYSKDKIKLTFQNPQFLIGWDVNKEKDYQSFLLKRDDKYFVAILNHDNCNKIHKEILQYKYDDDPKYYEKIIYKQIPDAAKYISIKQVKPQNPPDDILNIFIQKKKKIKLSREEEMKIIDYSINDFLKNYHKIIDSHGNSYFDFKFKFPSEYKSFNDFCDDVNNQSYTIRYSKISEKFIMNLVNDGKIYLFQIYNKDFSEFSKGTPNLHTLYFKMLFDERNLKDVVYKLSGGAEMFYRYPSLKPEETTIHHAGETVENKNPLKPGKKTLKHDIIKDRRFTERQFSLHIPIMMNFKAEGINNLNNDVRYALKNSNDNYVIGIDRGERHLLYVTVINSKGEIVKQYSLNIIKNMYKDDPYETDYHKLLGEKEKKRDEARKNWKTIEGIKELKEGYISQAVHKICQLVVKYDAIIAMEDLNPGFKRNRTKVEKQVYQKFEKMLIDKLNYLVIDKNMDPEENGGLLKAYQLTNKFESFIKMGKQNGFIFYVPAYLTSKIDPVTGFVDLLKPKYESEIKTKNMISNFDFVRYNAADDLFEFGIDYSRVERGSQSYFSKWTVCTNGERILSFRNKDNNSEWDNKTVILTKSFKDLFDKHGICYPDGEDIKDQLQQMNGKDFFSEFTELLRLTLQMRNSKTGTDIDYLISPVRDKNGKFYNSDDFSGMEKAPLPENADANGAYNIARKALWCIEQIKATEDDKLDKVKLAMTNKEWLEYAQKG

SEQ ID NO: 800 - protein, 1258 aa, unidentified
  REGION 1..1258: note = Cas Enzyme sequence
LRILGLELKPVGKTQQLIESKKLIEQDDQRAEDYKIVKDIIDRYHKDFIDKCLNSVEIKKEDLEEYVSLAENSNRNTKDFDEVKTKMRNQITEAFKKNHLFTGLFKKNLIKDYLPDFVSEEEKNVVNKFSKFTTYFDAFNNNRKNLYSGDAKSGTIAYRLIHENLPMFLDNIASFNKISETRVNEYFSSIEAEFTDTLNGKHLADLFQIDYFNNTLTQKKIDNYNYIVGAVNKAVNLYKQQHKNIRIPLLKKIHKMILSDRVTPSWLPERFESDEEMLTAIKATYESLKEVLVGDDDDSLRNLLLNIDNFDLEHIYIAKDSGLTSISQQIFGYYDTYTLAIKDQLQRKNPATKKQRENPNLYDERIDKLYKKEGSFSIAYLNRLVDTKEHITINEYYRLLGSYCREGGKSNDDFFKQIDGAYSAISYLFSAEHGEIAQSDSDTAVVQKLLEAYKGLQRFIKPLLGHGDEADKDNEFDVKLRKVWDELNIITPLYDKVRNWLSRKIYNPEKIKLYFENNGKLLSGWSDSQTEYDNGTQYGGYIFRKKNEIGEYDFYLGISADAKLFRRDETICYEDGMYERLDYYNLKPNTLLGNSYIGNYGEDSNAVLSAFNDAVTKLHLEKKLVPKDNEKVPTYLKRLKQDYANFYQILMNDNNVVDAYKSMKQHILATLASLIRVPAAIELTTQTNLDIDKLIDEIINLPSESFGYFPVATAAIEEANNREKKPLFLFKMSNKDLSYAEKFSKGDRKSRGTENLHTMYLKALLGMTQNVFSIGSGMVFFRHNTEGLAETTARHKANEFIANKNKLNDKKKSIFDYEIVKNKRFTVDKYLFHLSLKLNYTQPNKFDINSKVREIIRNGGIKHIIGIDRGERNLIYLSLIDMEGNIVMQKSLNILKDDHNAKGTDYKGLLTEREGENKEARRNWKKIANIKDLKRGYLSQVVHIISKMMVEYNAIVVLEDLNPGFIRGRQKIERNVYEQFERMLIDKLNFYVDKHKDANETGGLLHALQLTSEFKNFKKSEHQNGCLFYIPAWNTSKIDPATGFVNLFDTRYTNAEKALEFFRKFDAIRYNEEKDWFEFEFDYDEFTQKAHGTRTRWTLCTHGKRLRSFRNPAKQYNWDSEVVALTDEFKRILGEAGIDIHENLKDAIRNLEGKRRKYLEPLMQFMKLLLQLRNSRKNPEEDYILSPVADENGVFYDSRSCGDTLPKNADANGAYNIARKGLMLIRQIKEAKELGKVKYDISNKAWLNFAQQKPYKNE

SEQ ID NO: 801 - protein, 1258 aa, unidentified
  REGION 1..1258: note = Cas Enzyme sequence
VANYFYHKENIKNIILIKTMKNFDDFRRLYSRSITLRFELIPQGKTLQHFEQSGILSQDDHRADSYKAVKKLIDEYHKIFISRALSGFSLKLDSTEAEDSLAEYFELYNTANKSESENKQFIKVQDNLRTQIVKRLTKDEAYGRLDKKELIREDLLNNQLMRQLTPEEKSLVKEFDTFTTYFTGFFENRKNMYSADAKSTAIAYRLIHDNLPKFIDNIKNFDKLLQTDLATKLVGLSQSFEEQLNGADIRDLFTLANYSSVLTQEQIDNYNTVIGGKTYQEGNPIQGLNVLVNLYNQQHPEQRLPLFKLLFKQILSDRTSASWLPEEFKTDNAVLKAINDYYSESTNVLSNGSELKNLLQTLSSYDLSKIYIANDKSLTEISQRVFGDWSTINRAIFENLKLSVKPKRKEGESDFEARLHKLMKNTDQYSIQYINDCIASANIENKSNIEDYFAKLGEVNTADEQQANLFTRIELAYADAKSLLSNDYPANANLAQDMDATDKIKLLLDVIKDLQAFIKPLLGKGKQGDKDELFYSSLTQLWEQLDDITPLYNKVRNYMTRKPYSQEKIKLNFENSTLMDGWDLNKESDNTTVILRKDGLYYLGIMNKTANRSFDVRMLSSDGDCYEKMEYKLLPGPNKMLPKVFFSKSRIAEFAPSEKVLEIYEYGSFKKGDNFSIDNCHALIEFYKKSIQKHEDWSKFGFHFSDTESFDDISGFYKEVEQQGYKLTFRNVSAKYIDTLVDEGKLYLFQIYNKDFSPRSKGTPNLHTLYWKMLFDERNLSNVVYKLDGHAEVFYRRKSIISNNTVHRANVEINRKNPRNKGARSKFPYDIEKDKRYTVDKFQFHVPITMNFINEGVRNINPLVCEYLKNTDDVYVIGIDRGERNLLYYSLIDKNGNIIEQDSLNVIGDFDYLNKLNEREIERDNARKSWKSIEGIKELKEGYLSQVIHKIASLMVKYHAVVVLEDLNFGFKRSRQKFEKQVYQNFEKALIDKLNYLVDKRADADAMGGLLKAYQLANKFESFQKLGKQCGFLFYVNANYTSKIDPTTGFVNKLNTSYETVDKARSLFNKFKSIRFNPHADLFEFTFDYNDFSKDFEGTKTLWTVCSNGERIEQFRNPDKANKWDTRTVVLTDAFEEFFARNGIDISGNIKAQITERADKQFFVQLLHLLKLTLQMRNSSENEDRIVSPVRNSNGEFFDSNNPGAMPKDADANGAYNIALKGLLTVQRIKQSTKPKPNLAITTIEWLKFIQDKPYSEF

SEQ ID NO: 802 - protein, 1258 aa, unidentified
  REGION 1..1258: note = Cas Enzyme sequence
MELNDFIGQYSLTKTLRFELKPINETNEWVEKKGIISMDNQRAEDYNKIKKIIDQFHKHHIDVSLMNFIDNLKNGEQKDDFLNDLHICCSNMGQNDPVLKKKFDAAQAALRKAIRKALYDKKLFEKDLIQKYIKEYLSELREKGGTLPDGMTIDEGEAIRDKFHGFTTYFSGFNENRNNIYTDEAKVTGVAFRLIHDNLPKYVNNMHVFEKSKEAIEINMATLQKEFAFLLRGYKIEDFFTKEDTFIDCMRQEDIDRYNTILGGFSQGDKKFKGINEYINLYNQQHKTRLPRMTQLYKMILSDREAVSWLPKSFERDSELLEAIEKYYQIFKLYVMDGDKDNCSLRYLIANISLYDPSGIYVKNDTSLTDLSKNIYGDWNTISEAMGYQYDKVYWKKNKKKIDTYMSNRKKWIDSFDSISINDIDEYVKEFYTAKGITDEKSVIDYFSNLGKDENGTTLFEIVELAYSEVKDVLNTTPQGNLRDEKHSDEVNKIKKLLDSLKKVQWFALYLKGSGEESGRDNAFYADYNRLMEVVQEVNPLYNSVRNYLTQRPYSEEKIKLNFESSQLMNGWDLNKERDCLGVILRKDGLYYLAIMNKQDNTVLSADSIKSDGDCYEKMILKSISMSTGVGGFVRKCFGTAQKCGWVCPANCLNHEGKIIVADSEVTNNLTQLIDCYKDFFNKYEKDGFKYKDFGFKWAESSEYRSLKEFFNDIRRQSYMMKFQRVSVSYINQLVKEGKIYLFKIYNKDFSPYSKGTPNMHTMYWRALFSEDNLHNLVYTLNGNAELFYRKKSLEYDAKTMKYGHHHAELKDKFNYPIIKDRRYTEDKYFLHVPITLNFKAVEDNKISIKVRELIKENGIEHIIGIDRGERNLLYLSMIDLKGNIVKQLSLNEILNTYSGEMVDYHAKLDKRENEHDEARKNWQTIEGIKNLKEGYMSQVVHIVCKMMVEYKAIVVLEDLNGGFMRSRQKVEKQVYQKFETMLIEKLNYLVDKKKPVSEAGGLMNAYQLADEYKGFQKVGKQSGFLFYVRAWNTSKIDPATGFVSLIHAKYENIENAKKLISIFDEIRYNKEKDFFEFVISDYSKFNAKAIGTRLDWTLCSFGDRIVTYRDKNNGGNWEHKKVKLSQEFKNLFDQTNIDYTKSLKESILSQNEAPFFRKMLDLLGLMLQMRNSNPNTGEDFILSPVANDKGEFYDSRKYKEEDNLPIDADANGAYNIARKGLWTMQQIKKSDNLEKVDLALKDMDWLCFAQQKPYLVD

SEQ ID NO: 803 - protein, 1259 aa, unidentified
  REGION 1..1259: note = Cas Enzyme sequence
MDFTKFQKLNSIIKTCSFEMIPIGKTRETMEKHNVIEEDAERKSNAELTKEVSDSFIREFIADYKEDMDWKDLYDAYGEDRARFTDIMNQKAEKLAKRFSDSFNEYINTFLKANGIKDKKSKWSDSGYVDVVLPLYVSIHPDFSSDKYERAVASLLHCSNSLFKKYTTSYARIIARTKKGSFADRSMENFQTVCANSVMFDLISRNLSSVECHDTFKEVFADAPLNMNEYLSQKGISRYNEFVGDSFDESGQVIRYGVNHYINEWNQTHPDERMPKMHKLKKQILSIVEPSFRIRTINDETELFGTFDNIRTAEQRYAGMLESILENMNTADIYDKSGILVTSAERDSLANAITGEWSYFRRQIKEEEENRIREEYLQKKNRVKTKLTQKDNKQIEDALNKSIYSVADLNKMLGSDFGTIEEKLLDEYIRNKSKKESAYAQLVKTDFYDKKTIPAGDDVQRIQQYLDKVLSLTHIVRGLCADSQDPRTDFVFSDDVSSLEDDRVQIISCYNLIRNFVTKKREKTAKEKQIQLCFGRPAHFEQVWNNKQEGKFGNVDAALLEYAGKYYYMVPAAKNEAKLNFPVTDEPQRGECYNYLATKKAIGFAKAFAKFYIKSPEAMEGFEKTEEPFEISVGNDTMIISRKVYEDYEAKTFRESEEAKNKLIDCAKEFLSKNLSYCIYDWSVLKEANDYVNYGEFCNEVDSIAFRVINRYVSKKLVDDAVERGNLYMFEISSLDMYKDSSRMKNIMALRFNQIMNGMFTGDKSIIINNAPQIRYRPVVIEKKDVHPVGSRLVNKNTTDGRTIPGDVYLELCAYYNGKKDSLSPEASLYNEKVSVKDSDRAHIKDKHYTEEKFLITFSYTANKNVASATSGYQLNEMVRKEIRENGCNFMAVIRGIDNLLYYAVVDENGNRIEAGDLNVVGDTDFYEKLTILGKQRYTDQKNWKHENKVADLKDTYLGQVCRKIASIAVKNNAVIVIDKINESTKRKNAAFDNNMYRKFENALVNSLTDYYDIGIRGDEPGSVKNPLQLTVKEDNGFQNGIIFYQFDTFTKNICMRTGFVNLLNTFEIKTVASKVAFLKKLSGIYYDNDINEFVFEFTWRNIGCILKDEELPLYDGMDKIWKVRTHFTRYMRNAEKNKYVEIDGTEVLKELIRKNHPDMIGGKIDVDRLTSEEVKKVFEIFTLYTNGYIPRMDDAESGYMSPACDWNNFGTIRYDEMTALQLAKKSSLMIGKVKSGKDWKDMNVSRVEWLNHVLKADW

SEQ ID NO: 804 - protein, 1259 aa, unidentified
  REGION 1..1259: note = Cas Enzyme sequence
MDFTKFQKLNSIIKTCSFEMIPIGKTRETMEKHNVIEEDAERKSNAELTKEVSDSFIREFIADYKEDMDWKDLYDAYGEDRARFTDIMNQKAEKLAKRFSDSFNEYINTFLKANGIKDKKSKWSDSGYVDVVLPLYVSIHPDFSNDKYERAVASLLHCSNSLFKKYTTSYARIIAGTKKGSFADRSMENFQTACANSVMFDLISINLSNVGSHDAFKEVFADAPLNMNEYLSQKGISRYNEFVGDSFDESGQVIRYGVNHYINEWNQTHPDERMPKMHKLKKQILSIVEPSFRIRTINDETELFGTFDNIRTAEQRYAGMLESILENMNTADIYDKSGILVTSAERDSLANAITGEWSYFRRQIKEEEENRIREEYLQKKNRVKTKLTQKDNKQIEDALNKSIYSVADLNKMLGSDFGTIEEKLLDEYIRNKSKKESAYAQLVKTDFYDKKTIPAGDDVQRIQQYLDKVLGLTHIVRGLCADSQDPRTDFVFSDDVSSLEDDRVQIISCYNLIRNFVTKKREKTAKEKQIQLCFGRPAHFEQVWNNKQEGKFGNVDAALLEYAGKYYYMVPAAKNEAKLNFPVTDEPQRGECYNYLATKKAIGFAKAFAKFYIKSPEAMEGFEKTEEPFEISVGNDTMIISRKVYEDYEAKTFRESEEAKNKLIDCAKEFLSKNLSYCIYDWSGLKETKDYVNYGEFCNEVDSIAFRVINRYVSKKLVDDAVERGNLYMFEISSLDMYKDSSRMKNIMALRFNQIMNGMFTGDKSIIINNAPQIRYRPVVIEKKDVHPVGSRLVNKNTTDGRTIPGDVYLELCAYYNGKKDSLSPEASLYNEKVSVKDSDRAHIKDKHYTEEKFLITFSYTANKNVASATSGYQLNEMVRKEIRENGCNIMAVIRGIDNLLYYAVVDENGNRIEAGDLNVVGDTDFYEKLTILGKQRYTDQKNWKHENKVADLKDTYLGQVCRKIASIAVKNNAVIVIDKINERTKRKNAAFDNNMYRKFENALVNSLTDYYDIGIRGDEPGSVKNPLQLTVKEDNGFQNGIIFYQFDTFTKNICMRTGFVNLLNTFEIKTVASKVAFLKKLSGIYYDNDINEFVFEFTWRNIGCILKDEELSLYDGMDKIWKVRTHFTRYMRNAEKNKYVEIDGTEVLKELIRKNHPDMIGGKIDVDRLTSEEVKKVFEIFTLYTNGYIPRMDDAESGYMSPACDWNNFGTIRYDEMTALQLAKKSSLMIGKVKSGKDWKDMNVSRVEWLNHVLKADW

SEQ ID NO: 805 - protein, 1259 aa, unidentified
  REGION 1..1259: note = Cas Enzyme sequence
MDFTKFQKLNSIIKTCSFEMIPIGKTRETMEKHNVIEEDAERKSNAELTKEVSDSFIREFIADYKEDMDWKDLYDAYGEDRARFTDIMNQKAEKLAKRFSDSFNEYINTFLKANGINDKKSKWSDSGYVDVVLPLYVSIHPDFSNDKYERAVASLLHCSNSLFKKYTTSYARIIAGTKKGSFADRSMENFQTACANSVMFDLISINLSNVGSHDAFKEVFADAPLNMNEYLSQKGISRYNEFVGDSFDESGQVIRYGVNHYINEWNQTHPDERMPKMHKLKKQILSIVEPSFRIRTINDETELFGTFDNIRTAEQRYAGMLESILENMNTADIYDKSGILVTSAERDSLANAITGEWSYFRRQIKEEEENRIREEYLQKKNRVKTKLTQKDNKQIEDALNKSIYSVADLNKMLGSDFGTIEEKLLDEYIRNKSKKESAYAQLVKTDFYDKKTIPAGDDVQRIQQYLDKVLGLTHIVRGLCADSQDPRTDFVFSDDVSSLEDDRVQIISCYNLIRNFVTKKREKTAKEKQIQLCFGRPAHFEQVWNNKQEGKFGNVDAALLEYAGKYYYMVPAAKNEAKLNFPVTDEPQRGECYNYLATKKAIGFAKAFAKFYIKSPEAMEGFEKTEEPFEISVGNDTMIISRKVYEDYEAKTFRESEEAKNKLIDCAKEFLSKNLSYCIYDWSGLKETKDYVNYGEFCNEVDSIAFRVINRYVSKKLVDDAVERGNLYMFEISSLDMYKDSSRMKNIMALRFNQIMNGMFTGDKSIIINNAPQIRYRPVVIEKKDVHPVGSRLVNKNTTDGRTIPGDVYLELCAYYNGKKDSLSPEASLYNEKVSVKDSDRAHIKDKHYTEEKFLITFSYTANKNVASATSGYQLNEMVRKEIRENGCNIMAVIRGIDNLLYYAVVDENGNRIEAGDLNVVGDTDFYEKLTILGKQRYTDQKNWKHENKVADLKDTYLGQVCRKIASIAVKNNAVIVIDKINERTKRKNAAFDNNMYRKFENALVNSLTDYYDIGIRGDEPGSVKNPLQLTVKEDNGFQNGIIFYQFDTFTKNICMRTGFVNLLNTFEIKTVASKVAFLKKLSGIYYDNDINEFVFEFTWRNIGCILKDEELSLYDGMDKIWKVRTHFTRYMRNAEKNKYVEIDGTEVLKELIRKNHPDMIGGKIDVDRLTSEEVKKVFEIFTLYTNGYIPRMDDAESGYMSPACDWNNFGTIRYDEMTALQLAKKSSLMIGKVKSGKDWKDMNVSRVEWLNHVLKADW

SEQ ID NO: 806 - protein, 1259 aa, unidentified
  REGION 1..1259: note = Cas Enzyme sequence
MQHFTNIFKLSKTLRFELKLVGKTAENFANFTQTTTFQNDKKRFDAYPNAKSLIDEYHKNFIEDVLCDAEFEWQALADAVENFQKNKNEKSKTALEDEQKKMRKAVAEKFTKNNENYKKLFGKELFSELLPNLIKTFDNHEKKQNAEETVKIFDKFTTYFTGFHENRKNIYKEDGTTAIAHRVVNENFPKFLANIKLFEKLPDKLKNEAKNELKEFLNGAKLEDFFTLDSFNFFLTQGGIERYNAVLGGISEKAGSKKTKGLNETLNLAFQQGKIEKKFKFQPLFKQILSEREATSFAPTGFENQDELKDVVSKFKNENLDVALEQIRLNLQNIEIYDFYDFSKIFVPAKEQANFSKEIFGRWDAVRDAFLKKIETEKKKPLTETQADTEQRKIKKRDYSLSEIDGVLQKEETARSGDWFERISNFTKTKFDELFSRINFGENFQENKTAALPLKEFLDDVQKLYRLLKLLDYRGECETDGEFYAVLSEILQTLEPVVPLYNNARNFVTKKPGEVKKIKLNFENPTLACGWDANKEKDNHAVIFRKDGNYFLGIFNPKNKPKFDKTENAQGECYEKMVYKLLPGPNKMLPKVFFSNKWRDKFTVPEEIQQGYRDEKHKKGSSFDKKFLHSLIDWFKSQIAIHEDWKNFNFKFSDTRSYESIDEFYKEVETGGYKLTFSSVSVKQIDEFVNSGKLYLFQIYNKDFATNATGRKNLHTLYWEQLFSEENLQDTVLKLNGEAELFFRPKNENLRRISHAKNSFLVNRTTKNAKPIPENLYQEIYKFKNGFQSEISNEAKALLDSGEVICKKATHEIVKERRFHEDKFLFHCPITLNFRANESEKLNEKVCDYIKEKDGICIIGLDRGERHLLYLSLIDQNGKIKLQKTLNLVSQKRGDGEIKVDYHAKLAHIEGERDEARKNWQNIANIKELKEGYLSNVIHEIAHLMVKHNAIVVLEDLNFGFKRGRFKVEKQVYQKFEKMLIEKLNFLVFKEKVASECGGVLKAFQLTSKFESFAKLGKQCGFLFYTQAAYTSKIDPVTGFVNLFDTRYKSVEASREFFAKFDEIKFNAQNGYFEFVVSDYSKFNPKALKQSWKICTFGSRIENFKENEKWQSREVNLSDKFRELFDKFKTSDLKAEILAQTDATFFRQLLRLFGLTVQLRNSFVGSDVDYICSPVADKNGEFFDSRKELAKIENGEVAALPCDADANGAYNIARKGALILKKIKQAEAKDANLTISNAEWFEFINGNENGILPKNNTHK

SEQ ID NO: 807 - protein, 1259 aa, unidentified
  REGION 1..1259: note = Cas Enzyme sequence
MESNNKIFTETIGTSSIAKTMRNSLVPTESTKRNIEKNGIIIDDQLRAEKRQQLKEIMDEYYRTYIDNKLSNVALTRTIDWKELFQAIEDNYKQNTTKTKNELEKKQKEKRTEIYKILSDDEEFKQLFNAKLLTNILPEFIKNQNIDNEEKQEKISTVELFQRFTSSFTNFFKNRKNVFSKDEISTSICYRVVQENAWIFYQNLLAFEEIKKTAEQEIKKIEAENRDSISDYSLKEIFDFDFYGLLLNQGGIRFYNDVCGKINYHMNLYGQKHNIKSNKFKMKRMHKQILSIDESTFEVPTMFENDKEVYQVLNEFLSDLASKKILERVKKIGENVSEYEINKIYIQSKNFENFSSFMCGNWQIINDSLKAYYNDTIKSKGKTKEEKVKKAIKAIEYKSLADIDELVEKYNKDELNRKAEEYISAINEKIKDLDVNEIEYDEKINLIENETKSEEIKSKLDSIMEIMHWTKMFIIEEEIEKDVNFYNEIEEIYDELQPLVTIYNRIRNYVTQKPYSEEKIKLNFGIPTLANGWSKTKEYDNNAIIMIRDGKYYLGIFNAKNKPDKKIMEGHQSEENGDYKKMIYRLLPGPNKMLPKVFMSKTGIAEYKPSQYILECYEQNKHIKSDKNFDIKFCRDLIDFFKTSINRHPEWSKFNFKFSETSEYEDISTFYREVEKQGYKIEWTYISEKEIKELDENGQLYLFQIYNKDFSEKSKGKENLHTMYLKNLFSEENLKNIVLKLNGEAEVFFRKSSIKKPIIHKKGSVLVNKTYNENGERKSIPEEQYTEIYKYLNSIGTNELSEKSKKLMEEGKVEYYKANYDIVKDYRYSVDKFFIHLPMTINFKAAGFSPINNIALKNIALKEDMHIIGIDRGERNLIYVSVIDTKGNIVEQRNFNIVNGIDYKEKLKQKELDRDNARKNWKEIGKIKDLKEGYLSLVVHEIAKLVVKYNAIITMEDLNQGFKRGRFKVERQVYQKFETMLINKLNYLIDKDLAVDQEGGLLRGYQLTYIPESLKVLGRQCGYIFYVPAAYTSKIDPTTGFVAIFNYKGMTDKDFVTSFDSIKYDDERGLFAFEFDYENFVTHKVEMARNKWTVYTYGERIKRKFKNGLWDTAEKVDLTYQMRSILEKYEIEYNKGQDILEQIEKLDEKAQNGICKEIKYLVKDIVQMRNSLPDNAAEDYDAIISPVINNNGEFFDSTRGDEDKPLDADANGAYCIALKGLYEVMQIKKNWNEETEFPRKELKIRHQDWFDFIQNKRYL

SEQ ID NO: 808 - protein, 1259 aa, unidentified
  REGION 1..1259: note = Cas Enzyme sequence
MESNNKIFTETIGTSSIAKTMRNSLVPTESTKRNIEKNGIIIDDQLRAEKRQQLKEIMDEYYRTYIDNKLSNVALTRTIDWKELFQAIEDNYKQNTTKTKNELEKKQKEKRAEIYKILSDDEEFKQLFNAKLLTNILPEFIKNQNIDNEEKQEKISTVELFQRFTSSFTDFFKNRKNVFSKDEISTSICYRVVQENAWIFYQNLLAFEEIKKTAEQEIEKIEAENRDSISDYSLKEIFDFDFYGLLLNQGGIRFYNDVCGKINYHMNLYGQKHNIKSNKFKMKRMHKQILSIDESTFEVPTMFENDKEVYQVLNEFLSDLASKKILERVKKIGENVSEYEINKIYIQSKNFENFSSFMCGNWQIINDSLKAYYNETIKSKGKAKEEKVKKAIKAIEYKSLADIDELVEKYNKDELNRKAEEYISAINEKIKDLYVNEIEYDEKINLIENETKSEEIKSKLDSIMEIMHWTKMFIIEEEIEKDVNFYNEIEEIYDELQPLVTIYNRIRNYVTQKPYSEEKIKLNFGIPTLANGWSKTKEYDNNAIIMIRDGKYYLGIFNAKNKPDKKIMEGHQSEENGDYKKMIYRLLPGPNKMLPKVFMSKTGIAEYKPSQYILEGYGQNKHIKSNKNFDIKFCRDLIDFFKTSINRHPEWSKFNFKFSETSEYEDISTFYREVEKQGYKIEWTYISEKEIKELDENGQLYLFKIYNKDFSEKSKGKENLHTMYLKNLFSEENLKNIVLKLNGEAEVFFRKSSIKKPIIHKKGSVLVNKTYNENGERKSIPEEQYTEIYKYLNSIGTNELSEKSKKLMEEGKVEYYKANYDIVKDYRYSVDKFFIHLPMTINFKAAGFSPINNIALKNIALKEDMHIIGIDRGERNLIYVSVIDTKGNIVEQRNFNIVNGIDYKEKLKQKELDRDNARKNWKEIGKIKDLKEGYLSLVVHEIAKLVVKYNAIITMEDLNQGFKRGRFKVERQVYQKFETMLINKLNYLVDKDLAVDQEGGLLRGYQLTYIPESLKVLGRQCGYIFYVPAAYTSKIDPTTGFVAIFNYKGMTDKDFVTSFDSIKYDDERGLFAFEFDYKNFVTHKVEMARNKWTVYTYGERIKRKFKNGLWDTAEKVDLTYQMRNILEKYEIEYNKGQDILEQIEELDEKAQNGICKEIKYLVKDIVQMRNSLPDNAAEDYDAIISPVINNNGEFFDSTRGDEDKPLDADANGAYCIALKGLYEVMQIKKNWNEETEFPRKELKIRHQDWFDFIQNKRYL

SEQ ID NO: 809 - protein, 1259 aa, unidentified
  REGION 1..1259: note = Cas Enzyme sequence
MESNNKIFTETIGTSSIAKTMRNSLVPTESTKRNIEKNGIIIDDQLRAEKRQQLKEIMDEYYRTYIDNKLSNVALTRTIDWKELFQAIEDNYKQNTTKTKNELEKKQKEKRTEIYKILSDDEKFKQLFNAKLLTNVLPEFIKNQNIDNEEKQEKISTVELFQRFTSSFTDFFKNRKNVFSKDEISTSICYRVVQENAWIFYQNLLAFEEIKKTAEQEIEKIEAENRDSISDYSLKEIFDFDFYGLLLNQGGIRFYNDVCGKINYHMNLYGQKHNIKSNKFKMKRMHKQILSIDESTFEVPTMFENDKEVYQVLNEFLSDLASKKILERVEKIGENVSEYEINKIYIQSKNFENFSSFMCGNWQIINDSLKTYYNEKIKSKGKAKEEKVKKAIKAIEYKSLADINQLVERYNNDELNRKAEEYISAINEKIKDLDVNEIEYDEKINLIENETKSEEIKSKLDSIMEIMHWTKMFIIEEEIEKDVNFYNEIEEIYDELQPLVTIYNRIRNYVTQKPYSEEKIKLNFGIPTLANGWSKTKEYDNNAIIMIRDGKYYLGIFNAKNKPDKKIMEGHQSEENGDYKKMIYRLLPGPNKMLPKVFMSKTGIAEYKPSQYILECYEQNKHIKSDKNFDIKFCRDLIDFFKTSINRHPEWSKFNFKFSETSEYEDISTFYREVEKQGYKIEWTYISEKEIKELDENGQLYLFQIYNKDFSEKSKGKENLHTMYLKNLFSEENLKNIVLKLNGEAEVFFRKSSIKKPIIHKKGSVLVNKTYNENGERKSIPEEQYTEIYKYLNSIGTNELSEKSKKLIEEGKVEYYKANYDIVKDYRYSVDKFFIHLPMTINFKAAGFSPINNIALKNIALKDDMHIIGIDRGERNLIYVSVIDTKGNIVEQRNFNIVNGIDYKEKLKQKELDRDNARKNWKEIGKIKNLKEGYLSLVVHEIAKLVVKYNAIITMEDLNQGFKRGRFKVERQVYQKFETMLINKLNYLVDKDLAVDQEGGLLRGYQLTYIPESLKVLGRQCGYIFYVPAAYTSKIDPTTGFVAIFNYKGITDKDFVTSFDSIKYDDERGLFAFEFDYENFVTHKVEMARNKWTVYTYGERIKRKFKNGSWDTAEKVDLTYQMRRILEKYEIEYNKGQDILEQIEELDEKAQNGICKEIKYLVKDIVQMRNSLPDNAVEDYDAIISPVINNNGEFFDSTRGDEDKPLDADANGAYCIALKGLYEVMQIKKNWNEETEFPRKELKIRHQDWFDFIQNKRYL

SEQ ID NO: 810 - protein, 1259 aa, unidentified
  REGION 1..1259: note = Cas Enzyme sequence
MGTINFSDFTNLSSVTKTLCNRLIPTEITAKYIKEHGVIEADQERNMMSQELKNILNDFYRSFLSENLVKAHSLDFKPLFIEMKKYLETKDNKETLEKAQDDMRKAIHDIFESDNRYKKMFKAEITASVLPEFILHNGAYSADEKEEKMQIVKMFNGFMTSFSAFFTNRENCFSKEKISSSACYRIVDDNAKICFDNIRIYKNIADKFADKPEMIEKIEEAAGGADIKNIFSYNFNHFVSQNDISSYNYVVSEINKFMNLYCQATKEKLSPYKLRRLHKQILCIEESLYDVPAKFNCDEDVYAAVNDFLNNIRTKSVIERLQMLGENADSYDLDKIYISKKHFANISQILYRDFSVINTALTMSYIDTLPGKGKTKEKKAASMAKNTELISLGEIDRLVDKYNLCPDKAVSTRSLIRIISDIVADYKASPLTMSSSLPLAENETEIAVLKEAIEPFMNIFRWCAKFKTDEPVDKDADFYTELEDISDEIHSIVSLYNRTRNYVIKKPYNTDKFGLYFGTSSFASGWSESKEFTNNAILLAKDDKFYLGVFNAKNKPAKSIIKGHDTMQDGDYKKMVYSLLTGPNKMLPHMFISSSKATPVYGLTNELLADYKKGKHLKASKNFDIDYCHKLIDYFKHCLALYTDWDCFNFKFSDTESYNDIGEFYKEVAEQGYYMNWTYIGSDEIDSLQKNGQLYLFQIYNKDFSEKSTGRPNKHTAILRSLFSDENVADPVIKLCGGTEVFFRPKSIKTPVVHKKGSVLVSKTYNAQEMDENGNIITVRKCVPDGVYMELYGYYNNSGIPLSTEALKYKDIVDHRIAPYDIIKDRRYTENEFFINMPVSLNYKAENKRVNVNEMALKYIAQTKDTYIIAIDRGERNLLYVSVIDADGSIIEQKSLNIINNVDYQAKLKQIEIIRKLAKQSWKQGVKIADLKKGYLSQAVHEIAELVIKYNGIVVMEDLNSRFKEKRSKIERSVYQQFETSLIKTLNYLTFKDRKPLEAGGIANGYQLTYIPESLKNVGSQCGCILYVPAAYTSRIDPTTGFVTLFKFRDISSEKAKTDFIGRFDCIRYDAEKDLFAFEFDYDNFETYETCARTKWCAYTYGTRVKKTFRNRKFVSEVIIDITEEIKKTLAATDINWADGHDIKQEIINYALSSHIFEMFKLTVQMRNSLCESKDREYDKFISPIMNASGKFFDTDAADKSLPTEADANDAYGIAMKGLYNVLQVKNNWAEGEKFKFKRLSNEDWFNFMQNREEEAVNE

SEQ ID NO: 811 - protein, 1259 aa, unidentified
  REGION 1..1259: note = Cas Enzyme sequence
MDFTKFQKLNSIIKTCSFEMIPIGKTRETMEKHNVIEEDAERKSNAELTKEVSDSFIREFIADYKEDMDWKDLYDAYGEDRARFTDIMNQKAEKLAKRFSDSFNEYINTFLKANGINDKKSKWSDSGYVDVVLPLYVSIHPDFSNDKYERAVASLLHCSNSLFKKYTTSYARIIAGTKKGSFADRSMENFQTACANSVMFDLISRNLSSVGSHDAFKEVFADAPLNMNEYLSQKGISRYNEFVGDSFDESGQVIRYGVNHYINEWNQTHPDERMPKMHKLKKQILSIVEPSFRIRTINDETELFGTFDNIRTAEQRYAGMLESILENMNTADIYDKSGILVTSAERDSLANAITGEWSYFRRQIKEEEENRIREEYLQKKNRVKTKLTQKDNKQIEDALNKSIYSVADLNKMLGSDFGTIEEKLLDEYIRNKSKKESAYAQLVKTDFYDKKTIPAGDDVQRIQQYLDKVLSLTHIVRGLCADSQDPRTDFVFSDDVSSLEDDRVQIISCYNLIRNFVTKKREKTAKEKQIQLCFGRPAHFEQVWNNKQEGKFGNVDAALLEYAGKYYYMVPAAKNEAKLNFPVTDEPQMGECYNYLATKKAIGFAKAFAKFYIKSPEAMEGFEKTEEPFEISVGNDTMIISRKVYEDYEAKTFRESEEAKNKLIDCAKEFLSKNLSYCIYDWSGLKETKDYVNYGEFCNEVDSIAFRVINRYVSKKLVDDAVERGNLYMFEISSLDMYKDSSRMKNIMALRFNQIMNGMFTGDKFIIINNAPQIRYRPVVIEKKDVHPVGSRLVNKNTTDGRTIPGDVYLELCAYYNGKKDSLSPEASLYNEKVSVKDSDRAHIKDKHYTEEKFLITFSYTANKNVASATSGYQLNEMVRKEIRENGCNIMAVIRGIDNLLYYAVVDENGNRIEAGDLNVVGDTDFYEKLTILGKQRYTDQKNWKHENKVADLKDTYLGQVCRKIASIAVKNNAVIVIDKINERTKRKNAAFDNNMYRKFENALVNSLTDYYDIGIRGDEPGSVKNPLQLTVKEDNGFQNGIIFYQFDTFTKNICMRTGFVNLLNTFEIKTVASKVAFLKKLSGIYYDNDINEFVFEFTWRNIGCILKDEELSLYNGMDKIWKVRTHFTRYMRNAEKNKYVEIDGTEVLKELIRKNHPDMIGGKIDVDRLTSEEVKKVFEIFTLYTNGYIPRMDDAESGYMSPACDWNNFGTIRYDEMTALQLAKKSSLMIGKVKSGKDWKDMNVSRVEWLNHVLKADW

SEQ ID NO: 812 - protein, 1259 aa, unidentified
  REGION 1..1259: note = Cas Enzyme sequence
MESNNKIFTETIGTSSIAKTMRNSLVPTESTKRNIEKNGIIIDDQLRAEKRQQLKEIMDEYYRAYIDSKLSNVALTRTIDWKELFQAIENNYKQNTTKTKNELEKKQKEKRTEIYKILSDDEEFKQLFNAKLLTNILPEFIKNQNIDNEEKQEKISTVELFQRFTSSFTDFFKNRKNVFSKDEISTSICYRVVQENAWIFYQNLLAFEEIKKTAEQEIKKIEAENRDSISDYSLKEIFDFDFYGLLLNQGGIRFYNDVCGKINYHMNLYGQKHNIKSNKFKMKRMHKQILSIDESTFEVPTMFENDKEVYQVLNEFLSDLASKKILERVEKIGENVSEYEINKIYIQSKNFENFSSFMCGNWQIINDSLKTYYNEKIKSKGKAKEEKVKKAIKAIEYKSLADINQLVERYNHDELNRKAEEYISAINEKIKDLYVNEIEFDEKTNLIENETKSEEIKSKLDSIMEIMHWTKMFIIEEEIEKDVNFYNEIEEIYDELQPLVTIYNRIRNYVTQKPYSEEKIKLNFGIPTLANGWSKTKEYDNNAIIMIRDGKYYLGIFNAKNKPDKKIMEGHQSEENCDYKKMIYRLLPGPNKMLPKVFMSKTGIAEYKPSQYILECYEQNKHIKSDKNFDIKFCRDLIDFFKTSINRHPEWSKFNFKFSETSEYEDISTFYREVEKQGYKIEWTYISEKEIKELDENGQLYLFQIYNKDFSEKSKGKENLHTMYLKNLFSEENLKNIVLKLNGEAEVFFRKSSIKKPIIHKKGSVLVNKTYNENGERKSIPEEQYTEIYKYLNSIGTNELSEKSKKLMEEGKVEYYKANYDIVKDYRYSVDKFFIHLPMTINFKAAGFSPINNIALKSIALKEDMHIIGIDRGERNLIYVSVIDTKGNIVEQRNFNIVNGIDYKEKLKQKELDRDNARKNWKEIGKIKDLKEGYLSLVVHEIAKLVVKYNAIITMEDLNQGFKRGRFKVERQVYQKFETMLINKLNYLVDKDLAVDQEGGLLRGYQLTYIPESLKVLGRQCGYIFYVPAAYTSKIDPTTGFVAIFNYKGMTDKDFVTSFDSIKYDDERGLFAFEFDYENFVTHKVEMARNKWTVYTYGERIKRKFKNGLWDTAEKVDLTYQMRSILEKYEIEYNKGQDILEQIEELDEKAQNGICKEIKYLVKDIVQMRNSLPDNAVEDYDAIISPVINNNGEFFDSTRGDEDKPLDADANGAYCIALKGLYEVMQIKKNWNEETEFPRKELKIRHQDWFDFIQNKRYL

SEQ ID NO: 813 - protein, 1259 aa, unidentified
  REGION 1..1259: note = Cas Enzyme sequence
MESNNKIFTETIGTSSIAKTMRNSLVPTESTKRNIEKNGIIIDDQLRAEKRQQLKEIMDEYYRAYIDSKLSNVALTRTIDWKELFQAIENNYKQNTTKTKNELEKKQKEKRTEIYKILSDDEEFKQLFNAKLLTNILPEFIKNQNIDNEEKQEKISTVELFQRFTSSFTDFFKNRKNVFSKDEISTSICYRVVQENAWIFYQNLLAFEEIKKTAEQEIKKIEAENRDSISDYSLKEIFDFDFYGLLLNQGGIRFYNDVCGKINYHMNLYGQKHNIKSNKFKMKRMHKQILSIDESTFEVPTMFENDKEVYQVLNEFLSDLASKKILERVKKIGENVSEYEINKIYIQSKNFENFSSFMCGNWQIINDSLKAYYNETIKSKGKAKEEKVKKAIKAIEYKSLADIDELVEKYNKDELNRKAEEYISAINEKIKDLDMNEIEYDEKTNLIENETKSEEIKSKLDSIMEIMHWTKMFIIEEEIEKDVNFYNEIEEIYDELQPLVTIYNRIRNYVTQKPYSEEKIKLNFGIPTLANGWSKTKEYDNNAIIMIRDGKYYLGIFNAKNKPDKKIMEGHQSEENGDYKKMIYRLLPGPNKMLPKVFMSKTGIAEYKPSQYILECYEQNKHIKSDKNFDIKFCRDLIDFFKTSINRHPEWSKFNFKFSETSEYEDISTFYREVEKQGYKIEWTYISEKEIKELDENGQLYLFQIYNKDFSEKSKGKENLHTMYLKNLFSEENLKNIVLKLNGEAEVFFRKSSIKKPIIHKKGSVLVNKTYNENGERKSIPEEQYTEIYKYLNSIGTNELSEKSKKLMEEGKVEYYKANYDIVKDYRYSVDKFFIHLPMTINFKAAGFSPINNIALKNIALKDDMHIIGIDRGERNLIYVSVIDTKGNIVEQRNFNIVNGIDYKEKLKQKELDRDNARKNWKEIGKIKDLKEGYLSLVVHEIAKLVVKYNAIITMEDLNQGFKRGRFKVERQVYQKFETMLINKLNYLVDKDLAVDQEGGLLRGYQLTYIPESLKVLGRQCGYIFYVPAAYTSKIDPTTGFVAIFNYKGMTDKDFVTSFDSIKYDDERGLFAFEFDYGNFVTHKVEMARNKWTVYTYGERIKRKFKNGSWDTAEKVDLTYQMRSILEKYEIEYNKGQDILEQIEELDEKAQNGICKEIKYLVKDIVQMRNSLPDNAAEDYDAIISPVINNNGEFFDSTRGDEDKPLDADANGAYCIALKGLYEVMQIKKNWNEETEFPRKELKIRHQDWFDFIQNKRYL

SEQ ID NO: 814 - protein, 1259 aa, unidentified
  REGION 1..1259: note = Cas Enzyme sequence
MESNNKIFTETIGTSSIAKTMRNSLVPTESTKRNIEKNGIIIDDQLRAEKRQQLKEIMDEYYRTYIDNKLSNVALTRTIDWKELFQAIEDNYKQNTTKTKNELEKKQKEKRAEIYKILSDDEEFKQLFNAKLLTNILPEFIKNQNIDNEEKQEKISTVELFQRFTSSFTDFFKNRKNVFSKDEISTSICYRVVQENAWIFYQNLLAFEEIKKTAEQEIEKIEAENRDSISDYSLKEIFDFDFYGLLLNQGGIRFYNDVCGKINYHMNLYGQKHNIKSNKFKMKRMHKQILSIDESTFEVPTMFENDKEVYQVLNEFLSDLASKKILERVKKIGENVSEYEINKIYIQSKNFENFSSFMCGNWQIINDSLKAYYNETIKSKGKAKEEKVKKAIKAIEYKSLADIDELVEKYNKDELNRKAEEYISAINEKIKDLDVNEIEYDEKINLIENETKSEEIKSKLDSIMEIMHWTKMFIIEEEIEKDVNFYNEIEEIYDELQPLVTIYNRIRNYVTQKPYSEEKIKLNFGIPTLANGWSKTKEYDNNAIIMIRDGKYYLGIFNAKNKPDKKIMEGHQSEENGDYKKMIYRLLPGPNKMLPKVFMSKTGIAEYKPSQYILEGYGQNKHIKSNKNFDIKFCRDLIDFFKTSINRHPEWSKFNFKFSETSEYEDISTFYREVEKQGYKIEWTYIGEKEIKELDENGQLYLFQIYNKDFSEKSKGKENLHTMYLKNLFSEENLKNIVLKLNGEAEVFFRKSSIKKPIIHKKGSVLVNKTYNENGERKSIPEEQYTEIYKYLNSIGTNELSEKSKKLMEEGKVEYYKANYDIVKDYRYSVDKFFIHLPMTINFKAAGFSPINNIALKNIALKDDMHIIGIDRGERNLIYVSVIDTKGNIVEQRNFNIVNGIDYKEKLKQKELDRDNARKNWKEIGKIKDLKEGYLSLVVHEIAKLVVKYKAIITMEDLNQGFKRGRFKVERQVYQKFETMLINKLNYLVDKDLAVDQEGGLLRGYQLTYIPESLKVLGRQCGYIFYVPAAYTSKIDPTTGFVAIFNYKGMTDKDFVTSFDSIKYDDERGLFAFEFDYENFVTHKVEMARNKWTVYTYGERIKRKFKNGSWDTAEKVDLTYQMRSILEKYEIEYNKGQDILEQIEELDEKAQNGICKEIKYLVKDIVQMRNSLPDNAAEDYDAIISPVINNNGEFFDSTRGDEDKPLDADANGAYCIALKGLYEVMQIKKNWNEETEFPRKELKIRHQDWFDFIQNKRYL

SEQ ID NO: 815 - protein, 1259 aa, unidentified
  REGION 1..1259: note = Cas Enzyme sequence
MGTINFSDFTNLSSVTKTLCNRLIPTEITAKYIKEHGVIEADQERNMMSQELKNILNDFYRSFLSENLVKVHNLDFKPLFTEMKKYLETKDNKEALGKAQDDMRKAIHDIFESDDRYKKMFKAEITASILPEFILHNGAYSAEEKEERMQIVKMFNGFMTSFSAFFTNRENCFSKEKISSSACYRIVDDNAKICFDNIRIYKNIANKFTDKPEMIEKIEEAIGGADVKNIFSYNFNHFVSQNDISSYNYVVSGINKFMNLYCQATKEKLSPYKLRRLHKQILCIEESLYDVPAKFNCDKDVYAAVNDFLNNVRTKSVIERLQTLGENADSYDLDKIYISKKYFANISQMMYRDFSIINTALTMSYIDTLPGKGKTKEKKAASMAKNTELISLGEIDRLVDKYNLYPGKTVSTKLLIRSISDIVTGYKANSLTMNSGLPLAENEAEIAILKESIEPFMDIFRWCAKFKTDEPVDKDTDFYTELEDISDEIHSIVSLYNRTRNYVTKKPYNTDKFGLYFGTSSFASGWSESKEFTNNAILLAKDDKFYLGVFNAKNKPAKSIIKGHNTMQDGDYKKMVYSLLTGPNKMLPHMFISSSKAAPVYGLTDELLSDYKKGRHLKASKNFDIDYCHKLIDYFKHCLALYTDWDCFDFKFSDTESYNDIGEFYKEVAEQGYYMNWTYIGSDEIDSLQENGQLYLFQIYNKDFSEKSTGRSNKHTAILRSLFSDENVADPVIKLCGGTEVFFRPKSIKTPVVHKKESVLVSKTYNAQEMDENGNIITVRKCVPDDVYMELYGYYNNSGIPLSAEALKYKDIVDHRTAPYDIIKDRRYTEDEFFINMPVSLNYKAENKRVNVNEMALKYIAQTKDTYIIAIDRGERNLLYVSVIDTDGNIIEQKSLNIINNVDYQAKLKQIETIRKLAKQSWKQGVKIADLKKGYLSQAVHEIAELVIKYNGIVVMEDLNSRFKEKRSKIERSVYQQFETSLIKTLNYLTFKDRKPLEAGGIANGYQLTYIPESLKNVGSQCGCILYVPAAYTSRIDPTTGFVTLFKFKDISSEKTKTDFIGRFDCIRYDAEKDLFAFEFNYDNFETYETCARTKWCAYTYGTRVKKTFRNRKFVSEIVIDITEEIKKTLAATDINWSDGHDIKQEIIDYALSSHIFEMFKLTVQMRNSLCESKDREYDKFVSPVLNASGKFFDTDAADKSLPIEADANDAYGIAMKGLYNVLQVKNNWVEGEKFKFSRLSNEDWFNFMQNRAEETVNE

SEQ ID NO: 816 - protein, 1259 aa, unidentified
  REGION 1..1259: note = Cas Enzyme sequence
MESNNKIFTETIGTSSIAKTMRNSLVPTESTKRNIEKNGIIIDDQLRAEKRQQLKEIMDEYYRAYIDSKLSNVALTRTIDWKELFQAIENNYKQNTTKTKNELEKKQKEKRTEIYKILSDDEEFKQLFNAKLLTNILPEFIKNQNIDNEEKQEKISTVELFQRFTSSFTDFFKNRKNVFSKDEISTSICYRVVQENAWIFYQNLLAFEEIKKTAEQEIKKIEAENRDSISDYSLKEIFDFDFYGLLLNQGGIRFYNDVCGKINYHMNLYGQKHNIKSNKFKMKRMHKQILSIDESTFEVPTMFENDKEVYQVLNEFLSDLASKKILERVEKIGENVSEYEINKIYIQSKNFENFSSFMCGNWQIINDSLKTYYNENIKSKGKAKEEKVKKAIKAIEYKSLADINQLVERYNNDELNRKAEEYISAINEKIKDLDVNEIEYDEKINLIENETKFEEIKSKLDSIMEIMHWTKMFIIEEEIEKDVNFYNEIEEIYDELQPLVTIYNRIRNYVTQKPYSEEKIKLNFGIPTLANGWSKTKEYDNNAIIMIRDGKYYLGIFNAKNKPDKKIMEGHQSEENGDYKKMIYRLLPGPNKMLPKVFMSKTGIAEYKPSQYILECYEQNKHIKSDKNFNIKFCRDLIDFFKTSINRHPEWSKFNFKFSETSEYEDISTFYREVEKQGYKIEWTYISEKEIKELDENGQLYLFQIYNKDFSEKSKGKENLHTMYLKNLFSEENLKNIVLKLNGEAEVFFRKSSIKKPIIHKKGSVLVNKTYNENGERKSIPEEQYTEIYKYLNSIGTNELSEKSKKLMEEGKVEYYKANYDIVKDYRYSVDKFFIHLPMTINFKAAGFSPINNIALKNIALKDDMHIIGIDRGERNLIYVSVIDTKGNIVEQRNFNIVNGIDYKEKLKQKELDRDNARKNWKEIGKIKDLKEGYLSLVVHEIAKLVVKYNAIITMEDLNQGFKRGRFKVERQVYQKFETMLINKLNYLVDKDLAVDQEGGLLRGYQLTYIPESLKVLGRQCGYIFYVPAAYTSKIDPTTGFVAIFNYKGMTDKDFVTSFDSIKYDDERGLFAFEFDYENFVTHKVEMARNKWTVYTYGERIKRKFKNGSWDTAEKVDLTYQMRRILEKYEIEYNKGQDILEQIEELDEKAQNGICKEIKYLVKDIVQMRNSLPDNAAEDYDAIISPVINNNGEFFDSTRGDEDKPLDADANGAYCIALKGLYEVMQIKKNWNEETEFPRKELKIRHQDWFDFIQNKRYL

SEQ ID NO: 817 - protein, 1259 aa, unidentified
  REGION 1..1259: note = Cas Enzyme sequence
MESNNKIFTETIGTSSIAKTMRNSLVPTESTKRNIEKNGIIIDDQLRAEKRQQLKEIMDEYYRTYIDNKLSNVALTRTIDWKELFQAIEDNYKQNTTKTKNELEKKQKEKRTEIYKILSDDEEFKQLFNAKLLTNILPEFIKNQNIDNEEKQEKISTVELFQRFTSSFTNFFKNRKNVFSKDEISTSICYRVVQENAWIFYQNLLAFEEIKKTAEQEIKKIEAENRDSISDYSLKEIFDFDFYGLLLNQGGIRFYNDVCGKINYHMNLYGQKHNIKSNKFKMKRMHKQILSIDESTFEVPTMFENDKEVYQVLNEFLSDLASKKILERVKKIGENVSEYEINKIYIQSKNFENFSSFMCGNWQIINDSLKAYYNDTIKSKGKTKEEKVKKAIKAIEYKSLADIDELVEKYNKDELNRKAEEYISAINEKIKDLYVNEIEYDEKINLIENETKSEEIKSKLDSIMEIMHWTKMFIIEEEIEKDVNFYNEIEEIYDELQPLVTIYNRIRNYVTQKPYSEEKIKLNFGIPTLANGWSKTKEYDNNAIIMIRDGKYYLGIFNAKNKPDKKIMEGHQSEENGDYKKMIYRLLPGPNKMLPKVFMSKTGIAEYKPSQYILECYEQNKHIKSDKNFDIKFCRDLIDFFKTSINRHPEWSKFNFKFSETSEYEDISTFYREVEKQGYKIEWTYISEKEIKELDENGQLYLFQIYNKDFSEKSKGKENLHTMYLKNLFSEENLKNIVLKLNGEAEVFFRKSSIKKPIIHKKGSVLVNKTYNENGERKSIPEEQYTEIYKYLNSIGTNELSEKSKKLMEEGKVEYYKANYDIVKDYRYSVDKFFIHLPMTINFKAAGFSPINNIALKNIALKEDMHIIGIDRGERNLIYVSVIDTKGNIVEQRNFNIVNGIDYKEKLKQKELDRDNARKNWKEIGKIKDLKEGYLSLVVHEIAKLVVKYNAIITMEDLNQGFKRGRFKVERQVYQKFETMLINKLNYLIDKDLAVDQEGGLLRGYQLTYIPESLKVLGRQCGYIFYVPAAYTSKIDPTTGFVAIFNYKGMTDKDFVTSFDSIKYDDERGLFAFEFDYENFVTHKVEMARNKWTVYTYGERIKRKFKNGLWDTAEKVDLTYQMRSILEKYEIEYNKGQDILEQIEKLDEKAQNGICKEIKYLVKDIVQMRNSLPDNAAEDYDAIISPVINNNGEFFDSTRGDEDKPLDADANGAYCIALKGLYEVMQIKKNWNEETEFPRKELKIRHQDWFDFIQNKRYL

SEQ ID NO: 818 - protein, 1259 aa, unidentified
  REGION 1..1259: note = Cas Enzyme sequence
MESNNKIFTETIGTSSIAKTMRNSLVPTESTKRNIEKNGIIIDDQLRAEKRQQLKEIMDEYYRAYIDSKLSNVALTRTIDWKELFQAIENNYKQNTTKTKNELEKKQKEKRAEIYKILSDDEEFKQLFNAKLLTNILPEFIKNQNIDNEEKQEKISTVELFQRFTSSFTDFFKNRKNVFSKDEISTSICYRVVQENAWIFYQNLLAFEEIKKTAEQEIEKIEAENRDSISDYSLKEIFDFDFYGLLLNQGGIRFYNDVCGKINYHMNLYGQKHNIKSNKFKMKRMHKQILSIDESTFEVPTMFENDKEVYQVLNEFLSDLASKKILERVKKIGENVSEYEINKIYIQSKNFENFSSFMCGNWQIINDSLKAYYNETIKSKGKAKEEKVKKAIKAIEYKSLADIDELVEKYNKDELNRKAEEYISAINEKIKDLDVNEIEYDEKINLIENETKSEEIKSKLDSIMEIMHWTKMFIIEEEIEKDVNFYNEIEEIYDELQPLVTIYNRIRNYVTQKPYSEEKIKLNFGIPTLANGWSKTKEYDNNAIIMIRDGKYYLGIFNAKNKPDKKIMEGHQSEENGDYKKMIYRLLPGPNKMLPKVFMSKTGIAEYKPSQYILECYEQNKHIKSDKNFDIKFCRDLIDFFKTSINRHPEWSKFNFKFSETSEYEDISTFYREVEKQGYKIEWTYISEKEIKELDENGQLYLFQIYNKDFSEKSKGKENLHTMYLKNLFSEENLKNIVLKLNGEAEVFFRKSSIKKPIIHKKGSVLVNKTYNENGERKSIPEEQYTEIYKYLNSIGTNELSEKSKKLMEEGKVEYYKANYDIVKDYRYSVDKFFIHLPMTINFKAAGFSPINNIALKNIALKEDMHIIGIDRGERNLIYVSVIDTKGNIVEQRNFNIVNGIDYKEKLKQKELDRDNARKNWKEIGKIKDLKEGYLSLVVHEIAKLVVKYNAIITMEDLNQGFKRGRFKVERQVYQKFETMLINKLNYLVDKDLAVDQEGGLLRGYQLTYIPESLKVLGRQCGYIFYVPAAYTSKIDPTTGFVAIFNYKGMTDKDFVASFDSIKYDDERGLFAFEFDYENFVTHKVEMARNKWTVYTYGERIKRKFKNGSWDTAEKVDLTYQMRSILEKYEIEYNKGQDILEQIEELDEKTQNGICKEIKYLVKDIVQMRNSLPDNAAEDYDAIISPVINNNGEFFDSTRGDEDKPLDADANGAYCIALKGLYEVMQIKKNWNEETEFPRKELKIRHQDWFDFIQNKRYL

SEQ ID NO: 819 - protein, 1259 aa, unidentified
  REGION 1..1259: note = Cas Enzyme sequence
MESNNKIFTETIGTSSIAKTMRNSLVPTESTKRNIEKNGIIIDDQLRAEKRQQLKEIMDEYYRTYIDNKLSNVALTRTIDWKELFQAIEDNYKQNTTKTKNELEKKQKEKRAEIYKILSDDEEFKQLFNAKLLTNILPEFIKNQNIDNEEKQEKISTVELFQRFTSSFTDFFKNRKNVFSKDEISTSICYRVVQENAWIFYQNLLAFEEIKKTAEQEIEKIEAENRDSISDYSLKEIFDFDFYGLLLNQGGIRFYNDVCGKINYHMNLYGQKHNIKSNKFKMKRMHKQILSIDESTFEVPTMFENDKEVYQVLNEFLSDLASKKILERVKKIGENVSEYEINKIYIQSKNFENFSSFMCGNWQIINDSLKAYYNETIKSKGKAKEEKVKKAIKAIEYKSLEDIDELVEKYNKDELNRKAEEYISAINEKIKDLDVNEIEYDEKINLIENETKSEEIKSKLDSIMEIMHWTKMFIIEEEIEKDVNFYNEIEEIYDELQPLVTIYNRIRNYVTQKPYSEEKIKLNFGIPTLANGWSKTKEYDNNAIIMIRDGKYYLGIFNAKNKPDKKIMEGHQSEENGDYKKMIYRLLPGPNKMLPKVFMSKTGIAEYKPSQYILEGYGQNKHIKSNKNFDIKFCRDLIDFFKTSINRHPEWSKFNFKFSETSEYEDISTFYREVEKQGYKIEWTYIGEKEIKELDENGQLYLFQIYNKDFSEKSKGKENLHTMYLKNLFSEENLKNIVLKLNGEAEVFFRKSSIKKPIIHKKGSVLVNKTYNENGERKSIPEEQYTEIYKYLNSIGTNELSEKSKKLMEEGKVEYYKANYDIVKDYRYSVDKFFIHLPMTINFKAAGFSPINNIALKNIALKDDMHIIGIDRGERNLIYVSVIDTKGNIVEQRNFNIVNGIDYKEKLKQKELDRDNARKNWKEIGKIKDLKEGYLSLVVHEIAKLVVKYKAIITMEDLNQGFKRGRFKVERQVYQKFETMLINKLNYLVDKDLAVDQEGGLLRGYQLTYIPESLKVLGRQCGYIFYVPAAYTSKIDPTTGFVAIFNYKGMTDKDFVTSFDSIKYDDERGLFAFEFDYENFVTHKVEMARNKWTVYTYGERIKRKFKNGSWDTAEKVDLTYQMRSILEKYEIEYNKGQDILEQIEELDEKAQNGICKEIKYLVKDIVQMRNSLPDNAAEDYDAIISPVINNNGEFFDSTRGDEDKPLDADANGAYCIALKGLYEVMQIKKNWNEETEFPRKELKIRHQDWFDFIQNKRYL

SEQ ID NO: 820 - protein, 1259 aa, unidentified
  REGION 1..1259: note = Cas Enzyme sequence
MDFTKFQKLNSIIKTCSFEMIPIGKTRETMEKHNVIEEDAERKSNAELTKEVSDSFIREFIADYKEDMDWKDLYDAYGEDRARFTDIMNQKAEKLAKRFSDSFNEYINTFLKANGINDKKSKWSDSGYVDVVLPLYVSIHPDFSNDKYERAVASLLHCSNSLFKKYTTSYARIIAGTKKGSFADRSMENFQTACANSVMFDLISRNLSSVGSHDAFKEVFADAPLNMNEYLSQKGISRYNEFVGDSFDESGQVIRYGVNHYINEWNQTHPDERMPKMHKLKKQILSIVEPSFRIRTINDETELFGTFDNIRTAEQRYAGMLESILENMNTADIYDKSGILVTSAERDSLANAITGEWSYFRRQIKEEEENRIREEYLQKKNRVKTKLTQKDNKQIEDALNKSIYSVADLNKMLGSDFGTIEEKLLDEYIRNKSKKESAYAQLVKTDFYDKKTIPAGDDVQRIQQYLDKVLSLTHIVRGLCADSQDPRTDFVFSDDVSSLEDDRVQIISCYNLIRNFVTKKREKTAKEKQIQLCFGRPAHFEQVWNNKQEGKFGNVDAALLEYAGKYYYMVPAAKNEAKLNFPVTDEPQMGECYNYLATKKAIGFAKAFAKFYIKSPEAMEGFEKTEEPFEISVGNDTMIISRKVYEDYEAKTFRESEEAKNKLIDCAKEFLSKNLSYCIYDWSVLKEANDYVNYGEFCNEVDSIAFRVINRYVSKKLVDDAVERGNLYMFEISSLDMYKDSSRMKNIMALRFNQIMNAMFTGDKSIIINNAPQIRYRPVVIEKKDVHPVGSRLVNKNTTDGRTIPGDVYLELCAYYNGKKDSLSPEASLYNEKVSVKDSDRAHIKDKHYTEEKFLITFSYTANKNVASATSGYQLNEMVRKEIRENGCNIMAVIRGIDNLLYYAVVDENGNRIEAGDLNVVGDTDFYEKLTILGKQRYTDQKNWKHENKVADLKDTYLGQVCRKIASIAVKNNAVIVIDKINESTKRKNAAFDNNMYRKFENALVNSLTDYYDIGIRGDEPGSVKNPLQLTVKEDNGFQNGIIFYQFDTFTKNICMRTGFVNLLNTFEIKTVASKVAFLKKLSDIYYDNDINEFVFEFTWRNIGCILKDEELPLYDGMDKIWKVRTHFTRYMRNAEKNKYVEIDGTEVLKELIRKNHPDMIGGKIDVDRLTSEEVKKVFEIFTLYTNGYIPRMDDAESGYMSPACDWNNFGTIRYDEMTALQLAKKSSLMIGKVKSGKDWKDMNVSRVEWLNHVLKADW

SEQ ID NO: 821 - protein, 1259 aa, unidentified
  REGION 1..1259: note = Cas Enzyme sequence
MDFTKFQKLNSIIKTCSFEMIPIGKTRETMEKHNVIEEDAERKSNAELTKEVSDSFIREFIADYKEDMDWKDLYDAYGEDRARFTDIMNQKAEKLAKRFSDSFNEYINTFLKANGINDKKSKWSDSGYVDVVLPLYVSIHPDFSNDKYERAVASLLHCSNSLFKKYTTSYARIIAGTKKGSFADRSMENFQTVCANSVMFDLISRNLSSVGSHDAFKEVFADAPLNMNEYLSQKGISRYNEFVGDSFDESGQVIRYGVNHYINEWNQTHPDERMPKMHKLKKQILSIVEPSFRIRTINDETELFGTFDNIRTAEQRYAGMLESILENMNTADIYDKSGILVTSAERDSLANAITGEWSYFRRQIKEEEENRIREEYLQKKNRVKTKLTQKDNKQIEDALNKSIYSVADLNKMLGSDFGTIEEKLLDEYIRNKSKKESAYAQLVKTDFYDKKTIPAGDDVQRIQQYLDKVLSLTHIVRGLCADSQDPRTDFVFSDDVSSLEDDRVQIISCYNLIRNFVTKKREKTAKEKQIQLCFGRPAHFEQVWNNKQEGKFGNVDAALLEYAGKYYYMVPAAKNEAKLNFPVTDEPQMGECYNYLATKKAIGFAKAFAKFYIKSPEAMEGFEKTEEPFEISVGNDTMIISRKVYEDYEAKTFRESEEAKNKLIDCAKEFLSKNLSYCIYDWSVLKEANDYVNYGEFCNEVDSIAFRVINRYVSKKLVDDAVERGNLYMFEISSLDMYKDSSRMKNIMALRFNQIMNGMFTGDKSIIINNAPQIRYRPVVIEKKDVHPVGSRLVNKNTTDGRTIPGDVYLELCAYYNGKKDSLSPEASLYNEKVSVKDSDRAHIKDKHYTEEKFLITFSYTANKNVASATSGYQLNEMVRKEIRENGCNIMAVIRGIDNLLYYAVVDENGNRIEAGDLNVVGDTDFYEKLTILGKQRYTDQKNWKHENKVADLKDTYLGQVCRKIASIAVKNNAVIVIDKINESTKRKNAAFDNNMYRKFENALVNSLTDYYDIGIRGDEPGSVKNPLQLTVKEDNGFQNGIIFYQFDTFTKNICMRTGFVNLLNTFEIKTVASKVAFLKKLSDIYYDNDINEFVFEFTWRNIGCILKDEELPLYDGMDKIWKVRTHFTRYMRNAEKNKYVEIDGTEVLKELIRKNHPDMIGGKIDVDRLTSEEVKKVFEIFTLYTNGYIPRMDDAESGYMSPACDWNNFGTIRYDEMTALQLAKKSSLMIGKVKSGKDWKDMNVSRVEWLNHVLKADW

SEQ ID NO: 822 - protein, 1259 aa, unidentified
  REGION 1..1259: note = Cas Enzyme sequence
MESNNKIFTETIGTSSIAKTMRNSLVPTESTKRNIEKNGIIIDDQLRAEKRQQLKEIMDEYYRTYIDNKLSNVALTRTIDWKELFQAIEDNYKQNTTKTKNELEKKQKEKRTEIYKILSDDEKFKQLFNAKLLTNVLPEFIKNQNIDNEEKQEKISTVELFQRFTSSFTDFFKNRKNVFSKDEISTSICYRVVQENAWIFYQNLLAFEEIKKTAEQEIEKIEAENRDSISDYSLKEIFDFDFYGLLLNQGGIRFYNDVCGKINYHMNLYGQKHNIKSNKFKMKRMHKQILSIDESTFEVPTMFENDKEVYQVLNEFLSDLASKKILERVEKIGENVSEYEINKIYIQSKNFENFSSFMCGNWQIINDSLKTYYNENIKSKGKAKEEKVKKAIKAIEYKSLADINQLVERYNNDELNRKAEEYISAINEKIKDLDVNEIEYDEKINLIENETKSEEIKSKLDSIMEIMHWTKMFIIEEEIEKDVNFYNEIEEIYDELQPLVTIYNRIRNYVTQKPYSEEKIKLNFGIPTLANGWSKTKEYDNNAIIMIRDGKYYLGIFNAKNKPDKKIMEGHQSEENGDYKKMIYRLLPGPNKMLPKVFMSKTGIAEYKPSQYILECYEQNKHIKSDKNFDIKFCRDLIDFFKTSINRHPEWSKFNFKFSETSEYEDISTFYREVEKQGYKIEWTYISEKEIKELDENGQLYLFQIYNKDFSEKSKGKENLHTMYLKNLFSEENLKNIVLKLNGEAEVFFRKSSIKKPIIHKKGSVLVNKTYNENGERKSIPEEQYTEIYKYLNSIGTNELSEKSKKLMEEGKVEYYKANYDIVKDYRYSVDKFFIHLPMTINFKAAGFSPINNIALKNIALKDDMHIIGIDRGERNLIYVSVIDTKGNIVEQRNFNIVNGIDYKEKLKQKELDRDNARKNWKEIGKIKDLKEGYLSLVVHEIAKLVVKYNAIITMEDLNQGFKRGRFKVERQVYQKFETMLINKLNYLVDKDLAVDQEGGLLRGYQLTYIPESLKVLGRQCGYIFYVPAAYTSKIDPTTGFVAIFNYKGMTDKDFVTSFDSIKYDDERGLFAFEFDYENFVTHKVEMARNKWTVYTYGERIKRKFKNGLWDTAEKVDLTYQMRSILEKYEIEYNKGQDILEQIEELDEKAQNGICKEIKYLVKDIVQMRNSLPDNAAEDYDAIISPVINNNGEFFDSTRGDEDKPLDADANGAYCIALKGLYEVMQIKKNWNEETEFPRKELKIRHQDWFDFIQNKRYL

SEQ ID NO: 823 - protein, 1259 aa, unidentified
  REGION 1..1259: note = Cas Enzyme sequence
MDFTKFQKLNSIIKTCSFEMIPIGKTRETMEKHNVIEEDAERKSNAELTKEVSDSFIREFIADYKEDMDWKDLYDAYGEDRARFTDIMNQKAEKLAKRFSDSFNEYINTFLKANGINDKKSKWSDSGYVDVVLPLYVSIHPDFSNDKYERAVASLLHCSNSLFKKYTTSYARIIAGTKKGSFADRSMENFQTACANSVMFDLISRNLSSVGSHDAFKEVFADAPLNMNEYLSQKGISRYNEFVGDSFDESGQVIRYGVNHYINEWNQTHPDERMPKMHKLKKQILSIVEPSFRIRTINDETELFGTFDNIRTAEQRYAGMLESILENMNTADIYDKSGILVTSAERDSLANAITGEWSYFRRQIKEEEENRIREEYLQKKNRVKTKLTQKDNKQIEDALNKSIYSVADLNKMLGSDFGTIEEKLLDEYIRNKSKKESAYAQLVKTDFYDKKTIPAGDDVQRIQQYLDKVLSLTHIVRGLCADSQDPRTDFVFSDDVSSLEDDRVQIISCYNLIRNFVTKKREKTAKEKQIQLCFGRPAHFEQVWNNKQEGKFGNVDAALLEYAGKYYYMVPAAKNEAKLNFPVTDEPQMGECYNYLATKKAIGFAKAFAKFYIKSPEAMEGFEKTEEPFEISVGNDTMIISRKVYEDYEAKTFRESEEAKNKLIDCAKEFLSKNLSYCIYDWSVLKEANDYVNYGEFCNEVDSIAFRVINRYVSKKLVDDAVERGNLYMFEISSLDMYKDSSRMKNIMALRFNQIMNGMFTGDKSIIINNAPQIRYRPVVIEKKDVHPVGSRLVNKNTTDGRTIPGDVYLELCAYYNGKKDSLSPEASLYNEKVSVKDSDRAHIKDKHYTEEKFLITFSYTANKNVASATSGYQLNEMVRKEIRENGCNIMAVIRGIDNLLYYAVVDENGNRIEAGDLNVVGDTDFYEKLTILGKQRYTDQKNWKHENKVADLKDTYLGQVCRKIASIAVKNNAVIVIDKINESTKRKNAAFDNNMYRKFENALVNSLTDYYDIGIRGDEPGSVKNPLQLTVKEDNGFQNGIIFYQFDTFTKNICMRTGFVNLLNTFEIKTVASKVAFLKKLSDIYYDNDINEFVFEFTWRNIGCILKDEELPLYDGMDKIWKVRTHFTRYMRNAEKNKYVEIDGTEVLKELIRKNHPDMIGGKIDVDRLTSEEVKKVFEIFTLYTNGYIPRMDDAESGYMSPACDWNNFGTIRYDEMTALQLAKKSSLMIGKVKSGKDWKDMNVSRVEWLNHVLKADW

SEQ ID NO: 824 - protein, 1259 aa, unidentified
  REGION 1..1259: note = Cas Enzyme sequence
MDFTKFQKLNSIIKTCSFEMIPIGKTRETMEKHNVIEEDAERKSNAELTKEVSDSFIREFIADYKEDMDWKDLYDAYGEDRARFTDIMNQKAEKLAKRFSDSFNEYINTFLKANGIKDKKSKWSDSGYVDVVLPLYVSIHPDFSSDKYERAVASLLHCSNSLFKKYTTSYARIIAGTKKGSFADRSMENFQTVCANSVMFDLISRNLSSVECHDTFKEVFADAPLNMNEYLSQKGISRYNEFVGDSFDESGQVIRYGVNHYINEWNQTHPDERMPKMHKLKKQILSIVEPSFRIRTINDETELFGTFDNIRTAEQRYAGMLESILENMNTADIYDKSGILVTSAERDSLANAITGEWSYFRRQIKEEEENRIREEYLQKKNRVKTKLTQKDNKQIEDALNKSIYSVADLNKMLGSDFGTIEEKLLDEYIRNKSKKESAYAQLVKTDFYDKKTIPAGDDVQRIQQYLDKVLSLTHIVRGLCADSQDPRTDFVFSDDVSSLEDDRVQIVTCYNLIRNFVTKKREKTAKEKQIQLCFGRPAHFEQVWNNKQEGKFGNVDAALLEYAGKYYYMVPAAKNEAKLNFPVTDEPQRGECYNYLATKKAIGFAKAFAKFYIKSPEAMEGFEKTEEPFEISVGNDTMIISRKVYEDYEAKTFRESEEAKNKLIDCAKEFLSKNLSYCIYDWSVLKEANDYVNYGEFCNEVDSIAFRVINRYVSKKLVDDAVERGNLYMFEISSLDMYKDSSRMKNIMALRFNQIMNGMFTGDKSIIINNAPQIRYRPVVIEKKDVHPVGSRLVNKNTTDGRTIPGDVYLELCAYYNGKKDSLSPEASLYNEKVSVKDSDRAHIKDKHYTEEKFLITFSYTANKNVASATSGYQLNEMVRKEIRENGCNIMAVIRGIDNLLYYAVVDENGNRIEAGDLNVVGDTDFYEKLTILGKQRYTDQKNWKHENKVADLKDTYLGQVCRKIASIAVKNNAVIVIDKINESTKRKNAAFDNNMYRKFENALVNSLTDYYDIGIRGDEPGSVKNPLQLTVKEDNGFQNGIIFYQFDTFTKNICMRTGFVNLLNTFEIKTVASKVAFLKKLSGIYYDNDINEFVFEFTWRNIGCILKDEELSLYDGMDKIWKVRTHFTRYMRNAEKNKYVEIDGTEVLKELIRKNHPDMIGGKIDVDRLTSEEVKKVFEIFTLYTNGYIPRMDDAESGYMSPACDWNNFGTIRYDEMTALQLAKKSSLMIGKVKSGKDWKDMNVSRVEWLNHVLKADW

SEQ ID NO: 825 - protein, 1259 aa, unidentified
  REGION 1..1259: note = Cas Enzyme sequence
MDFTKFQKLNSIIKTCSFEMIPIGKTRETMEKHNVIEEDAERKSNAELTKEVSDSFIREFIADYKEDMDWKDLYDAYGEDRARFTDIMNQKAEKLAKRFSDSFNEYINTFLKANGINDKKSKWSDSGYVDVVLPLYVSIHPDFSNDKYERAVASLLHCSNSLFKKYTTSYARIIAGTKKGSFADRSMENFQTACANSVMFDLISRNLSSVGSHDAFKEVFADAPLNMNEYLSQKGISRYNEFVGDSFDESGQVIRYGVNHYINEWNQTHPDERMPKMHKLKKQILSIVEPSFRIRTINDETELFGTFDNIRTAEQRYAGMLESILENMNTADIYDKSGILVTSAERDSLANAITGEWSYFRRQIKEEEENRIREEYLQKKNRVKTKLTQKDNKQIEDALNKSIYSVADLNKMLGSDFGTIEEKLLDEYIRNKSKKESAYAQLVKTDFYDKKTIPAGDDVQRIQQYLDKVLSLTHIVRGLCADSQNPRTDFVFSDDVSSLEDDRVQIISCYNLIRNFVTKKREKTAKEKQIQLCFGRPAHFEQVWNNKQEGKFGNVDAALLEYAGKYYYMVPAAKNEAKLNFPVTDEPQMGECYNYLATKKAIGFAKAFAKFYIKSPEAMEGFEKTEEPFEISVGNDTMIISRKVYEDYEAKTFRESEEAKNKLIDCAKEFLSKNLSYCIYDWSVLKEANDYVNYGEFCNEVDSIAFRVINRYVSKKLVDDAVERGNLYMFEISSLDMYKDSSRMKNIMALRFNQIMNGMFTGDKSIIINNAPQIRYRPVVIEKKDVHPVGSRLVNKNTTDGRTIPGDVYLELCAYYNGKKDSLSPETSLYNEKVSVKDSDRAHIKDKHYTEEKFLITFSYTANKNVASATSGYQLNEMVRKEIRENGCNIMAVIRGIDNLLYYAVVDENGNRIEAGDLNVVGDTDFYEKLTILGKQRYTDQKNWKHENKVADLKDTYLGQVCRKIASIAVKNNAVIVIDKINESTKRKNAAFDNNMYRKFENALVNSLTDYYDIGIRGDEPGSVKNPLQLTVKEDNGFQNGIIFYQFDTFTKNICMRTGFVNLLNTFEIKTVASKVAFLKKLSGIYYDNDINEFVFEFTWRNIGCILKDEELPLYDGMDKIWKVRTHFTRYMRNAEKNKYVEIDGTEVLKELIRKNHPDMIGGKIDVDRLTSEEVKKVFEIFTLYTNGYIPRMDDAESGYMSPACDWNNFGTIRYDEMTALQLAKKSSLMIGKVKSGKDWKDMNVSRVEWLNHVLKADW

SEQ ID NO: 826 - protein, 1259 aa, unidentified
  REGION 1..1259: note = Cas Enzyme sequence
MESNNKIFTETIGTSSIAKTMRNSLVPTESTKRNIEKNGIIIDDQLRAEKRQQLKEIMDEYYRAYIDSKLSNVALTRTIDWKELFQAIENNYKQNTTKTKNELEKKQKEKRTEIYKILSDDEEFKQLFNAKLLTNILPEFIKNQNIDNEEKQEKISTVELFQRFTSSFTDFFKNRKNVFSKDEISTSICYRVVQENAWIFYQNLLAFEEIKKTAEQEIKKIEAENRDSISDYSLKEIFDFDFYGLLLNQGGIRFYNDVCGKINYHMNLYGQKHNIKSNKFKMKRMHKQILSIDESTFEVPTMFENDKEVYQVLNEFLSDLASKKILERVEKIGENVSEYEINKIYIQSKNFENFSSFMCGNWQIINDSLKTYYNEKIKSKGKAKVEKVKKAIKAIEYKSLADINQLVERYNHDELNRKAEEYISAINEKIKDLYVNEIEFDEKTNLIENETKSEEIKSKLDSIMEIMHWTKMFIIEEEIEKDVNFYNEIEEIYDELQPLVTIYNRIRNYVTQKPYSEEKIKLNFGIPTLANGWSKTKEYDNNAIIMIRDGKYYLGIFNAKNKPDKKIMEGHQSEENGDYKKMIYRLLPGPNKMLPKVFMSKTGIAEYKPSQYILECYEQNKHIKSDKNFDIKFCRDLIDFFKTSINRHPEWSKFNFKFSETSEYEDISTFYREVEKQGYKIEWTYISEKEIKELDENGQLYLFQIYNKDFSEKSKGKENLHTMYLKNLFSEENLKNIVLKLNGEAEVFFRKSSIKKPIIHKKGSVLVNKTYNENGERKSIPEEQYTEIYKYLNSIGTNELSEKSKKLMEEGKVEYYKANYDIVKDYRYSVDKFFIHLPMTINFKAAGFSPINNIALKSIALKEDMHIIGIDRGERNLIYVSVIDTKGNIVEQRNFNIVNGIDYKEKLKQKELDRDNARKNWKEIGKIKDLKEGYLSLVVHEIAKLVVKYNAIITMEDLNQGFKRGRFKVERQVYQKFETMLINKLNYLVDKDLAVDQEGGLLRGYQLTYIPESLKVLGRQCGYIFYVPAAYTSKIDPTTGFVAIFNYKGMTDKDFVTSFDSIKYDDERGLFAFEFDYENFVTHKVEMARNKWTVYTYGERIKRKFKNGLWDTAEKVDLTYQMRSILEKYEIEYNKGQDILEQIEELDEKAQNGICKEIKYLVKDIVQMRNSLPDNAVEDYDAIISPVINNNGEFFDSTRGDEDKPLDADANGAYCIALKGLYEVMQIKKNWNEETEFPRKELKIRHQDWFDFIQNKRYL

SEQ ID NO: 827 - protein, 1259 aa, unidentified
  REGION 1..1259: note = Cas Enzyme sequence
MESNNKIFTETIGTSSIAKTMRNSLVPTESTKRNIEKNGIIIDDQLRAEKRQQLKEIMDEYYRAYIDSKLSNVALTRTIDWKELFQAIENNYKQNTTKTKNELEKKQKEKRTEIYKILSDDEEFKQLFNAKLLTNILPEFIKNQNIDNEEKQEKISTVELFQRFTSSFTDFFKNRKNVFSKDEISTSICYRVVQENAWIFYQNLLAFEEIKKTAEQEIKKIEAENRDSISDYSLKEIFDFDFYGLLLNQGGIRFYNDVCGKINYHMNLYGQKHNIKSNKFKMKRMHKQILSIDESTFEVPTMFENDKEVYQVLNEFLSDLASKKILERVEKIGENVSEYEINKIYIQSKNFENFSSFMCGNWQIINDSLKTYYNEKIKSKGKAKEEKVKKAIKAIEYKSLADINQLVERYNHDELNRKAEEYISAINEKIKDLYVNEIEFDEKTNLIENETKSEEIKSKLDSIMEIMHWTKMFIIEEEIEKDVNFYNEIEEIYDELQPLVTIYNRIRNYVTQKPYSEEKIKLNFGIPTLANGWSKTKEYDNNAIIMIRDGKYYLGIFNAKNKPDKKIMEGHQSEENGDYKKMIYRLLPGPNKMLPKVFMSKTGIAEYKPSQYILECYEQNKHIKSDKNFDIKFCRDLIDFFKTSINRHPEWSKFNFKFSETSEYEDISTFYREVEKQGYKIEWTYISEKEIKELDENGQLYLFQIYNKDFSEKSKGKENLHTMYLKNLFSEENLKNIVLKLNGEAEVFFRKSSIKKPIIHKKGSVLVNKTYNENGERKSIPEEQYTEIYKYLNSIGTNELSEKSKKLMEEGKVEYYKANYDIVKDYRYSVDKFFIHLPMTINFKAAGFSPINNIALKSIALKEDMHIIGIDRGERNLIYVSVIDTKGNIVEQRNFNIVNGIDYKEKLKQKELDRDNARKNWKEIGKIKDLKEGYLSLVVHEIAKLVVKYNAIITMEDLNQGFKRGRFKVERQVYQKFETMLINKLNYLVDKDLAVDQEGGLLRGYQLTYIPESLKVLGRQCGYIFYVPAAYTSKIDPTTGFVAIFNYKGMTDKDFVTSFDSIKYDDERGLFAFEFDYENFVTHKVEMARNKWTVYTYGERIKRKFKNGLWDTAEKVDLTYQMRSILEKYEIEYNKGQDILEQIEELDEKAQNGICKEIKYLVKDIVQMRNSLPDNAVEDYDAIISPVINNNGEFFDSTRGDEDKPLDADANGAYCIALKGLYEVMQIKKNWNEETEFPRKELKIRHQDWFDFIQNKRYL

SEQ ID NO: 828 - protein, 1259 aa, unidentified
  REGION 1..1259: note = Cas Enzyme sequence
MESNNKIFTETIGTSSIAKTMRNSLVPTESTKRNIEKNGIIIDDQLRAEKRQQLKEIMDEYYRTYIDNKLSNVALTRTIDWKELFQAIEDNYKQNTTKTKNELEKKQKEKRTEIYKILSDDEKFKQLFNAKLLTNVLPEFIKNQNIDNEEKQEKISTVELFQRFTSSFTDFFKNRKNVFSKDEISTSICYRVVQENAWIFYQNLLAFEEIKKTAEQEIEKIEAENRDSISDYSLKEIFDFDFYGLLLNQGGIRFYNDVCGKINYHMNLYGQKHNIKSNKFKMKRMHKQILSIDESTFEVPTMFENDKEVYQVLNEFLSDLASKKILERVEKIGENVSEYEINKIYIQSKNFEKFSSFMCGNWQIINDSLKTYYNEKIKSKGKAKEEKVKKAIKAIEYKSLADINQLVERYNNDELNRKAEEYISAINEKIKDLDVNEIEYDEKINLIENETKSEEIKSKLDSIMEIMHWTKMFIIEEEIEKDVNFYNEIEEIYDELQPLVTIYNRIRNYVTQKPYSEEKIKLNFGIPTLANGWSKTKEYDNNAIIMIRDGKYYLGIFNAKNKPDKKIMEGHQSEENGDYKKMIYRLLPGPNKMLPKVFMSKTGIAEYKPSQYILECYEQNKHIKSDKNFDIKFCRDLIDFFKTSINRHPEWSKFNFKFSETSEYEDISTFYREVEKQGYKIEWTYISEKEIKELDENGQLYLFQIYNKDFSEKSKGKENLHTMYLKNLFSEENLKNIVLKLNGEAEVFFRKSSIKKPIIHKKGSVLVNKTYNENGERKSIPEEQYTEIYKYLNSIGTNELSEKSKKLMEEGKVEYYKANYDIVKDYRYSVDKFFIHLPMTINFKAAGFSPINNIALKNIALKDDMHIIGIDRGERNLIYVSVIDTKGNIVEQRNFNIVNGIDYKEKLKQKELDRDNARKNWKEIGKIKDLKEGYLSLVVHEIAKLVVKYNAIITMEDLNQGFKRGRFKVERQVYQKFETMLINKLNYLVDKDLAVDQEGGLLRGYQLTYIPESLKVLGRQCGYIFYVPAAYTSKIDPTTGFVAIFNYKGMTDKDFVTSFDSIKYDDERGLFAFEFDYENFVTHKVEMARNKWTVYTYGERIKRKFKNGSWDTAEKVDLTYQMRSILEKYEIEYNKGQDILEQIEELDEKAQNGICKEIKYLVKDIVQMRNSLPDNAAEDYDAIISPVINNNGEFFDSTRGDEDKPLDADANGAYCIALKGLYEVMQIKKNWNEETEFPRKELKIRHQDWFDFIQNKRYL

SEQ ID NO: 829 - protein, 1259 aa, unidentified
  REGION 1..1259: note = Cas Enzyme sequence
MESNNKIFTETIGTSSIAKTMRNSLVPTESTKRNIEKNGIIIDDQLRAEKRQQLKEIMDEYYRTYIDNKLSNVALTRTIDWKELFQAIEDNYKQNTTKTKNELEKKQKEKRTKIYKILSDDEEFKQLFNAKLLTNVLPEFIKNQNIDNEEKQEKISTVELFQRFTSSFTDFFKNRKNVFSKDEISTSICYRVVQENAWIFYQNLLAFEEIKKTAEQEIEKIEAENRDSISDYSLKEIFDFDFYGLLLNQGGIRFYNDVCGKINYHMNLYGQKHNIKSNKFKMKRMHKQILSIDESTFEVPTMFENDKEVYQVLNEFLSDLASKKILERVKKIGENVSEYEINKIYIQSKNFENFSSFMCGNWQIINDSLKAYYNETIKSKGKAKEEKVKKAIKAIEYKSLADIDELVEKYNKDELNRKAEEYIYAINEKIKDLYVNEIEYDEKINLIENETKSEEIKSKLDSIMEIMHWTKMFIIEEEIEKDVNFYNEIEEIYDELQPLVTIYNRIRNYVTQKPYSEEKIKLNFGIPTLANGWTKTKEYDNNAIIMIRDGKYYLGIFNAKNKPDKKIMGGHQSEENGDYKKMIYRLLPGPNKMLPKVFMSKTGIAEYKPSQYILECYEQNKHIKSDKNFDIKFCRDLIDFFKTSINRHPEWSKFNFKFSETSEYEDISTFYREVEKQGYKIEWTYISEKEIKELDENGQLYLFQIYNKDFSEKSKGKENLHTMYLKNLFSEENLKNIVLKLNGEAEVFFRKSSIKKPIIHKKGSVLVNKTYNENGERKSIPEEQYTEIYKYLNSIGTNELSEKSKKLMEEGKVEYYKANYDIVKDYRYSVDKFFIHLPMTINFKAAGFSPINNIALKNIALKDDMHIIGIDRGERNLIYVSVIDTKGNIVEQRNFNIVNGIDYKEKLKQKELDRDNARKNWKEIGKIKDLKEGYLSLVVHEIAKLVVKYNAIITMEDLNQGFKRGRFKVERQVYQKFETMLINKLNYLVDKDLAVDQEGGLLRGYQLTYIPESLKVLGRQCGYIFYVPAAYTSKIDPTTGFVAIFNYKGMTDKDFVTSFDSIKYDDERGLFAFEFDYENFVTHKVEMARNKWTVYTYGERIKRKFKNGLWDTAEKVDLTYQMRNILEKYEIEYNKGQDILEQIEELDEKAQNGICKEIKYLVKDIVQMRNSLPDNAAEDYDVIISPVINNNGEFFDSTRGDEDKPLDADANGAYCIALKGLYEVMQIKKNWNEETEFPRKELKIRHQDWFDFIQNKRYL

SEQ ID NO: 830 - protein, 1259 aa, unidentified
  REGION 1..1259: note = Cas Enzyme sequence
MESNNKIFTETIGTSSIAKTMRNSLVPTESTKRNIEKNGIIIDDQLRAEKRQQLKEIMDEYYRAYIDSKLSNVALTRTIDWKELFQAIENNYKQNTTKTKNELEKKQKEKRTEIYKILSDDEKFKQLFNAKLLTNVLPEFIKNQNIDNEEKQEKISTVELFQRFTSSFTDFFKNRKNVFSKDEISTSICYRVVQENAWIFYQNLLAFEEIKKTAEQEIEKIEAENRDSISDYSLKEIFDFDFYGLLLNQGGIRFYNDVCGKINYHMNLYGQKHNIKSNKFKMKRMHKQILSIDESTFEVPTMFENDKEVYQVLNEFLSDLASKKILERVEKIGENVSEYEINKIYIQSKNFENFSSFMCGNWQIINDSLKTYYNEKIKSKGKAKEEKVKKAIKAIEYKSLADINQLVERYNNDELNRKAEEYISAINEKIKDLDVNEIEYDEKINLIENETKSEEIKSKLDSIMEIMHWTKMFIIEEEIEKDVNFYNEIEEIYDELQPLVTIYNRIRNYVTQKPYSEEKIKLNFGIPTLANGWSKTKEYDNNAIIMIRDGKYYLGIFNAKNKPDKKIMEGHQSEENGDYKKMIYRLLPGPNKMLPKVFMSKTGIAEYKPSQYILECYEQNKHIKSDKNFDIKFCRDLIDFFKTSINRHPEWSKFNFKFSETSEYEDISTFYREVEKQGYKIEWTYISEKEIKELDENGQLYLFQIYNKDFSEKSKGKENLHTMYLKNLFSEENLKNIVLKLNGEAEVFFRKSSIKKPIIHKKGSVLVNKTYNENGERKSIPEEQYTEIYKYLNSIGTNELSEKSKKLMEEGKVEYYKANYDIVKDYRYSVDKFFIHLPMTINFKAAGFSPINNIALKNIALKDDMHIIGIDRGERNLIYVSVIDTKGNIVEQRNFNIVNGIDYKEKLKQKELDRDNARKNWKEIGKIKDLKEGYLSLVVHEIAKLVVKYNAIITMEDLNQGFKRGRFKVERQVYQKFETMLINKLNYLVDKDLAVDQEGGLLRGYQLTYIPESLKVLGRQCGYIFYVPAAYTSKIDPTTGFVAIFNYKGMTDKDFVTSFDSIKYDDERGLFAFEFDYENFVTHKVEMARNKWTVYTYGERIKRKFKNGLWDTAEKVDLTYQMRSILEKYEIEYNKGQDILEQIEELDEKAQNGICKEIKYLVKDIVQMRNSLPDNAVEDYDAIISPVINNNGEFFDSTRGDEDKPLDADANGAYCIALKGLYEVMQIKKNWNEETEFPRKELKIRHQDWFDFIQNKRYL

SEQ ID NO: 831 - protein, 1259 aa, unidentified
  REGION 1..1259: note = Cas Enzyme sequence
MTNYKNRKIMQYSDFSNIYSQSITLRFGLIPQGETLQHIQENGLLEQDARRAEDYVKVKKLIDEYHKTFIERVLKGFKLKVDEDGGKDSLEEYFLYYNKGKKEDKQIATFEKVQENLRKSIADRLAKDTNFSRINKKELIKEDLLNTDLMRQLTEEEQALVKEFSDFTTYFTGFNQNRQNMYSAEKKSTAISYRLIHENLPKFIDNMKTFDIVANSEVAVQFDNLYQKLETYLNVEKLSEMFCLSYFNVVLTQTQIEVYNAIIGGKSLDDGSRIQGLNELVNLYNQKHKDAKLPKFKLLYKQILSDREAVSWLPEKFEKDNELLSSIQKAYQELSGIILGDSNLKNLLLNIASYDLNRIYISNDTQFTQISQRLFKDWGALHRVILEDLKSTVARGKKESESDYLDRLDKLVKKSESYSIGYLNQCIDKSELPDKPHVETYFTSLGAVHEETEQCANLFTQISIYYMEAQKLLTQEYPTQSNLAQDKQAVDKIKNLLDALKSLQHFVKPLLGNGDEPDKEERFYGELDSLWQEMEQITPLYNKVRNYLTRKPYSTGKIKLNFENSTLMDGWDLNKEPDNTTVILRKDGLYYLAIMNKAYNRVFKADILPDNGECFEKMEYKLLPGANKMLPKVFFSKSRIKEFAPSEKLLQHYADGTHKKGPNFSKADCHELIDFFKASIQKHEDWSKFNFQFSDTSTYEDLSGFYREVEQQGFKISFRSVSVSYVKKLVEEGKIYLFQIYNKDFSPSSKGKPNLHTLYWRMVFDERNLKDVVYKLNGQAEVFFRQASLTNDLTVHPAHQPIANKNPNNPKKTSTFEYDLIKNRRYTVDHFQFHVPITMNFKATGNSMINPQVYQYLKETKDTYVIGIDRGERHLLYLTLIDPQGRIVKQCSLNEMVNEYQNVVRKTNYHDLLDAREAERKQARQSWMTIENIKELKEGYLSQVVHLISQMMVKYKAIVVMEDLNMGFKRGRQKVEKQVYQKFEKMLIDKLNYLVDKDTDAEAAGGLLHAYQLTNKFESFQRMGKQSGFLFYVPAWNTSKMDPTTGFVNLLDTRYESVASSLSFFRRFKQIRYNEDKDWFEFKLDYNDFDKRAEGTRTEWMLCTQGERIITFRNKAKNSEWDSKSVRLTEEFKKFFYQYDVDIHGNLMDTILERTDKSFFEGLYALLKLTLQMRNSITGTDVDYLISPVMNAKGTFYDSRQSGSQLPENADANGAYNIALKGLWVLKQIWESKELKEVKLAITNKEWLQFAQEKPFLKY

SEQ ID NO: 832 - protein, 1259 aa, unidentified
  REGION 1..1259: note = Cas Enzyme sequence
MNQNTSFSQFIGLYPVSKTLRFELKPIGKTLENVQNKGIIEQDEAKSLKYVEAKQIIDQYHKYFIGEALEGVNLDWNPLQKAFEDYLTNRNAPAKKNLEKTQESFRKEIAKKLSEHKHFKELTAATPKELFEKILPEHNGKQEAIEAFAKFSTYFKGFQENRENIYSSDAISTGVPFRIVHDNFPKFLSSIQVFQNIKENCPCVLDDAEKELQELLKSQKLIDVFNINYFNNVISQDGIDFFNQVIGGYTTPNGTKVRGINEFANLYRQQNPEFAKKHIATKMIPLYKQILSDRESMSFVLESFNKDTDVQDGVKEFFEHHLLRCNMDGNEINVLEKIGELILGLKNYDSLNKIFVSRDSLSSISQKLFDNWNTLNNYLFNYWENKIGSVEKASNKKRIDAKLKEDYFSIEELNEVLKFNESDANICDFWTDYTSQANSVLSGEIKKNYEEFLAADYSNKALRENEADVQKLKDFLDAIVNILHLVKPLMMDSDQGEPSFYNELNPLYNQLSSIIPLYNKTRNYITQKISDSTKKFKLNFENPTLADGWDQNKEEANTSIILKKDEKFYLGIMNAKDKPKIGIYKVKPEEPHYDKMVYKLLPGPNKMLPKVFFSAKGKEIYKPSKEIQDGYAAGKHKKGDSFDKQFCHHLIDFFKEGISNHPDWKNFNFKFSETSSYEDISAFYNEVSDQGYKLSFFPIPDSQIDTWVNEGKLFLFQIYNKDFAPGAKGKPNLHTLYWKATFSPENLKDIVFKLNGEAELFYRRSSIKKPYSHKIGEKMVNRITKDGRPIPDAIFGELFRYFNNSSKTSLSDEAKKYLDFVTVKDVKHEIIKDKRYTEDKFEFHVPITINFKADDGSRYINDQVKDFLKNNSDVNIIGIDRGERNLIYMTLINQKGEILIQKSFNLVGNIDYHEKLSIREQERKVARESWRSIGKIKDLKEGYLSLVIHEIAKTMVENNAIVVLEDLNLGFKRGRFCVEKQVYQKFEKMLIDKLNYLVFKDRMDSECGGVLKGFQLTRKFDSFQELSKLKQSGFLFYVPAAYTSKIDPTTGFANLFNMKNLSSAEKMKNFLLAFDDISYDLKNDAFVFSFDYENKEYKLSQTSFQKKWSAFTVGKRIVYNRGEDKCDVIEPTLIIKEALESKGVKCSDQLDVKSALENIEPSRENAAFFKSICYAFEKTLQMRNSNSNTDYILSPIMNKTGGFFDSRKCDKTLPIDADANGSYHIALKGLYLIENLSKGEKDLKISNEKWFEFVQSRNK

SEQ ID NO: 833 - protein, 1259 aa, unidentified
  REGION 1..1259: note = Cas Enzyme sequence
MKNILKPFTNKYSLSKTLRFELKPVGATLTNIEKKGLVSEDENLAVSYKKLKKVIDEYHKDFIGLALKDLKLNILDDYSDLYYKTIKDEIDKKRFIELQLNLRKQIVDSFSKNASDEIKNKFDRLFKKELIQIDLIEWLKSKNDFETIELVEKFKTFTTYFNGFNENRKNMYSVDEHSTAIAYRLIHENLPKFLDNLKAYRFIKKSYLDFDFNKIEKELELISVSFDSIFDVNGFNQTLTQNGIDFYNTMLGGLTEGHGKKKIKGLNEFINLYKQEKHLKSKEIPSLKVLFKQILSDRESVSFLQDEFIDDSDVLNSIEVFYREEIKEKVIDGNTINILETIDSVLKEIESFDTSKIYLRNDTSLTDISQRLYGSWSVVKNALSHYFEEIVKPLNGKKRTEKYDKELEQWLGKQNQQFSIKFLQDVCTSYFSSQDEKPLNVNGKEWLEYFKNTGSISNDVNSISFIKRIETAYSAIESFLNVELNSSNRKLVQEQVKVDLLKLFLDEIVTFLHFIKPITLKDSSIEKDDVFYSVLEGLYNQLDFVTPLYNKTRNYLTKKAYSLEKVKLNFQNAQLLNGWDVNKETDNTSILFRKEGLYYLCVMDKKHNKVFKSPNDFPKNEEEYYEKVNYKLLPGANKMLPKVFFSNKSIEYYAPSFELLEKYKNETHKKGETFNLNDCHDLIDFFKESINKHPDWKNFNYQFSETSSYEDLSGFYREVEHQGYKITFQNIATSYIDDLINEGKIYLFQIYNKDFSPFSKGKPNMHTLYWRALFDENNLKDVIYKLNGEAEIFYRKKSLEYSDDIWLKGHHANDLKDKFDYPIVKDKRFALDSFHFHVPITMNFKANEGNNFNGQVNEFLKNNKDINIIGIDRGERHLLYLTLINQRGEIIIQKSLNTITNKVKDELVSVDYHKRLDDREKNRNNARKTWGTIETIKELKEGYLSLVIHEVAKMMVENNAVVVLEDLNFGFKRGRQKVEKQVYQKFEKMLIDKLNYLIFKDRKDDEIGGVFNALQLTSKFESFQKLGKQSGFLFYIPAALTSKIDPATGFVNFMDTKYYSVEKSKEFFGKFSNIQYNIDKDYFEFEFDYNSFTTKAEGTKTKWKVCTSGDERWRYNPTTKNSERVNVTAELKTLFEKNQIIFKNGNDLKSYIIEKDEKGIYSTLLHLLGLTLSLRHSESGTENDFILSPVFNDSEVFFDSRKATEKSPKDSDANGAYHIALKGLWALRQIDSCDDWKKLKLAISNKEWLDFVQKRPFEK

SEQ ID NO: 834 - protein, 1259 aa, unidentified
  REGION 1..1259: note = Cas Enzyme sequence
MKNILKPFTNKYSLSKTLRFELKPVGATLTNIEKKGLVSEDENLAVSYKKLKKVIDEYHKDFIGLALKDLKLNILDDYSDLYYKTIKDEIDKKRFIELQLNLRKQIVDSFSKNASDEIKNKFDRLFKKELIQIDLIEWLKSKNDFETIELVEKFKTFTTYFNGFNENRKNMYSVDEHSTAIAYRLIHENLPKFLDNLKAYRFIKKSYLDFDFNKIEKELELISVSFDSIFDVNGFNQTLTQNGIDFYNTMLGGLTEGHGKKKIKGLNEFINLYKQEKHLKSKEIPSLKVLFKQILSDRESVSFLQDEFIDDSDVLNSIEVFYREEIKEKVIDGNTINILETIDSVLKEIESFDTSKIYLRNDTSLTDISQRLYGSWSVVKNALSHYFEEIVKPLNGKKRTEKYDKELEQWLGKQNQQFSIKFLQDVCTSYFSSQDEKPLNVNGKEWLEYFKNTGSISNDVNSISFIKRIETAYSAIESFLNVELNSSNRKLVQEQVKVDLLKLFLDEIVTFLHFIKPITLKDSSIEKDDVFYSVLEGLYNQLDFVTPLYNKTRNYLTKKAYSLEKVKLNFQNAQLLNGWDVNKETDNTSILFRKEGLYYLCVMDKKHNKVFKSPNDFPKNEEEYYEKVNYKLLPGANKMLPKVFFSNKSIEYYAPSFELLEKYKNETHKKGETFNLNDCHDLIDFFKESINKHPDWKNFNYQFSETSSYEDLSGFYREVEHQGYKITFQNIATSYIDDLINEGKIYLFQIYNKDFSPFSKGKPNMHTLYWRALFDENNLKDVIYKLNGEAEIFYRKKSLEYSDDIWLKGHHANDLKGKFDYPIVKDKRFALDSFHFHVPITMNFKANEGNNFNGQVNEFLKNNKDINIIGIDRGERHLLYLTLINQRGEIIIQKSLNTITNKVKDELVSVDYHKRLDDREKNRNNARKTWGTIETIKELKEGYLSLVIHEVAKMMVENNAVVVLEDLNFGFKRGRQKVEKQVYQKFEKMLIDKLNYLIFKDRKDDEIGGVFNALQLTSKFESFQKLGKQSGFLFYIPAALTSKIDPATGFVNFMDTKYYSVEKSKEFFGKFSNIQYNIDKDYFEFEFDYNSFTTKAEGTKTKWKVCTSGDERWRYNPTTKNSERVNVTAELKTLFEKNQIIFKNGNDLKSYIIEKDEKGIYSTLLHLLGLTLSLRHSESGTENDFILSPVFNDSEVFFDSRKATEKSPKDSDANGAYHIALKGLWALRQIDSCDDWKKLKLAISNKEWLDFVQKRPFEK

SEQ ID NO: 835 - protein, 1259 aa, unidentified
  REGION 1..1259: note = Cas Enzyme sequence
MTNYKNRKIMQYSDFSNIYSQSITLRFGLIPQGETLQHIQENGLLEQDARRAEDYVKVKKLIDEYHKTFIERVLKGFKLKVDEDGGKDSLEEYFLYYNKGKKEDKQIATFEKVQENLRKSIADRLAKDTNFSRINKKELIKEDLLNTDLMRQLTEEEQALVKEFSDFTTYFTGFNQNRQNMYSAEKKSTAISYRLIHENLPKFIDNMKTFDIVANSEVAVQFDNLYQKMETYLNVEKLSEMFCLSYFNVVLTQTQIEVYNAIIGGKSLDDGSRIQGLNELVNLYNQKHKDAKLPKFKLLYKQILSDREAVSWLPEKFEKDNELLSSIQKAYQELSGIILGDSNLKNLLLNIASYDLNRIYISNDTQFTQISQRLFKDWGALHRVILEDLKSTVARGKKESESDYLDRLDKLVKKSESYSIGYLNQCIDKSELPDKPHVETYFTSLGAVHEETEQCANLFTQISIYYMEAQKLLTQEYPTQSNLAQDKQAVDKIKNLLDALKSLQHFVKPLLGNGDEPDKEERFYGELDSLWQEMEQITPLYNKVRNYLTRKPYSTGKIKLNFENSTLMDGWDLNKEPDNTTVILRKDGLYYLAIMNKAYNRVFKADILPDNGECFEKMEYKLLPGANKMLPKVFFSKSRIKEFAPSEKLLQHYADGTHKKGPNFSKADCHELIDFFKASIQKHEDWSKFNFQFSDTSTYEDLSGFYREVEQQGFKISFRSVSVSYVKKLVEEGKIYLFQIYNKDFSPSSKGKPNLHTLYWRMVFDERNLKDVVYKLNGQAEVFFRQASLTNDLTVHPAHQPIANKNPNNPKKTSTFEYDLIKNRRYTVDHFQFHVPITMNFKATGNSMINPQVYQYLKETKDTYVIGIDRGERHLLYLTLIDPQGRIVKQCSLNEMVNEYQNVVRKTNYHDLLDAREAERKQARQSWMTIENIKELKEGYLSQVVHLISQMMVKYKAIVVMEDLNMGFKRGRQKVEKQVYQKFEKMLIDKLNYLVDKDTDAEAAGGLLHAYQLTNKFESFQRMGKQSGFLFYVPAWNTSKMDPTTGFVNLLDTRYESVASSLSFFRRFKQIRYNEDKDWFEFKLDYNDFDKRAEGTRTEWMLCTQGERIITFRNKAKNSEWDSKSVRLTEEFKKFFYQYDVDIHGNLMDTILERTDKSFFEGLYALLKLTLQMRNSITGTDVDYLISPVMNAKGTFYDSRQSGSQLPENADANGAYNIALKGLWVLKQIWESKELKEVKLAITNKEWLQFAQEKPFLKY

SEQ ID NO: 836 - protein, 1260 aa, unidentified
  REGION 1..1260: note = Cas Enzyme sequence
MNKNKTIFSETIGQTYVSKTLKNTIIPIGATQLNIERNGLITEDKIRSEKRQELKKIMDDYYRYFINNTLSGNLAKTIEWGELFRAIDNNYINNSDKTKNELKNIQKKKRTELNKLFKSNDDYKKMFNAKLLSDILPEFINKQKISNTEKEERLNTVNLFNKFTSSFTDFFINRENIFADDKSTSICYRIVNENAWIFYQNYLIYNKIKEDAEKEIITIENNNVDGLDGFTLNSIFNFDFYGMLMNQKGIRFYNDICGIVNAHMNLYCQKYKKKAAKYRLKRMHKQILSIDESTFEVPKMLESDKEVYDLVNGFLYKLNEKKVLDRIRKISEDVTSYDLNKIYVCEKNYENLSLFMCRNWSVLRDSIKAFYQENTTGSNAGKEKKIEKLMKEDKYRSLQNINELINKYNSNSIERKAEEYIVNINEKLENKELVQLTNKEDISLIEDEESGEELKRVLDLIMSINHWIKMFIIDEEVDKDMAFYTEIEDIYYELEPLKSIYDKVRNYITQKPYSKEKIKLNFGIPTLAKGWSKTKEYDNNAIILIRENKYYIGIFNAKNKPDKTVIEGHKKKNDSDYKKMVYMFLTKPRLMLPKVFLSKKGIATYKTSEYILDGYRKGKHNKSSKNFDVNYCRDLIDYFKDCINKRDEWKGYKFKFSETSTYEDINDFYKEIEKQAYTIQWTYIDEKDIDEMNEKGQLYLFQIYNKDFSEKSTGTKNLHTMYFENLFSEENLKNIVLKLDGNAEVFFRKSSIKQPIIHKKGSILVNKGYNEQKENEERKTIPDEVYTELYKYFNKIGKVKLSNEAKKLIDEDKVEYFTSDYDIVKDYRYTVDKYFLHLPIKINCNAENYSPVNDIALKNIAENNDMHIIGIDRGERNLIYVSVIDLHGNIIEQKNFNIINGVNYKEKLKQRESERDSARKNWKQIGKIKDIKEGYLSLVIHEITSLVLKYNAIIAMEDLNMGFKRGRFKVERQVYQKFENMLISKLNYLVDKNKAVNEEGGVLKGYQMTYIPKSLKELGRQCGYIFYVPAAYTSKIDPTTGFVSVFNYKEMDDEKFVTSFDSIKYDKNRQKFALKFDYTNFITHNVKLAKNEWTIYSNGTRKIRKYRNDKWNSPDNVNLTNEIIKLMEQYNIQYDNEQDILEQVETLETKNKNNFCKEMKKLVKYIVQMRNSLPDNDSIEYDEIISPVLNESGEFYNSEEKNKKLPLDADANGAYCIALKGLYEVKQIKNNWKKGEKFPRKTLKISHNDWFDFIQNKRYL

SEQ ID NO: 837 - protein, 1260 aa, unidentified
  REGION 1..1260: note = Cas Enzyme sequence
MDKNENKKVYNETIGSKSLSKTLRNSLIPVLDTQKNIEKNGIIIEDELRAEKRLELKEIMDDYYRYYIETKLSNIRKINWTPLFEAMKENVKDNTAKNQKELENIQKGKRAEIYEILKEDENFKNMFGAKLVSDILPDFIKSTVSNADEIQKKLDIVRLFNRFMSSFTDYFENRKNVFSKEEKSTSICYRVVNDNAWIFYQNLVAYSKIKEDAPDEINKINENEQTLGEYCIKDIFNYDFYCLLMTQSGIQFYNDVCGVVNSHMNLLCQKDKLNKGKYKMRKLHKQILSIAESNFDVPHMFQSDKEVYDTINTFIKDINDKNVLEKTIELSEKYNEYDLNRIYISNKYFESVSIFMCENWRTLNDAINYYYENNISGKGESKKKKVEKALKGEKCRSLKSINNIIEQYDVKAKKREAEEYIKSIVDKIGNLKISEMTYDEQISLIESEQKAEELKEVLDSLLDILHWTKVFIIEEEVEKDNDFYSELEEISDVLEPLTTIYNRIRNYITQKPYSEEKFKLNFGTPTLANGWSKSKEYDNNAIILIRENKYYLGIFNAKNKPDKKVMEGKKESENKTDYKKMIYMLLPGANKMLPKVFLSKKGIQNFKPSQEILEGYNQKRHIKSNEDFDIEYLHNLIDFFKESIQKHPEWNKFNFSFKETTAYNDISEFYRDVEAQGYKIEWTYISEQNINEMVENNQMYLFQIYNKDFAKESKGTNNLHTMYLKNLFSEENLRDIVLKLNGEAELFYRKSSIKHPVVHKKGSILVNKTYIDKDDKEQKKSIPEKEYQEIYKYLNGMGSRELSDTAKTYLEKADYYEASMDIIKDYRYTVDKYFIHLPMTINYKSTDFISINDIALKYIANRDDMHIIGIDRGERNLVYVSVIDMHGNIIKQKNYNIVNGVDYKSKLKDRENARDKARKDWKEIGKIKELKEGYLSLVVHEIAEMMVEYNAIIVMEDLNNGFKRGRFKVERQVYQKFETMLINKLNYLVDKNKKVDEDGGLLRGYQLTYVPKKLEELGRQCGFIFYVPAAYTSKIDPTTGFVNIFKDVAMNDVEFITKFDSIKYDNVRNMFALNFDYKNFVTHNVTMPKNEWTIYTNGSRIRREYSNGKWNKTREVWLTEKMKEVLDSYRIDYMEGQDVLEQIMNLDDREIKAVCKEVKNLIKLITQMRNSKSDNEDPDYDKIISPVLNDDNKFFDSSDNSNGKWPENADANGAYCIALKGLYEVKKIRENWSDLMDFPRETLKIKHYDWFDFIQNKRYL

SEQ ID NO: 838 - protein, 1260 aa, unidentified
  REGION 1..1260: note = Cas Enzyme sequence
MSNTKDNIFNNFTGIYPINKTLRFELRPVGKTYDLIKDFKNGYVESIVAIDEKRSEARKRIIEIIDEYYEEFINTVLSKKVFYSDDIWQTYTSYKAYKSDKRNKEFVTQKAIMRKKISDAFQNEKTKFNLKDFKDLFGKKSNLKESPLYKWYKNKLDIGEITGEDFEDIIKIITYFIGFTTSLKDYQENRNNLFVAEEQSTAISHRIIDVNMIRYFENCIRFENMKDSELLEDMGKWEKYFVPANYDNFFTQEGIDNYNEIIGRKSKDLYYKGVNQLINEYRQKNKIKNKDMPTMNQLYKQHISKNGDNEINNDFSNEKEMLEQIEQAYITSLDKINRIVSFINENITEGNKIFIRKDFVTNISNRLFGEWNFINNALYSYLSGLSAKNKELFVKQTEEVIKISELQNIIDLYINNLDEDEKEKYLKTDAIYTHFCSFDVCGVQNAYYEAKTVLAVDEINKDREKEEEGAKQISKVKKLLDEILEAVHFYKPLYLYKNGKEIDEIEKDEIFYSEFDYLYSQLMLVTELYDRVRNYLTKKPYSKDKFKIYFNKPTLLDGWDLNKEKNNLSVLLIKDGFYYLGIMDSKYNSVFDVSADDVKINTTELSEEATFLKMEYKQVSGASKMFPKVFFAASNKDMFKPSEEILNIRENKQYLKGANNREAVIKWIDFCKDCLKIHPEWNRYFNFNFRHSDEYENVNSFYEDADTQMYYINFVKFKETYINDLVEEGKLFLFQIYNKDFSEYSKGKPNLHTVYWKMLFDENNVRNINDNTGKPVFKLNGEAEIFYRKASLDKKVTHKKNYPIKNKNKHNNKTESIFEYDLYKDKRFMDDKFFFHCPITINYRAKNILSSEFNKKFNLHIKNSDNMNILGVDRGERHLLYYSLINIKGGIIKQGSLNTIYDSYEKDGINIPVITDYKSILKDREDERMDSRKNWGTIKNIKEMKEGYLSHVVHQVSKLLIDNNAILVLENLNSGFKRRRLKIEKQVYQNFEKSLINKLNYLVLKDADNKDVGHFLKGYQLTAPFEGFQRLNNQSGIIYYVWPSYTSKICPRTGFVSLLHINYENIEKSKEFFNKFDKISYNKDKDYFEFHLDYTRFGKNAGKNKWVICTYGKDRYFFNQKLKKYEYIDITEKIKELLSNNGIDFINENDMRKSIVENNSKNFFGSLLFYLKVVMQLRYTNSNDGCRNENDYILSPVADINGMFFDSRHACDNEPENADANGAYHIALKGLRMIQFIENGVITKQGNETTDWFKFAQNKL

SEQ ID NO: 839 - protein, 1260 aa, unidentified
  REGION 1..1260: note = Cas Enzyme sequence
MENQNLLNKFTNKYQLSKTLRFELIPQGATLANIEKNGLLKQDEQRAENYKLTKKIIDEYHKDFINKALVGLQLKNLEDYYSLYKIVKRDDAQKKQFEDVQCKLRKQIAERFNKHPNEEIKAKFKNLFAKELIKVDLLNFVQTEDEMLLVKEFENFTTYFTGFNENRANMYSAEDKSTAIGYRLVHQNLPKFIDNKSIFEKVLESPVCEKFTVLLKELESIIQVPNIEEMFELEYFSETLTQLGIDKYNYLLGGYTSEDGKTKIQGLNEHINLYNQTVKEKKDKIAKLKPLFKQILSDRNAISFLPEEFKTDAELLESVEQLYQEMNKLVFEIKNNETTTLPSLLKQLPEFDLSKIYIKNDLGLTDIAQKMFGNWGVFQQAINADFDSSYKGKLKKETEKYEEEQSKYFKRFDSFSIQYLNYCLLFLNNQSYNKNVAEYFALLGEVKTDNKPSLFAQVALKYDQVEETLKTYDANKNFLQDQKSVDKIKELLDSIKAIQHFIKPLLGKGNEPEKDEKFYSEFEKLWHTLDHVTILYNKVRNYLTRKPYSTEKIKLNFENSTLLDGWDVNKEEANTSVLFVKDGNYYLGIMDKKHNKVFREIPKTKSSENFQKVNYKLLPGASKMLPKVFFSNSNIKHYAPSEEILRIRNTGTHTKNGQPQDGYEKLDFSVTDCRKIIDFFKASINKHPEWTNYGFEFKPTLQYESIDEFYREVENQGYTISYTNIGADYMNQLVAEGKLYLFQIYNKDFSPNSKGTPNMHTLYWKMLFDENNLNNVVYKLNGQAEVFYRKGSIKPENTIVHKANQAINNKNELNTKKQSTFSYDIIKDKRFTVNKFQFHVPITLNFKANGTGSLNTDVNQEIQQNGISHIIGIDRGERHLLYLTVIDSAGNIKEQFSLNEIVNEYNGNNYKTNYHTLLDAKEGGRDEARKNWKTIETIKELKEGYLSQVIHKITELMVKYNAIVVLEDLNMGFMRGRQKVEKQVYQKFEKMLIDKLNYYVDKKKTATEIGGTLNALQLTNKFESFQKMGRQSGFLYYVPAWNTSKMDPVTGFVNLFQIKYESIEKAQAFFNLFKTINYNAKANYFEFDFDYSQFTNKAEGTQTNWTICSYGMRIRTYRNPIQNNQWDNEQINLTKAFEALFNKYAINYKSNILKASITSQTDKAFFEELIYLFKLILQMRNSVTNSNIDYLISPVANKKGEFYNSDTAANNLPQNADANGAFNIARKGLWVIEQIKQTADLKKLKLAITNKEWLAFVQKN

SEQ ID NO: 840 - protein, 1260 aa, unidentified
  REGION 1..1260: note = Cas Enzyme sequence
MKNTNLSIFTGLYPLSKTLRFELIPQGKFTLENFVKSQSFESDVKRAEAYPIVKQIIDSYHKWFIDDSLKELNLDWQPLKVAIEQYRIDKDKKALQEVQKAKRKEINEAFIKHPDFKYLFKEDLISNLLPVWIQNSDDTDIEKKKEAVQTFHRFSTYFTGFHKNRENIYSADDISTSVPHRLIHDNFPKFMGNLEVFEFIKNECPSVLEETVRELLPFLEGIQIDDVFSLDFFNHCLTQNGIDFYNRIIGGVTPENGQKRRGLNEFINLYKQQHPEFAKNKKIKKMVVLFKQILSDRESLSFIPEIFVDDKQLQESISTFYTQELLNFEAEGRTINICEELASLITRLSDYDPSKLYIQQHELTAVSQKLLGSWGEINYCLSNYAESKFGTAEKPSNKKKIDGWLKSTEFSLTELNTALQQAGKEERIEQYFDDIKTLAQNIKISYEETQPIFEKKYHAELHLREQADDVEKLKTFLDALQELMHRLKPLCISEEADRDTSFYNEFDLLYNQLILVVPVYNKVRNYITQKLGEENKIKLNFENPTLANGWDVNKEDANTCVILLKDNKYYLGIMNAKNKPKFTKTKVRSDEVCYQKMVYKLLPGPNKMLPKVFFSKKGIETFNPPQYILDGYNDGKHKKGSTFNLEFCYQLIDYFKLAISQHADWKNFEFQFSETKTYKDISAFYKEISEQGYKLTFDDIPECQITEWVNEGKLFLFQIYNKDFSAGATGRPNLHTLYWKSLFTPENLKDVVLKLNGEAEFFYRDSNIKKAASHKVGEKMVNRRDINGQSIPDAVHKELFLYFNKRNKQALSNEAKAYLDKITVKDVTHEIIKDRRYTQPKFLFHVPMTINFKADTKNEYMNERVREFLANNPNVNIIGLDRGERHLIYLSVINQKGEILKQKSYNTITDTDYQEKLVQREKERDEARKSWGTIGKIKELKEGYLSQVIHEIATMMVENNAIVVLEDLNFGFKRGRFKVERQVYQKFEKMLIDKLNYLVFKEKAPLEAGGVLNGYQLAEKFTSFKDLGKQCGFLFYVPAAYTSKIDPTTGFVNLLNLNYTNVKDAQILFGDMDSIRYNPVTDYFEFALNYDKFKTPQTDWRKTWTICTIGRKRFAYITGENGQKETQTIDVTQSLKELFEKNSIDYTTGNNLQDVICQQTTVDFYKTLLWLLKLTMQMRNSNATTNEDFILSPVKNNQGEFFMSNNNPNGTLPADADANGAYHIALKGLYLMKKVFPAGSKDMKIEHKEWFEFAQKMHIK

SEQ ID NO: 841 - protein, 1261 aa, unidentified
  REGION 1..1261: note = Cas Enzyme sequence
MGTINFSDFTNLSSVTKTLCNRLIPTEITAKYIKEHGVIEADQERNMMSQELKNILNDFYRSFLNENLVKVHELDFKPLFIEMKKYLETKDNKEALEKAQDDMRKAIHDIFEGDDRYKKMFKAEITVSVLPEFILRNGAYSAEEKEEKMQVVKMFNGFMTSFSAFFTNRENCFSKKKISSSACYRIVDDNAKIHFDNIRIYKNIANKFDYEPEMIEKLEEAAGGADIRNIFSYNFDHFAFNHFVSQDDISFYNYVVGGINKFMNLYCQATKEKLSPYKLRHLHKQILCIEESLYDVPAKFNCDEDVYAAVNDFLNNVRTKSVIERLQMLGKNADSYDLDKIYISKKHFTNISQTLYRDFSVINTALTMSYIDTLPGKGKTKEKKAASMAKNTELISLGEIDKLVDKYNLCPDKAVSTRSLIRIISDIVAGYKASPLTMSSGIPLAENETEIAVLKEAIEPFMDIFRWCAKFKTDEPVDKDTDFYTELEDISDEIHSIVSLYNRTRNYVTKKPYNTDKFELYFGTSSFASGWSESKEFTNNAILLAKDDKFYLGVFNAKNKPAKSIIKGHDTMQNGDYKKMVYSLLTGPNKMLPHMFISSSKAAPVYGLTDELLSDYKKGKHLKASKNFDIDYCHKLIDYFKHCLTLYTDWDCFDFKFSDTKSYNDIGEFYKEVAEQGYYMNWTYIGSDDIDSLQENGQLYLFQIYNKDFSEKSFGKPSKHTAILRSLFSDENVADPVIKLCGGTEAFFRPKNIKTPVVHKKGSVLVSKTYNAQEMDENGNIITVRKCVPDDVYMELYGYYNNSGTPLSAEALKYKDIVDHRTAPYDIIKDHRYTEDEFFINMPVSLNYKAENRRVNVNEMALKYIAQTKDTYIIGIDRGERNLLYVSVIDTDGNIVEQKSLNIINNVDYQAKLKQVEIMRKLARQNWKQGVKIADLKKGYLSQAVHEVAELVIKYNGIVVMEDLNSRFKEKRSKIERGVYQQFETSLIKTLNYLTFKDRKPLEAGGIANGYQLTYIPESLKNVGSQCGCILYVPAAYTSRVDPTTGFVSLFKFRDISSEKVKTDFIGRFDCIRYDAEKDLFAFEFDYDNFETYETCAKTKWCAYTYGTRVKKTFLNRKFVSEVIIDITEEIKKTLAATDINWTDGHDIKQEIIDYALSSHIFEMFKLTVQMRNSLCESKDREYDKFVSPIMNASGKFFDTDAADKSLPIEADANDAYGIAMKGLYNVLQVKNNWAESEKFKFKRLSNEDWFSFMQKRQSRQ

SEQ ID NO: 842 - protein, 1261 aa, unidentified
  REGION 1..1261: note = Cas Enzyme sequence
MGTINFSDFTNLSSVTKTLCNRLIPTEITAKYIKEHGVIEADQERNMMSQELKNILNDFYRSFLNENLVKVHELDFKPLFIEMKKYLETKDNKEALEKAQDDMRKAIHDIFEGDDRYKKMFKAEITVSVLPEFILRNGAYSAEEKEEKMQVVKMFNGFMTSFSAFFTNRENCFSKKKISSSACYRIVDDNAKIHFDNIRIYKNIANKFDYEPEMIEKLEEAAGEADIRNIFSYNFDHFAFNHFVSQDDISFYNYVVGGINKFMNLYCQATKEKLSPYKLRHLHKQILCIEESLYDVPAKFNCDENVYAAVNDFLNNVRTKSVIERLQMLGKNADSYDLDKIYISKKHFTNISQTLYRDFSVINTALTMSYIDTLPGKGKTKEKKAASMAKNTELISLGEIDKLVDKYNLCPDKAVSTRSLIRIISDIVAGYKASPLTMSSGIPLAENETEIAVLKEAIEPFMDIFRWCAKFKTDEPVDKDTDFYTELEDISDEIHSIVSLYNRTRNYVTKKPYNTDKFELYFGTSSFASGWSESKEFTNNAILLAKDDKFYLGVFNAKNKPAKSIIKGHDTMQNGDYKKMVYSLLTGPNKMLPHMFISSSKAAPVYGLTDELLSDYKKGKHLKASKNFDIDYCHKLIDYFKHCLTLYTDWDCFDFKFSDTKSYNDIGEFYKEVAEQGYYMNWTYIGSDDIDSLQENGQLYLFQIYNKDFSEKSFGKPSKHTAILRSLFSDENVADPVIKLCGGTEAFFRPKSIKTPVVHKKGSVLVSKTYNAQEMDENGNIITVRKCVPDDVYMELYGYYNNSGTPLSAEALKYKDIVDHRTAPYDIIKDHRYTEDEFFINMPVSLNYKAENRRVNVNEMALKYIAQTKDTYIIGIDRGERNLLYVSVIDTDGNIVEQKSLNIINNVDYQAKLKQVEIMRKLARQNWKQGVKIADLKKGYLSQAVHEVAELVIKYNGIVVMEDLNSRFKEKRSKIERGVYQQFETSLIKTLNYLTFKDRKPLEAGGIANGYQLTYIPESLKNVGSQCGCILYVPAAYTSRVDPTTGFVSLFKFRDISSEKVKTDFIGRFDCIRYDAEKDLFAFEFDYDNFETYETCAKTKWCAYTYGTRVKKTFLNRKFVSEVIIDITEEIKKTLAATDINWTDGHDIKQEIIDYALSSHIFEMFKLTVQMRNSLCESKDREYDKFVSPIMNASGKFFDTDAADKSLPIEADANDAYGIAMKGLYNVLQVKNNWAESEKFKFKRLSNEDWFSFMQKRQSRQ

SEQ ID NO: 843 - protein, 1261 aa, unidentified
  REGION 1..1261: note = Cas Enzyme sequence
MGTINFSDFTNLSSVTKTLCNRLIPTEITAKYIKEHGVIEADQERNMMSQELKNILNDFYRNFLSENLVKVHELDFKPLFTEMKKYLETKNNKEALEKAQDDMRKAIHDIFESDDRYKNMFKAEITASILPEFILHNGAYSAEEKEEKMQIVKMFNGFMTSFSAFFANRENCFSKKKISSSACYRIVDDNAKIHFDNIRIYKNIANKFDYEPEMIEKLEEAAGGADIRNIFSYNFDHFAFNHFVSQDDISFYNYVVGGINKFMNLYCQATKEKLSPYKLRHLHKQILCIEESLYDVPAKFNCDEDVYAAVNDFLNNVRTKSVIERLQMLGKNADSYDLDKIYISKKHFTNISQTLYRDFSVINTALTMSYIDTLPGKGKTKEKKAASMAKNTELISLGEIDKLVDKYNLCPDKAASTRSLIRSISDIVADYKANPLTMNSGIPLAENETEIAVLKEAIEPFMDIFRWCAKFKTDEPVDKDTDFYTELEDINDEIHSIVSLYNRTRNYVTKKPYNTDKFGLYFGTSSFASGWSESKEFTNNAILLAKDDKFYLGVFNAKNKPAKSIIKGHDTIQDGDYKKMVYSLLTGPNKMLPHMFISSSKAVPVYGLTDELLSDYKKGRHLKTSKNFDIDYCHKLIDYFKHCLALYTDWDCFNFKFSDTESYNDIGEFYKEVAEQGYYMNWTYIGSDEIDSLQENGQLYLFQIYNKDFSEKSTGKPNKHTAILRSLFSDENIADPVIKLCGGTEVFFRPKSIKTPVVHKKGSVLVSKTYNAQEMDENGNVITVRKCVPDDVYMELYGYYNNSGIPLSAEALKYKDIVDHRTAPYDIIKDHRYTEDEFFINMPVSLNYKAENRRVNVNEMALKYIAQTKDTYIIGIDRGERNLLYVSVIDTDGNIVEQKSLNIINNVDYQAKLKQVEIMRKLAKQSWKQGVKIADLKKGYLSQAVHKVAELVIKYNGIVVMEDLNSRFKEKRSKIERGVYQQFETSLIKTLNYLTFKDRKPLEAGGIANGYQLTYIPESLKNVGSQCGCILYVPAAYTSRVDPATGFVSLFKFRDISSEKVKTDFIGRFDCIRYDAEKDLFAFEFDYDNFETYETCAKTKWCAYTYGTRVKKTFLNRKFVSEVIIDITEEIKKTLAATDINWTDGHDIKQEIIDYALSSHIFEMFKLTVQMRNSLCESKNKEYDKFVSPILNASGKFFDTDAADKSLPIEADANDAYGIAMKGLYNVLQVKNNWAEGEKFKFNRLSNEDWFNFMQERQSRQ

SEQ ID NO: 844 - protein, 1261 aa, unidentified
  REGION 1..1261: note = Cas Enzyme sequence
MNTGFNDFTNLSSVTKTLCNRLIPTEITAKYIKEHGVIEADQERNMMSQELKNILNDFYRSFLNENLVKVHELDFKPLFTEMKKYLETKDNKEALEKAQDDMRKAIHDIFESDDRYKKMFKAEITASILPEFILHNGAYSAEEKEEKMQVVKMFNGFMTSFSAFFTNRENCFSKEKISSSACYRIVDDNAKIHFDNIRIYKNIANKFDYEIEMIEKIEEAAGGADIRNIFSYNFDHFAFNHFVSQDDISFYNYVVGGINKFMNLYCQATKEKLSPYKLRHLHKQILCIEESLYDVPAKFNCDEDVYAAVNDFLNNVRTKSVIERLQMLGKNADSYDLDKIYISKKHFTNISQTLYRDFSVINTALTMSYIDTLPGKGKTKEKKAASMAKNTELISLGEIDKLVDKYNLCPDKAASTRSLIRSISDIVADYKANPLTMNSGIPLAENETEIAVLKEAIEPFMDIFRWCAKFKTDEPVDKDTDFYTELEDINDEIHSIVSLYNRTRNYVTKKPYNTDKFGLYFGTSSFASGWSESKEFTNNAILLAKDDKFYLGVFNAKNKPAKSIIKGHDTIQDGDYKKMVYSLLTGPNKMLPHMFISSSKAVPVYGLTDELLSDYKKGRHLKTSKNFDIDYCHKLIDYFKHCLALYTDWDCFNFKFSDTESYNDIGEFYKEVAEQGYYMNWTYIGSDDIDSLQENGQLYLFQIYNKDFSEKSFGKPSKHTAILRSLFSDENVADPVIKLCGGTEVFFRPKSIKTPVVHKKGSILVSKTYNAQEMDENGNIITVRKCVPDDVYMELYGYYNNSGTPLSAEALKYKDIVDHRTAPYDIIKDRRYTEDEFFINMPVSLNYKAENRRVNVNEMALKYIAQTKDTYIIGIDRGERNLLYVSVIDTDGNIVEQKSLNIINNVDYQAKLKQVEIMRKLARQNWKQGVKIADLKKGYLSQAVHEVAELVIKYNGIVVMEDLNSRFKEKRSKIERGVYQQFETSLIKTLNYLTFKDRKPLEAGGIANGYQLTYIPESLKNVGSQCGCILYVPAAYTSRVDPTTGFVTLFKFKDISSEKAMTDFIGRFDCIRYDAEKDLFAFEFDYDNFEIYETCAKTKWCAYTYGTRVKKTFQNRKFVSEVVIDITEEIKKTLAATDINWADGHDIKQEIIDYALSSHIFEMFKLTVQMRNSLCESKDREYDKFVSPILNASGKFFDTDAADKSLPVEADANDAYGIAMKGLYNVLQVKNNWAEGEKFKFSRLSNEDWFNFMQKRQQTNS

SEQ ID NO: 845 - protein, 1261 aa, unidentified
  REGION 1..1261: note = Cas Enzyme sequence
MGTINFSDFTNLSSVTKTLCNRLIPTEITAKYIKEHGVIEADQERNMMSQELKNILNDFYRSFLNENLVKVHELDFKPLFIEMKKYLETKDNKEALEKAQDDMRKAIHDIFEGDDRYKKMFKAEITVSVLPEFILRNGAYSAEEKEEKMQVVKMFNGFMTSFSAFFTNRENCFSKKKISSSACYRIVDDNAKIHFDNIRIYKNIANKFDYEPEMIEKLEEAAGGADIRNIFSYNFDHFAFNHFVSQDDISFYNYVVGGINKFMNLYCQATKEKLSPYKLRHLHKQILCIEESLYDVPAKFNCDEDVYAAVNDFLNNVRTKSVIERLQMLGKNADSYDLDKIYISKKHFTNISQTLYRDFSVINTALTMSYIDTLPGKGKTKEKKAASMAKNTELISLGEIDKLVDKYNLCPDKAVSTRSLIRIISDIVAGYKASPLTMSSGIPLAENETEIAVLKEAIEPFMDIFRWCAKFKTDEPVDKDTDFYTELEDISDEIHSIVSLYNRTRNYVTKKPYNTDKFELYFGTSSFASGWSESKEFTNNAILLAKDDKFYLGVFNAKNKPAKSIIKGHDTMQNGDYKKMVYSLLTGPNKMLPHMFISSSKAAPVYGLTDELLSDYKKGKHLKASKNFDIDYCHKLIDYFKHCLTLYTDWDCFDFKFSDTKSYNDIGEFYKEVAEQGYYMNWTYIGSDDIDSLQENGQLYLFQIYNKDFSEKSFGKPSKHTAILRNLFSDENVADPVIKLCGGTEAFFRPKSIKTPVVHKKGSVLVSKTYNAQEMDENGNIITVRKCVPDDVYMELYGYYNNSGTPLSAEALKYKDIVDHRTAPYDIIKDHRYTEDEFFINMPVSLNYKAENRRVNVNEMALKYIAQTKDTYIIGIDRGERNLLYVSVIDTDGNIVEQKSLNIINNVDYQAKLKQVEIMRKLARQNWKQGVKIADLKKGYLSQAVHEVAELVIKYNGIVVMEDLNSRFKEKRSKIERGVYQQFETSLIKTLNYLTFKDRKPLEAGGIANGYQLTYIPESLKNVGSQCGCILYVPAAYTSRVDPTTGFVSLFKFRDISSEKVKTDFIGRFDCIRYDAEKDLFAFEFDYDNFETYETCAKTKWCAYTYGTRVKKTFLNRKFVSEVIIDITEEIKKTLAATDINWTDGHDIKQEIIDYALSSHIFEMFKLTVQMRNSLCESKDREYDKFVSPIMNASGKFFDTDAADKSLPIEADANDAYGIAMKGLYNVLQVKNNWAESEKFKFKRLSNEDWFSFMQKRQSRQ

SEQ ID NO: 846 - protein, 1261 aa, unidentified
  REGION 1..1261: note = Cas Enzyme sequence
MNVNKKYFKEFIGNSQVKKTLRNSLIPTEITQKYLMKNDIIKEDELRNKNRQLLKNIMDDYYRKFLIEKLNLMYDIEWTKLFTEIEKEFKHGNNKPNLEKEQKAKRKKINKYFSEDEKFKTIFSAKFISDILPEFVIHNNEYNADEKDEKLQLISLFSGFTTSLKNFFENRKNMFSAEDKQSSICHRIVNDNASIFFENVIAYRKIKRSLSEDDFLRLENDIHEKLHGKSIDEIYAYDNYGRFITQDGINLYNDVCGRINLFMNLYCQQNNENKNVYKMRKLHKQILCIAESSYEVPYGFQSDEELYSSVNEFLNNLESKNIAERLRNIGQNYNKYELDKIYISSKNFETVSQKVYGDWNTIDSALEVYYTNTLPGSGKSKAEKVRKAIKNDLHKSITQINELVSEYKLCADEKVKVQDYIAAINDITKHCDIRSLEYNPDINLTENEDKASELKKSLDMIMNIFHWCSVFMTDEILDKDVDFYSEIEDIYDEIAPIIKLYNRARNYITQKPYSTEKFELKFGSPTFADGFSKSKEYANNAILLQKDGLLYLGVFNVKNKPDKKMIEGHDFEENTDYKKIVYNLLPRPHNMLPKVFITSKTGIETFKPSSYILEGYKQKKHLKSSNTFDINYCHDLIDYYKECIAIHPEWKNFNFKFSDTSKYEDISGFYREVLIQGYKIDWTFISEDNINQLQENGQLYLFKVYNKDFSQNSKGKENLHTMYLKYLFSDENLNDVVLMLNSYANVFYRKSSIKSPITHKKGSMLINKTYVEEEKQEGKTVNVRKIVPDKVYMELYNHFNNNLGGTLSDEAQRIEKKVCHKATKDIIKDRRYTYDNFFINLPITINFKADESYAINHKMLQYISTQDDMHIIGIDRGERNLIYVSVIDTQGNIVEQKSFNIVGGYDYQDKLKKQENARQNARKEWKEVGKIKEIKEGYLSLVIHEIARMVIEYNAIIAMEDLSYGFKKGRFKVERQVYQKFETMLINKLNYLVFKDRKINENGGLLRGYQLTYIPQSLKNVGRQCGCIFYVPAAYTSKIDPTTGFADIFKFKNLTSEGKCEFIRSFEYIKYDSEREMFVFAFDYKNFATQNVEMAKNDWCVYTNGNRIKRKYINGRFVNETDEIDINLLIKKSFEKIDISWQDGHDLRDEIIGYGIEAQIVDIFRMAVQMRNSRSEAEDRDYDRIISPVLNADGDFYESNKAVDVLPKDADANGAYCIALKGLYEVKQIQKNWKEGEKFPMDKLRITNKDWFDFVQNKRYL

SEQ ID NO: 847 - protein, 1261 aa, unidentified
  REGION 1..1261: note = Cas Enzyme sequence
MGTINFSDFTNLSSVTKTLCNRLIPTEITAKYIKEHGIIEADQERSMMSQELKNILNDFYRSFLSENLVKVHELDFKPLFIEMKKYLETKDNKEALEKAQDDMRKAIHDIFESDDRYKKMFKAEITASILPEFILHNGAYSAEEKEEKMQVVKMFNGFMTSFSAFFANRENCFSKKKISSSACYRIVDDNAKIHFDNIRIYKNIANKFDYEPEMIEKIEEAAGGADIRNIFSYNFDHFAFNHFVSQDDISFYNYVVSGINKFMNLYCQATKEKLSPYKLRHLHKQILCIEESLYDVPAKFNSDEDVYAAVNDFLNNVRTKSVIKRLQRLGENADSYDLDKIYISKKYFANISQTLYRDFSIINTALIMSYIDTLPGKEKTKEKKAASMAKNTELISLGEIDRLVDKYNLCPDKDVSTKSLIRSISDIAADYKASPLTMDSGISLAENETKIAVLKEAIEPFMEIFRWCAKFKTDEPVDKDADFYTELEDISDEIHSIVSLYNRTRNYVTKKPYNTDKFGLYFGTSSFASGWSESKEFTSNAILLAKDDRFYLGVFNAKNKPAKSIIKGHDTMQDGDYKKMVYSLLTGPNKMLPHMFISSSKAVPVYGLTDELLSDYKKGRHLKTSKNFDINYCRKLIDYFKHCLALYTDWDCFDFKFSDTKSYNDIGEFYKEVAEQGYYMNWTYIGSDEIDSLQENGQLYLFQIYNKDFSEKSTGRPNKHTAILRSLFSDENVADPVIKLCGGTEVFFRTKSIKTPVVHKKGSVLVSKTYNTQEMDENGNIITVRKCVPDDVYMELYGYYNNSGTPLSAEALKYKDIVDHRTAPYDIIKDHRYTEDEFFINMPVSLNYKAENRRVNVNEMALKYIAQTKDTYIIGIDRGERNLLYVSVIDTDGNIVEQKSLNIINNVDYQAKLKQVEIMRKLARQNWKQGVKIADLKKGYLSQAVHEVAELVIKYNGIVVMEDLNSRFKEKRSKIERGVYQQFETSLIKTLNYLTFKDRKPLEAGGIANGYQLTYIPESLKNVGSQCGCILYVPAAYTSRVDPTTGFVSLFKFRDISSEKVKTDFIGRFDCIRYDAEKDLFAFEFDYNNFETYETCAKTKWCAYTYGTRVKKTFLNRKFVSEVIIDITEEIKKTLAATDINWTDGHDIKQEIIDYALSSHIFEMFKLTVQMRNSLCESKNREYDKFMSPILNASGKFFDTDAADKSLPIEADANDAYGIAMKGLYNVLQVKNNWAEGEKFKFNRLSNENWFNFMQERQSRQ

SEQ ID NO: 848 - protein, 1262 aa, unidentified
  REGION 1..1262: note = Cas Enzyme sequence
MVKYSDFTGLYPLSKTLRFELKPIGKTKENIERNGILERDNKRAVGYKAVKKVIDEYHKAFIDMMLDDFKLNLTDKGKLDSLEEFYAIYHLSSNDTLRKVNITKVQDSLRKQISDRFTKSEQYKRLFGKELIREDLIEFVQTPQYNAFIRAQQGNDNLSDNDIQQIKEEIIQDISRFKDFTTYFIGFYENRRNMYVADDKATSIGHRMITENLPKFVDNIDVFEKIAASDVASSFKVLYKDMEPYLNVNSLDEMFRLDYYSMVLTQKQIDVYNAIIGGMVLDDGTKIKGLNEYVNLYNQQQKDKANKLPKLKLLFKQILSERNAISWLPEEFESDNDMLKSISQCYQDLKSQVFEGEGSLRVLLQNLNDYDLEHIYLPDDLKLTDIAQKLYGNWSVVKRALEEDFKTKNPQKKNETNEKFEERIDKLLKSNESFSIAQINNLVRASLGEDYKPLESYFMSLGEPNLFVRIQDAYTEVKSLLKTSYPEDKKLSQDKANVERIKNLLDAIKDLQHFVKPLLGKGNESEKDNRFYGEFTPLWEALDQITPLYNMVRNRMTQKPYSEEKVKLNFDNSTLLAGWDLNKEADNTCTILRKDDNYYLAIMDKKNNKVFMQENIVATGDCYEKMEYKLLPGANKMLPKVFFSKSRIGEFKPSDVLMQNYKKETHKKGENFNIDDCHALIDFFKKSIDIHEDWSKFDFHFSDTKKYEDLSGFYREVEQQGYKITFRNVSVDYVNSLVDEGKIYLFQIYNKDFSTYSKGTPNLHTMYWKMLFDERNLADVVYKLNGEAEVFFRKHSIEAVKPTHPANKPIENKNKLNAKKTSVFDYDLIKDRRYTVDKFQFHVPITMNFKASGLNNINPLVNAYLKESNVTHIIGIDRGERHLLYLSLIDMKGNIVEQYSLNEIVNEYKGNTYRTNYHDLLDAKERQRDEARRSWQTIENIKELKEGYMSQVIHKIAELMVKYNAIVVLEDLNLGFMRGRQKVEKQVYQKFEKMLIDKLNYLVDKKRDARETGGVLKAYQLTNKFESFQKLGKQSGCLFYIPAWNTSKMDPTTGFVNLFDTRYENMAKAKAFFSKFKSIRYNAAKDWFEFAFDYDDFTTKAAGTKTKWTLCTYGTRIETKRDPKQNNMFVSEEFKLTDRFKDLFAQYRIDLNENMMEQISLQNDATFFKELLHLLHLTLQMRNSITSTEIDYLVSPVMNAAGEFYDSRRCGKNLPENADANGAYNIARKGLWIIDQIKQADDLSKLKLAISNKEWMRYAQGV

SEQ ID NO: 849 - protein, 1262 aa, unidentified
  REGION 1..1262: note = Cas Enzyme sequence
MKTFQQFSRVYPLSKTLRFELKPIGSTLEHINKNGLLDQDQHRAKSYIQMKNIIDEYHKEFIEDVLDDLELQYDNEGRNNSISEFYTCYMIKSKDDNQRKLYEKIQEELRKQIANAFNKSDIYKRIFSEKLIKEDLKNFITNQKDNDKREQDIQIIEEFKNFTTYFTGFHENRKNMYTSEAQSTAIAYRLIHENLPKFIDNIMVFDKVAASPIADSFSELYTNFEECLNVMSIEEMFKLNYFNVVLTQKQIDVYNAIIGGKTIDNTNIKIKGLNEYINLYNQQQKDKSARLPKLKPLYKQILSDRNAISWLPEQFESDDKLLEAIQKAYQELDEQVLNRKIEGEHSLRELLVGLADYDLSKIYIRNDLQLTDISQKVFGHWGVISKALLEELKNEVPKKSKKESDEAYEDRLNKVIKSQGSISIAFINDCINKQLPEKQKTIQGYFAELGAVNNETIQKENLFAQIENAYTEVKDLLNTPYTGKNLAQDKVNVEKIKNLLDAIKALQHFIKPLLGDGTEPEKDEKFYGEFAALWEELDKITPLYNMVRNYMTRKPYSTEKIKLNFENSTLMDGWDLNKEQANTTVILRKDGLYYLAIMNKKHNRVFDVKAMPDDGDCYEKMEYKLLPGANKMLPKVFFSKSRIQEFAPSSQLLENYHNDTHKKGVTFNIKDCHALIDFFKASINKHEDWCKFGFRFSPTETYEDLSGFYREVEQQGYKISFRNVSVDYIHSLVEEGKIFLFQIYNKDFSPYSKGTPNLHTLYWKMLFDEKNLADVVYKLNGQAEVFFRKSSINYEQPTHPANKAIDNKNELNKKKQSLFTYDLIKDKRYTIDKFQFHVPITMNFKSTGNDNINQSVNEYIQQSDDLHIIGIDRGERHLLYLTVINLKGEIKEQYSLNEIVNTYKGNEYRTDYHDLLSKREDERMKARQSWQTIENIKELKEGYLSQVVHKIAELMIKYNAIVVLEDLNAGFMRGRQKVESSVYQKFEKMLIDKLNYLADKKKQPEEPGGILNAYQLTNKFVSFQKMGKQCGFLFYTQAWNTSKIDPVTGFVNLFDTRYETREKAKTFFGKFDSIRYNDEKDWFEFAFDYTNFTSKADGSRTNWKLCTYGKRIETFRDEKQNSNWTSKEVVLTDKFKEFFKESNIDIHSNLKEAIMQQDSADFFKKLLYLLKLTLQMRNSETGTNVDYMQSPVADEEGNFYNSDTCDSSLPKNADANGAYNIARKGLWIVQQIKTSDDLRNLKLAITNKEWLQFAQRKPYLDE

SEQ ID NO: 850 - protein, 1262 aa, unidentified
  REGION 1..1262: note = Cas Enzyme sequence
MKTNKKIFTETIGTEVLSKTIRNALVPTETTKINIEKNGLITDDQFRAEKRASLKEIMDNYYRFYIEKKLSESNYISQIEWKDLFEAIEAKYKENNDKTKKELLKIQKEKRTEIYRIFYEDEDFKNIFSAKLISDILPNYIRSSELDEEKKEDVMQTINIFNNFTSSLSDFWNNRKNVFSPEDIHTSVCHRIVNDNAQIFYQNLLAFEKIKKDAFEEIKTIEDSNWDLIGEWKLIEIFNYDYYGMLMNQKGIRHYNDVCGVINMHMNLFCQKYKKNKAAYRMRRLHKQILSIDESTFTIPKMFENDEEVYKTINTFFETVTEKKIIERVKNIADNYETFDDSKIYISNRYYETLSIFMTGNWKTVEDSLRAFYDKNIVTKSKAKDEKIKKAIKSDSYRSLSSLNDLVKEYNGDKLKNNADDFIKSIKEKIFQVEICKLKYTEKSNLIENEQEMLILKEKLDLLMEVYHWLKVFIIDEEIQKDNAFYLEVEDIYNELEPLISIYNKVRNYATQKPYKKEKIKLNFGIPTLAKGWSKSKEYDNNTIILLRDNKYYLAIFNPKNKPDKKKMEGHLNKEKATDYKKMVYRLLPGVNKMLPKVFLSKKGIAEYNPSNYILDGYKLKKHVKSQNGFDINFCHDLIDYFKDCLNKHSEYRKFEFKFTNTEDYNDISEFYNEVEKQGYKIEWTYLSQEDVDTWEKNNSIYMFQIYNKDFSDKSKGKDSIHTMYLKNLFSEENLKDIVLKLDGEAELFFRKSSIQKPIVHKKGSILVNRTYKEGEERKQIKDNEYREIYNYLNNKNNEEISKEAMDLIKSKKVEYFVSDYDITKDYRYSVDQYFLHLPIKINFKSSKYSNVNEIALKNIAKSDDMHIVGIDRGERNLIYVSVIDLQGNIIEQKNFNIINGVNYKEKLRQREIERDRARKNWREVGKIKELKEGYLSLVVHEIAQLIVKYNAIVVMEDLNRGFKRGRFKVERQVYQKFENLLISKLHYLIDKNLEITEEGGLLRGYQMTYQPERLEQIGRQCGYIFYVPAAYTSKIDPTTGFVAIFDGKKMEDEKFVMSFKSIRYNKEKDMFAFEFDYRDFETHNVRLTKNEWRIFTNGKRLKREKINGKWGSVKKINLTNEMVEIMRAFNLNYLNGEEILLQIEKLDQTERKNICRKIKELVRYIVQMRNSLPDNEEDDYDEIISPVLNDDGEFFDSSNYKESARLPKDADANGAYCIALKGLYEVKQIKENWDKNQEFSREVLKIKHTDWFDFIQNKRYL

SEQ ID NO: 851 - protein, 1262 aa, unidentified
  REGION 1..1262: note = Cas Enzyme sequence
MKTFQQFSRVYPLSKTLRFELKPIGSTLEHINKNGLLDQDQHRAKSYIQMKNIIDEYHKEFIEDVLDDLELQYDNEGRNNSISEFYTCYMIKSKDDNQRKLYEKIQEELRKQIANAFNKSDIYKRIFSEKLIKEDLKNFITNQKDNDKREQDIQIIEEFKNFTTYFTGFHENRKNMYTSEAQSTAIAYRLIHENLPKFIDNIMVFDKVAASPIADSFSELYTNFEECLNVMSIEEMFKLNYFNVVLTQKQIDVYNAIIGGKTIDNTNIKIKGLNEYINLYNQQQKDKSARLPKLKPLYKQILSDRNAISWLPEQFESDDKLLEAIQKAYQELDEQVLNRKIEGEHSLRELLVGLADYDLSKIYIRNDLQLTDISQKVFGHWGVISKALLEELKNEVPKKSKKESDEAYEDRLNKVIKSQGSISIAFINDCINKQLPEKQKTIQGYFAELGAVNNETIQKENLFVQIENAYTEVKDLLNTPYTGKNLAQDKVNVEKIKNLLDAIKALQHFIKPLLGDGTEPEKDEKFYGEFAALWEELDKITPLYNMVRNYMTRKPYSTEKIKLNFENSTLMDGWDLNKEQANTTVILRKDGLYYLAIMNKKHNRVFDVKAMPDDGDCYEKMEYKLLPGANKMLPKVFFSKSRIQEFAPSSQLLENYHNDTHKKGVTFNIKDCHALIDFFKASINKHEDWCKFGFRFSPTETYEDLSGFYREVEQQGYKISFRNVSVDYIHSLVEEGKIFLFQIYNKDFSPYSKGTPNLHTLYWKMLFDEKNLADVVYKLNGQAEVFFRKSSINYEQPTHPANKAIDNKNELNKKKQSLFTYDLIKDKRYTIDKFQFHVPITMNFKSTGNDNINQSVNEYIQQSDDLHIIGIDRGERHLLYLTVINLKGEIKEQYSLNEIVNTYKGNEYRTDYHDLLSKREDERMKARQSWQTIENIKELKEGYLSQVVHKIAELMIKYNAIVVLEDLNAGFMRGRQKVESSVYQKFEKMLIDKLNYLADKKKQPEEPGGILNAYQLTNKFVSFQKMGKQCGFLFYTQAWNTSKIDPVTGFVNLFDTRYETREKAKTFFGKFDSIRYNDEKDWFEFAFDYTNFTSKADGSRTNWKLCTYGKRIETFRDEKQNSNWTSKEVVLTDKFKEFFKESNIDIHSNLKEAIMQQDSADFFKKLLYLLKLTLQMRNSETGTNVDYMQSPVADEEGNFYNSDTCDSSLPKNADANGAYNIARKGLWIVQQIKTSDDLRNLKLAITNKEWLQFAQRKPYLDE

SEQ ID NO: 852 - protein, 1262 aa, unidentified
  REGION 1..1262: note = Cas Enzyme sequence
MKYHKYTKLNSTIKSATFELVPVGKTRDFLELHDVIKEDSERKAKVVLVKEVSDTFIVEFLRNYNNAGICDWENLHKIYNSATCTEIRGCIEKEKEKIAKDLNSALNAYIESFLKYNDINCSDVGWNKKSYVEVALPLYAKSVPDFNTDEYEDALASMKASSSAMFKKCRATYERIINGTNHGSIADRVIENFETFLANKLLYEKILETATGFENDETFTNVSQFGKYLSQNGIDKYNSTIGDFYNSSGELIKRGVNSRITEWNQSNPDNKLPKLQKLKKQILVDREKMFTIETIENKSDFNKTLNTVLILDEKITIETTKLLTSILAKDMYNTEGVYVTRAGGSYIANGLTGSWDYFEAIKTDAITKTVKDKLLTDYFNAKGKVKTNLTKADEKEIEKATKDFSYTIAELDRMLAGTDYITVEEMLIKKLEELKSRKKESYHLMTTCAFWNNDNKPTQDENGVIQKYLDDVLAVVRFTKIFSIDVKLTNADTIFMEDVAGMDKDKHGINKTYNMIRNYLTKKTELDAKQRRVQLCFGRPTHFEQKWNLMHGDKGIFGNCDAGLLEKDGCYYYIVPASKNGEKLNIHVSDCEDEADSYNMLSTKKGMGFLKMLIKCTLKSKSAIAKYKETDEPFELPIGDETITISKKMAEDYANKKHSKSKEELIKVIDFAKEFIAKHPSFKRYDLSSLKESSAYDNLKQFSDEVDSLCFAVTRLYVSKEQIDDAVEKGNLYMFMITSQDMYKSADKKHNIYSIRFNAIMKSMFEAGNHIIVNNSPSIYYRPALIEAEDKHPAGSILVNKLTTEGKTIPGEIYLELCAFYNGKCDKLSPLASVYNEKVSVKESTFPHIKDKHYTEEKFSITLSYKMNTNVVGNTSVFTLNNLVQEDIRENGCNIMSVIRGMDNLLYYCIVDSGNKRIASGNLNTIGNADYYEKLCVLGTQRYIDAKNWKYEKKVAELKETYLRQICRKIIKIAIENNAVICIDKVSDLRKNKLSAFDNQVYKKFENTLITALANYYDTSIPNTEAGGSLNPLQLAVEGADTMQNGILFHVAETNTRNICMKTGFINLMSTFGISTVKAKMEYLKKVSRIYYDSKADDFVFEFTWRNLGCCLKKDELPLYNGLDKVWQLHTHLTRLKWNKEKSQYEEIDGTELIKAIRRSHSDMIGKDIEVDMLSSKEIQTLYDVFILYANGFMPKEFMEDTSSYDSPIVPWSSVGRIEYDEMTAYQLCRKASLTMEKIKKGLSSKELVVYRTEWLNYLLEN

SEQ ID NO: 853 - protein, 1262 aa, unidentified
  REGION 1..1262: note = Cas Enzyme sequence
MKTNKKIFTETIGTEVLSKTIRNALVPTETTKINIEKNGLITDDQFRAEKRTSLKEIMDNYYRFYIEKKLSESNYISQIEWKDLFEAIEAKYKENNDKTKKQLLKIQKEKRTEIYRIFYVDEDFKNIFSAKLISDILPNYIRSSELDEEKKEDVMQTINIFNNFTSSLSDFWNNRKNIFSPEDIHTSVCHRIVNDNAQIFYQNLLAFEKIKKDAFEEIKTIEDSNWDLIGEWKLIEIFNYDYYGMLMNQKGIRHYNDVCGVINMHMNLFCQKYKKNKAAYRMRRLHKQILSIDESTFTIPKMFENDEEVYKTINTFFETITEKKIIERVKNIADNYETFDDSKIYISNKYYETLSIFMTGNWKTVEDSLRAFYDKNIVTKSKAKDEKIKKAIKNDSYRSLSSLNDLVKEYNGDKLKNNADEFIKSIKEKIFQVEICKLEYTEKSNLIENEQEMLILKEKLDLLMEVYHWLKVFIIDEEIQKDNAFYLEVEDIFNELEPLISIYNKVRNYATQKPYKKEKIKLNFGIPTLAKGWSKSKEYDNNTIILLRDNKYYLAIFNPKNKPDKKKMEGHLNKEKATDYKKMVYRLLPGVNKMLPKVFLSKKGIAEYNPSNYILDGYKLKKHVKSQNGFDINFCHDLIDYFKDCLNKHSEYRKFEFKFTNTEDYNDISEFYNEVEKQGYKIEWTYLSQEDVDTWEKNNSIYMFQIYNKDFSDKSKGKDSIHTMYLKNLFSEENLKDIVLKLDGEAELFFRKSSIQKPIVHKKGSILVNRTYKEGEERKQIKDNEYREIYNYLNNKNNEEISKEAMDLIKSKKVEYFVSDYDITKDYRYSVDQYFLHLPIKINFKSSKYSNVNEIALKNIAKSDDMHIVGIDRGERNLIYVSVIDLQGNIIEQKNFNIINGVNYKEKLRQREIERDRARKNWREVGKIKELKEGYLSLVVHEIAQLIVKYNAIVVMEDLNRGFKRGRFKVERQVYQKFENLLISKLHYLIDKNLEITEEGGLLRGYQMTYQPERLEQIGRQCGYIFYVPAAYTSKIDPTTGFVAIFDGKKMEDEKFVMSFKSIRYNKEKDMFAFEFDYRDFETHNVRLTKNEWRIFTNGKRLKREKINGKWGSVKKINLTNEMVEIMRAFNLNYLNGEEILLQIEKLDQTERKNICRKIKELVRYIVQMRNSLPDNEEDDYDEIISPVLNDDGEFFDSSNYKESARLPKDADANGAYCIALKGLYEVKQIKENWDKNQEFSREVLKIKHTDWFDFIQNKRYL

SEQ ID NO: 854 - protein, 1262 aa, unidentified
  REGION 1..1262: note = Cas Enzyme sequence
MAKNTIFSQFTGLYPVSKTLRFELKPMGKTLEKIKETGVIENDKKRHNDYFDAKKIIDKYHKYFIDAALSKFPRIDWSPLKEAIERSLDRSDASKKKLEKTQTEFRKKIAKALTTHDHYKELTASTPKDLFLKVFPDHFGKQPAIDTFDGFSSYFTGFQENRQNIYSDEAISTAIPYRLVHDNFPKFLSNIEVYKTLKDNAPSVLSDAENELRDFLNGKSLANIFELNAYNEVLTQSGIDFFNQVIGGISDEGGEKKTRGINEFSNLYRQQHPEFAQKRLATKMIPLYKQILSDRETKSFILESYSNDSQVQNSVKEFFESQILNWDIAGRRVNVLNELTSLVKRISEFDLGNIYVNQEELSNISLKLFDNWNSINGLLFKHAENRIGSAEKSANKKKIDAWMKNKEFSIATLNLAIAESNSEEISRVKIESYWNNFEAKVQSILCGDNRRNLDEFISATFNENNALREDSKIIEKLKAFLDALIEIMHSIKPLISDAENRDLSFYNELIPLYDQLSLVVPLYNKIRNYATQKLTESEKFKLNFDNPTLADGWDQNKEEANTAILLLKNGLYYLGIMNAKNKPKIKDFKTSESEDCYDKMVYKLLPGPNKMLPKVFFSEKGLATFKPPKDILDGYNAGKHKKGDLFDIGFCHQLIDFFKESIAKHPDWKKFDFNFSDTSSYEDISGFYKEVTDQGYKITFSKIPTSQIDEWVKEGKLFLFQIYNKDFAPGAKGSPNLHTLYWKSVFSPENLKDVVVKLNGEAELFYRPSSVKKPYSHKVGEKLVNRIGKDGLPLPESVFGELFRYFNGKLEGELSDEAKRYLDVAVVKDVKHEIVKDRRYTQDKFEFHVPLTLNFKADSKNEYMNERVRHFLKDNPDVNIIGIDRGERHLLYMTLINQKGEILKQKSFNVVESVNYQAKLVQREKERDAARRSWSSVGKIKDLKEGFLSQVIHEITTTMIENNAIVVLEDLNFGFKRGRFCVERQVYQKFEKMLIDKLNYLVFKNKPEGDVGGVLKGYQLAEKFDSFQKLGKQSGFLFYIPAAYTSKIDPTTGFANLFNMTELTSAEKKKEFLSHFEDITYDGKNDRFLFSFDYKNFKCFQTDYIKKWTVYSQGKRIVYDKESKSAKEISPVEIIKAALAKQNIALTDQLDVLSAINSVEASPKSASFFGDICYAFEKTLQMRNSIPNTDEDYLASPVMNKRGEFYDSRSCDDALPQNADANGAYHIALKGLYLIKNVFDAGGKELKISHEDWFKFAQSRNC

SEQ ID NO: 855 - protein, 1262 aa, unidentified
  REGION 1..1262: note = Cas Enzyme sequence
MAKNTIFSQFTGLYPVSKTLRFELKPMGKTLEKIKETGVIENDKKRHNDYFDAKKIIDKYHKYFIDAALSKFPRIDWSPLKEAIERSLDRSDASKKKLEKTQTEFRKKIAKALTTHDHYKELTASTPKDLFLKVFPDHFGKQPAIDTFDGFSSYFTGFQENRQNIYSDEAISTAIPYRLVHDNFPKFLSNIEVYKTLKDNAPSVLSDAENELRDFLNGKSLANIFELNAYNEVLTQSGIDFFNQVIGGISDEGGEKKTRGINEFSNLYRQQHPEFAQKRLATKMIPLYKQILSDRETKSFILESYSNDSQVQNSVKEFFESQILNWDIAGRRVNVLNELTSLVKRISEFDLGNIYVNQEELSNISLKLFDNWNSINGLLFKHAENRIGSAEKSANKKKIDAWMKNKEFSIATLNLAIAESNSEEISRVKIESYWNNFEAKVQSILCGDNRRNLDEFISATFNENNALREDSKIIEKLKAFLDALIEIMHSIKPLISDAENRDLSFYNELMPLYDQLSLVVPLYNKIRNYATQKLTESEKFKLNFDNPTLADGWDQNKEEANTAILLLKNGLYYLGIMNAKNKPKIKDFKTSESEDCYDKMVYKLLPGPNKMLPKVFFSEKGLATFKPPKDILDGYNAGKHKKGDLFDIGFCHQLIDFFKESIAKHPDWKKFDFNFSDTSSYEDISGFYKEVTDQGYKITFSKIPTSQIDEWVKEGKLFLFQIYNKDFAPGAKGSPNLHTLYWKSVFSPENLKDVVVKLNGEAELFYRPSSVKKPYSHKVGEKLVNRIGKDGLPLPESVFGELFRYFNGKLEGELSDEAKRYLDVAVVKDVKHEIVKDRRYTQDKFEFHVPLTLNFKADSKNEYMNERVRHFLKDNPDVNIIGIDRGERHLLYMTLINQKGEILKQKSFNVVESVNYQAKLVQREKERDAARRSWSSVGKIKDLKEGFLSQVIHEITTTMIENNAIVVLEDLNFGFKRGRFCVERQVYQKFEKMLIDKLNYLVFKNKPEGDVGGVLKGYQLAEKFDSFQKLGKQSGFLFYIPAAYTSKIDPTTGFANLFNMTELTSAEKKKEFLSHFEDITYDGKNDRFLFSFDYKNFKCFQTDYIKKWTVYSQGKRIVYDKESKSAKEISPVEIIKAALAKQNIALTDQLDVLSAINSVEASPKSASFFGDICYAFEKTLQMRNSIPNTDEDYLASPVMNKRGEFYDSRSCDDALPQNADANGAYHIALKGLYLIKNVFDAGGKELKISHEDWFKFAQSRNC

SEQ ID NO: 856 - protein, 1262 aa, unidentified
  REGION 1..1262: note = Cas Enzyme sequence
MNDLKQFTGLYSLSKTLRFELKPIGRTQEWIEKNHVLENDEQRNEDYPKVKEMIDDYHKLCINESLKDAHFDWNPLRDAIIQNRHEKTDESKKALEVEQAKMRALIHKKLSDFKHYNELNAATPSKLINDILPKDKAVESFSSFSTYFEGFQENRKNIYTEKAISTSVPYRIVHDNFPKFLFNIAVFDNIKTLCPEVVRQVATEMSPFLHGVLIEDIFSVDFYNILLTQEGIEFYNHILGGVVKEEHHYQGVNQLVNLFRQAHTELTTKKQSLTMVPLYKQILSDRESISDILQPIDTEEQLITLLNQFYQHITNYSINGNDINVIKELTDLVISLDKFNPDGIFLSAKSLTDISHSLYGQWNILKDKLFDKAVETYGNINVAKNKVDAFVNKDAYSLAELSFGDGISVTQYFTGLTGSFDTINDIWEQFQNWCNSTDTPKFVHNDSGTELLKNLLDAIMEVLHKCSVLVVSLENNLDGDFYNTFLPLYEELRNVVSVYDRTRNFLTQKPSDISKKIKLKFDIPSLGVGWGINKERKNKAILFFKDGLSYLGIMNVKGTLDFDGKAEPDEPTYRKMVCINHSKPYMDLPNSFFRQTGIDKFHPSERILKIYEAFKKDSKSVDIKEVRELIDYYKEAINRNKDWNSVSFTFSPTETYETIDDFYKEVARQSYQLSFTDISQKQIDEWVENGQLYLFQLYNKDYAEGFHGRKNLHTLYWESLFSAENLSDTVIKLGSNAELFYRPQVIKKPVKHEVGTKMLNRRDKSGMPIPDAIYRSLYQYFNGKKTESELTMEERAYTSQVIVKDVQHEIIKDRRYTKKHHYQFHVPIVFNANATGKVKLNDKVIEYIQSNPEINIIGIDRGERHLIYLTLINQRGEILKQKTFNIVGNYNYQEKLKQREKERDEARKSWQSIGKIKDLKEGFLSAVVHEIAKLMVEYNAIVVLEDLNRGFKRGRFKVERQVYQKFEKMLIDKLNYLSFKDRAIDQDGGILRGFQLTAETKSYTDIGRQTGFLFYIPAAYTSKIDPVTGFVNLFNLNDITNAEKRKDFFMNMKRIEMRNGNVEFEFDYRKFKTYQTDFQNEWTVNTAGKRIVFDAEKRQSKDIYPTQEIVRAFDNKGIKLKDGMDLKAIIAGIEETNVKNASFFSSLFYAFKTTLQMRNSNASTEEDYIMSPVAKNGYQFCTNKVDKEEDAEGYCIARLPVDADANGAYHIALKGLYLIKNPQTKKIENEKWFQFMVEKPYLKHNDAATTTDNSMIPRKYTD

SEQ ID NO: 857 - protein, 1263 aa, unidentified
  REGION 1..1263: note = Cas Enzyme sequence
MYTNFTRLYSLSKTLRFELKPIGKTKENIEKNGILKRDNERAVAYKAVKKVIDEYHKAFIEMMLNDFELQYEMLEEYNRLYQISNSSEPKKKEKLQKIQENLRKQISDRFTTSEQYKRLFGQELIKEDLSEFVNTSQFEHYIRTQKGNDLSDEEVRQIQKRTLEDIDQFKDFTTYFSGFHQNRKNMYVADDKATAIAHRVVMENLPKFIDNMNTFAEIAESDVAGHFADLYKEMEAYLNVNDIQEMFQLDYFSMVLTQKQIDVYNAIIGGKTLDDGTKIKGLNEYVNLYNQQQTRKEDRLPKLKPLFKQILSERNAISWLPEEFENDNEMLQSIEKCYQDLNAQVFGPLKDLLKNIKDSDLEHIYLPNDLQLTDISQKHFGSWAVINKAVEEDLKTANPQKNRESGEKYEERIAKLLKNTDSYSIGYINGLLKDRIEDFEPLEVYFSNIGAEDDGKQQKLNHFSRIENAYTEAKSLLTAEYPDDKRLSQDKGNVEKIKNLLDAIKDLQHFVKPLLGSGSESDKDSQFYGEFTSLWETLDQITPLYNMVRNRMTQKPYSIEKVKLNFDNSTLLSGWDLNKETDNTCTLLRKGGNYYLAIIDKRNNKVLKPENLVSSGDCFEKMEYKQIALPMGVGAFVRKCYGTAQNYGWRCPKNCLNKEGKIIIKDAEAQPNLIDIIDCYKDFFEKYEKDGFKYKDFRFKFSESSKYERLSDFFGDVESQGYIIRFKNVSVDYINQLVEEGKIYLFQIYNKDFSPYSKGTPNMHTLYWKMLFDEKNLADVVYKLNGEAEVFFRKSSVKENRPTHPANKPIANKNKQNEKKESTFAYDLIKDRRYTVDKFQFHVPITMNFKAKGMNDINLLVNQCLKESVETHIIGIDRGERHLLYLSLIDLQGNIVEQYSLNEIVNEYNGNIYRTNYHDLLDAKEKQRDEARSSWQTIENIKELKEGYMSQVIHKIAQLMLKYNAIVVLEDLNFGFMRGRQKVEKQVYQKFEKMLIDKLNYLVDKKRATNELGGVLNALQLTNKFESFQKLGKQSGFLFYIPAWNTSKMDPTTGFVNLLDTRYENMEKAKAFFGKFDSIRYNPQQDWFEFAFDYNSFHNKAEGTRTQWTLCTYGTRIETKRDAAQNNNFVSTEVDLTQKFKELFTEHQIDINGNLKDQICSQTDVAFFKSLLNLLRLTLQMRNSITGTETDYLISPVQNAKGEFYDSRKCGKNLPENADANGAYNIARKGLWVIEQIKQADDLSNIKLAITNKEWLWFAQRLK

SEQ ID NO: 858 - protein, 1263 aa, unidentified
  REGION 1..1263: note = Cas Enzyme sequence
MDKNIGAKMNQNTSFSQFVGLYPISKTLRFELKPIGKTLEKIRENGIIDHDKNKADNYVDAKKIIDEYHKYFISEALKDIKLDWSPLRDVFIDSLTNRSQDSKKKLEELQKVFRKKIAEKLAGHTHFKELIASTPKELFEKILPNHFGKEESIEAFKRFSTYFKGFQENRKNIYSAEAISTGVPYRIVHDNFPKFLSNIETYRNIQKHCPSVLTDAEAELKDLLKGRKFTEIFNIDYFNNVISQDGIDFFNQVIGGYTHEKGTKIRGINEFANLYRQQNPEFAKQRIATKMIPLYKQILSDRESMSFILEPFKDASQVQSAVRDYFENHILHYSTEGSQIDVLDKITNLVVNLKNFELDKIFIARESLAQISQKLFGSWNSINDSFYEYCEKQFGSAQKAANKRKIDAKLKENYYSIEEINSVIAQIDSSKIVFDYWNDLDGLKRNIESGNIYKKYENFISQKFDLEDKLDKDENIQGLKDFLDAINEYLHYVKPLISNHENGDVAFYNELMPLYDQLSNIIPLYNKIRDFATQKPSDSSKFKLNFENPTLADGWDQNKEDDNTSIILKKDENYYLGIMNAKNRPKIDSYKVEQGEPHYDKMVYKLLPGPNKMLPKVFFSAKGKQIYNPSKEIQDGYAAEKHKKGISFDKQFCHQLIDFFKDGISNHPDWKNFNFNFSETSSYEDISAFYNEVSDQGYKLSFTPIPDSQINTWIDEGKLFLFQIYNKDFAPGAKGKPNLHTLYWKAIFSPENLKDVVFKLNGEAELFYRPCSIKKPYIHKIGEKMVNRITKDGRPIPDAIFGELFHYFNNSSKTSLSDDAKKYLDFVIVKDVKHEIIKDKRYTEDKFEFHVPLTINFKSSDGSRYINEQVKDFLKNNPAVNIIGIDRGERNLIYMTLINQKGEILIQKSFNLVGNTNYHEKLSIREQERDAARKSWQSIGKIKELKEGYLSLVIHEIAKTMIENNAIIVLEDLNFGFKRGRFCVEKQVYQKFEKMLIDKLNYLVFKDCADSECGGILKGFQLTQKFESFQKMGKQNGFLFYVPAAYTSKIDPTTGFVNLFNFTDLTNAEKKKDFLKKFDDITFDQKTNSFAFTFDYSKFKVFQTDYQKVWTVFTKGKRIVYDRESKKHNTIEPTTVIQEALEKQGVQCINCLNVLAEIEKVEPTRENARFFDSICYAFEKTLQMRNSNSETGDDYILSPVKNKNGVFFNSDEADDKLPKDADANGAFHIALKGLYLLQHISETDEKLKIPHEKWFEFVQSRNR

SEQ ID NO: 859 - protein, 1263 aa, unidentified
  REGION 1..1263: note = Cas Enzyme sequence
MNKYSDFTGLYPLSKTLRFELKPIGKTKENIERNGILERDNKRAVGYKAIKKVIDEYHKAFIDMMLDDFELNLTNKGKLDSLEEFYEIYHLPSNDPSRKINITKVQDSLRKQISDRFTKSEQYKRLFGKELIREDLTEFVQTPQYDAFIRAQQGNEILSDNDIQQIKEEIIQDISRFKDFTTYFIGFYENRRNMYVADDKATSIGHRMITENLPKFVDNIDVFEKIAASDVALSFKVLYKDMEPYLNVNSIDEMFRLDYYSMVLTQKQIDVYNAIIGGMVLDDGTKIKGLNEYVNLYNQQQKDKANKLPKLKLLFKQILSERNAISWLPDEFESDNDMLKGISQCYQELKSQVFEGEGSLRVLLQNLNDYDLEHIYLPDDLQLTDIAQKLYGNWSIIKRALEDNLKAKNPQKKNETNEKYEERIEKLLKSNESFSIAQINNLVQASLGEDYKPLESYFMSLGEPNLFVQIEDAYTEVKSLLMTPYPVYKKLSQDKANVEKIKNLLDAIKDLQHFVKPLLGKGNESEKDNWFYGEFTPLWEALDQITPLYNMVRNRMTQKPYSEEKVKLNFDNSTLLAGWDLNKEADNTCTILRKDNNYYLAIMDKKNNKVFMQENIVETGDCYEKMEYKLLPGANKMLPKVFFSKSRIGEFKPSDVLMQNYEKETHKKGENFNIDDCHALIDFFKKSINIHEDWSKFDFHFSDTKKYEDLSGFYREVEQQGYKITFRNVSVDYVNRLVDEGKIYLFQIYNKDFSTYSKGTPNLHTMYWKMLFDERNLADVVYKLNGEAEVFFRKHSIEADKPTHPANKPIENKNRLNAKKTSVFDYDLIKDRRYTVDKFQFHVPITMNFKASGLNNINPLVNAYLKESNATHVIGIDRGERHLLYLSLIDMKGNIVEQYSLNEIVNEYKGNTYRTNYHDLLDAKEKQRDEARRSWQTIENIKELKEGYMSQVIHKIAELMVKYNAIVVLEDLNLGFMRGRQKVEKQVYQKFEKMLIDKLNYLVDKNRDARKTGGVLKAYQLTNKFESFQKLGKQSGCLFYIPAWNTSKMDPTTGFVNLFDTRYENMAKAKVFFSKFKSISYNAAKDWFEFAFDYDDFTTKAAGTKTKWTLCTYGTRIETKRDPKQNNMFVSEEFKLTDRFKDLFAQYRIDLNGNLSEQISSQNDATFFKELLHLIHLTLQMRNSITGTEIDYLVSPVMNAAGEFYDSRRCGKNLPENADANGAYNIARKGLWIIDQIKQTEDLSKLKLAISNKEWMRYAQGIK

SEQ ID NO: 860 - protein, 1263 aa, unidentified
  REGION 1..1263: note = Cas Enzyme sequence
MTNNENLKKFTNLYPVSKTLRFELIPQGKTLEHIEENGLLEQDEHRSKSYILVKKIIDEYHKVFITRALDNTKLHSMDDYLFYYRIPKRSEDEKKKFEEIQTKLRKQIADNFTKHAAYKNLFSKELIKEDLKAFVQADDDKKIVTEFDNFTTYFTGFHENRKNMYSAEEKSTAIAYRLINQNLPKFIDNMRVFEKIKNSPVKDSFNTIISNDELGPIIQVETVEEMFTLEYFNETLTQNGIGIYNQLIGGYSPENSKEKIKGLNEYINLYNQTAKKEDRLPKLKLLYKQILSDRSTASFIPEEFASDSEVLESIEKCYQEINEQVVNKNVKGEYSLKSMLKSLGEFDLHKIYLRNDLCLTDISQKMLGDWGIFQKAMNNWYDRNYKGKSKPDTEKYEEEQKKYFRNQDSYSIGFLNECLQMLDDSVKKKIEEYFKLAGEANDENGKTENLFIQLENNYNTAKDLLNLPYPHDKNLAQDQQNVDKIKALLDSIKAVQWFIKPLLGKGNEADKDERFYGEFSSLWTVLDQVTPLYNKVRNYMTRKPYSTEKFKLNFESSYLLNGWAQDYDTKAGLIFIKDDKYYLAINNKKLNEEEKTKLKANYESNPAKRVVLDFQKPDNKNIPRLFIRSKGENFAPAVEKYQLPIDKVIEIYDNGKFTTKYRSIDESDYLKSLHKLIDYYKEGFTKHDSYKHYSFAWKATNEYKDIAEFYKDVEESCYQVLFEDINWSTLIDFEEKGKLYLFQIYNKDFSPHSKGTPNMHTLYWKMLFDAENLKNVVYKLNGQAEIFYRKSSIKEENKITHKANELIDNKNEQNDKKQSRFEYDIIKDRRYTVDKFQFHVPVTMNFKAAGINNINREVNEFLKKEKDIHIIGIDRGERHLLYLSLIDSKGKIKKQFSLNKIINEYNGKFYKTDYHELLDQKEGDRDEARRNWKVIENIKELKEGYLSQVIHKISELMVEYNAIVVLEDLNMGFMRGRQKVEKQVYQKFEKMLIDKLNYLVDKKKKAEEMGGTLNAYQLTNKFESFQKMGKQSGFLFYVPAWNTSKMDPVTGFVNLFDTRYENMEKAKTFFGKFNSIKYNQAKNYFEFDFDYADFTNKAEGTKTRWTLCTYNTRIETFRNPAKNSQWDNREIVLTEEFINLFNKYGIEYKNNTNIKDAITGQADKTFYERLLYLLKLTLQMRNSITGTDTDYLVSPVANNKDVFYDSRTADDTLPKNADANGAYNIARKGLWVLEQIAQSSDLKKVKLAISNKEWLSFAQNSGR

SEQ ID NO: 861 - protein, 1264 aa, unidentified
  REGION 1..1264: note = Cas Enzyme sequence
MKNKGLFDNFTKQYQISKTLRFELVPQGETEKFIKEKGLLKQDEDRADYYKKAKKLIDAYHKDFIEQALSGKQLELKNLQIYYDIFTASSDGKKDTKALSDISEELRKEIAGWLKDNPTTDEKKLIEKVVPEFLRSRGRNADADLVSGFKGFTTYFGGFNENRRNIYSAKEKATAIAYRIVHENLPKFIGNKRTFEKLSENYKIDFSGVEKEMKTELNGIKLSDIFKLEYFNNCLTQKGIDNYKSIIGGKTDGKGNKTQGINEKINLFRQKNNLTSKQTPMLAPLYKQILSDRISSFYLPYNFKSAKELTGSIIEFYKDAIDSFMVNNEKVNVINEIKRLFTEKLNATEYDLSHIYIRNTFITAVSRQMFGSYAVITDALNAFIDKTYKTKKEKEKQKKKSYFSIEKIETVLKTYLEEAEIGNKEKREEVLRQANPVLQYFQSLAMNLEVTRDKKEKANVIASFKQQHETVQPVLNKEYGNNSELIQDKKAVAAIKDYLDSYLHILHFVKPLYVAPPQKEDTAIPDKDAAFYNEFDELFRQLSSVIPLYNKARSFLTQKPYSTEKIKLNFENVSLLSGWDVNKETDNTAILLRRDGLYYLGIMDKEHNRSFLNIGTHSDDNDCYEKMNYKLLPGANKMLPKVIFSEKRINDFKPSDEILEKYEKGTHKKGENFSLNDCHTLIDFFKASIAKHEDWKQFGFQFSPTKTYQDISGFYREVEHQGYKISFQNVSAKYIHQLVSDGKLFLLKIYNKDFSQNSKGKPNLHTMYWKMLFAEENLKDVVFKLNGEAEVFYRPQSIHEKSKIVHGKNKLIDNKNPNNSKKQSRFDYDIVKDKRYTEDKYQFHVPITLNFKSGDIFKFNDLVSETLKENFSNINIIGIDRGERHLAYYSLINSKGEMLEQGSFNVIKNEYNGTRYETDYHASLAEKEKTRDEARKSWDAIGKIKELKEGYLSQVVHKIARMMIEHNAIVVLEDLNFGFKRGRMKVERQIYQKLEKMLIDKLNYLVFKDHEAAAPGGVLNAYQLAAPFTSFRDMGKQTGFIFYVPAANTSKIDFATGFVNLLYPKYENEKQAKDFFNKMDGMRYNAEKDYFEFEVDYNNFRADKMELLKKSLWTICTFGNERYQYHPSKREYSKVNITEDIKTLLKKQGIKFDSGNNIKEDILAVENVQFFKDLIFYLKLVLQMRYTDGKDRDFILSPVANDKGEFFNSEKAADTEPKDADANGAYHIALKGLLLLQKIREGEKKLSISNKEWHDFTQEKKYRK

SEQ ID NO: 862 - protein, 1264 aa, unidentified
  REGION 1..1264: note = Cas Enzyme sequence
MKNKIFNNFTRRYKISKTLRFELVPQGETGKFIKGLLEKDKKRTDDYKKAKKFIDEYHKDFIEQTLSIKQLQNLQAYYDELTALLAKPVKERDAKALSNISEVLRKEIAGWLKDNPIKDEKKLIEEIVPNFLQGKDRNDDAALVLKFKGFTIYFGGFNENRRNMYSDEEKSTAIAYRIVHENLPKFISNMKIFQRLTENHKIDFSEVETQMNDELNGNKLKDVFSLAYFNNCLTQSGIDRYNTILGGKTDDKGAKIQGVNEKINLFRQKNNLKSKDAPVLARLYKQILSDRTSTSFSTEKIETAEELIAGIREFYEKAINGFIKNNEKKNVIDEIERLFSEKLNPTDCDLSQIYIRNTFTTAVSQQIFGSYSVITSALNAFIDKTYKTKKEKEKQQKKSYFSIAEIEAALKAYLQETEIENKEKREEVLKQANPVLQYFNSLTTSIEINNKKEKVNVIVHFNQQHEAVQPVLNKEYASNSELINAVAAIKNYLDSYQHILHFVKPLFVAPPKKENAEMPDKDAVFYNEFDELFDQLKSVTPLYNKVRNFMTQKPYSIEKFKLNFENVSLLKGWDVNKETDNTSVIFRKDSLYYLGIMDKEYNRIFEEIPAASGENDFYEKMYYKLLPGANKMLPKVIFSDKWIDYFKPSKELVEKYEKGTHTKGNNFSLTDCHALIDFFKASIEKHEDWKKFDFKFSPTETYQDISGFYREVEHQGYEINFEKVSAKYIHELVSEGKLYLFNIYNKDFSPHSKGRPNLHTLYWKAVFDEENLKDVVVKLNGEAEVFHRPASIPEKSKIVHGKNKPINNKNQNNHKKQSSFDYDIVKDRRYTQDKYQFHVPITLNFKSGDIFKFNDLANETLKANLSNINILGIDRGERHLAYYSLINSKGEILEQESFNIVKNEYNGTKYETDYQASLVEKEKARDAARKSWDTIGKIKELKEGYLSQVVHKIARMMIEHNAIVVLEDLNFGFKRGRMKVERQVYQKLEKMLIDKLNYLVFKDCEAAAPGGVLNAYQLAAPFESFKSMGKQTGFIFYVPAANTSKIDFATGFVNFLYPKYENEKQAKEFLGKFENIRYNPDKKYFEFVAKYNNFVTDEKATLENDREWIICTYGKERWHFNPKSKTDKSTPQYVCEDITENLKKLFSENKIDFKGGKDIKETIIEKFNAKFYEGLMWNLRILLQLRYSYKEGTEEKDYILSPVAPFFDSRNAKESEPKDADANGAYHIALKGLLQLQKIRTGEKKLAISKKKWHDFAQERTYRK

SEQ ID NO: 863 - protein, 1264 aa, unidentified
  REGION 1..1264: note = Cas Enzyme sequence
MEEYMSNTKDNIFNNFTGIYPINKTLRFELRPVGKTYDLIKDFKNGYVESIVAIDEKRSEARKRIIEIIDEYYEEFINTVLSKKVFYSDDIWQTYTSYKAYKSDKRNKEFVTQKAIMRKKISDAFQNEKTKFNLKDFKDLFGKKSNLKESPLYKWYKNKLDIGEITGEDFEDIIKIITYFIGFTTSLKDYQENRNNLFVAEEQSTAISHRIIDVNMIRYFENCIRFENMKDSELLEDMGKWEKYFVPANYDNFFTQEGIDNYNEIIGRKSKDLYYKGVNQLINEYRQKNKIKNKDMPTMNQLYKQHISKNGDNEINNDFSNEKEMLEQIEQAYITSLDKINRIVSFINENITEGNKIFIRKDFVTNISNRLFGEWNFINNALYSYLSGLSAKNKELFVKQTEEVIKISELQNIIDLYINNLDEDEKEKYLKTDAIYTHFCSFDVCGVQNAYYEAKTVLAVDEINKDREKEEEGAKQISKVKKLLDEILEAVHFYKPLYLYKNGKEIDEIEKDEIFYSEFDYLYSQLMLVTELYDRVRNYLTKKPYSKDKFKIYFNKPTLLDGWDLNKEKNNLSVLLIKDGFYYLGIMDSKYNSVFDVSADDVKINTTELSEEATFLKMEYKQVSGASKMFPKVFFAASNKDMFKPSEEILNIRENKQYLKGANNREAVIKWIDFCKDCLKIHPEWNRYFNFNFRHSDEYENVNSFYEDADTQMYYINFVKFKETYINDLVEEGKLFLFQIYNKDFSEYSKGKPNLHTVYWKMLFDENNVRNINDNTGKPVFKLNGEAEIFYRKASLDKKVTHKKNYPIKNKNKHNNKTESIFEYDLYKDKRFMDDKFFFHCPITINYRAKNILSSEFNKKFNLHIKNSDNMNILGVDRGERHLLYYSLINIKGGIIKQGSLNTIYDSYEKDGINIPVITDYKSILKDREDERMDSRKNWGTIKNIKEMKEGYLSHVVHQVSKLLIDNNAILVLENLNSGFKRRRLKIEKQVYQNFEKSLINKLNYLVLKDADNKDVGHFLKGYQLTAPFEGFQRLNNQSGIIYYVWPSYTSKICPRTGFVSLLHINYENIEKSKEFFNKFDKISYNKDKDYFEFHLDYTRFGKNAGKNKWVICTYGKDRYFFNQKLKKYEYIDITEKIKELLSNNGIDFINENDMRKSIVENNSKNFFGSLLFYLKVVMQLRYTNSNDGCRNENDYILSPVADINGMFFDSRHACDNEPENADANGAYHIALKGLRMIQFIENGVITKQGNETTDWFKFAQNKL

SEQ ID NO: 864 - protein, 1264 aa, unidentified
  REGION 1..1264: note = Cas Enzyme sequence
MEDRYMDFTKFQKLNSIIKTCSFEMIPIGKTRETMEKHNVIEEDAERKSNAELTKEVSDSFIREFIADYKEDMDWKDLYDAYGEDRARFTDIMNQKAEKLAKRFSDSFNEYINTFLKANGINDKKSKWSDSGYVDVVLPLYVSIHPDFSNDKYERAVASLLHCSNSLFKKYTTSYARIIAGTKKGSFADRSMENFQTACANSVMFDLISRNLSSVGSHDAFKEVFADAPLNMNEYLSQKGISRYNEFVGDSFDESGQVIRYGVNHYINEWNQTHPDERMPKMHKLKKQILSIVEPSFRIRTINDETELFGTFDNIRTAEQRYAGMLESILENMNTADIYDKSGILVTSAERDSLANAITGEWSYFRRQIKEEEENRIREEYLQKKNRVKTKLTQKDNKQIEDALNKSIYSVADLNKMLGSDFGTIEEKLLDEYIRNKSKKESAYAQLVKTDFYDKKTIPAGDDVQRIQQYLDKVLSLTHIVRGLCADSQDPRTDFVFSDDVSSLEDDRVQIISCYNLIRNFVTKKREKTAKEKQIQLCFGRPAHFEQVWNNKQEGKFGNVDAALLEYAGKYYYMVPAAKNEAKLNFPVTDEPQMGECYNYLATKKAIGFAKAFAKFYIKSPEAMEGFEKTEEPFEISVGNDTMIISRKVYEDYEAKTFRESEEAKNKLIDCAKEFLSKNLSYCIYDWSGLKETKDYVNYGEFCNEVDSIAFRVINRYVSKKLVDDAVERGNLYMFEISSLDMYKDSSRMKNIMALRFNQIMNGMFTGDKFIIINNAPQIRYRPVVIEKKDVHPVGSRLVNKNTTDGRTIPGDVYLELCAYYNGKKDSLSPEASLYNEKVSVKDSDRAHIKDKHYTEEKFLITFSYTANKNVASATSGYQLNEMVRKEIRENGCNIMAVIRGIDNLLYYAVVDENGNRIEAGDLNVVGDTDFYEKLTILGKQRYTDQKNWKHENKVADLKDTYLGQVCRKIASIAVKNNAVIVIDKINERTKRKNAAFDNNMYRKFENALVNSLTDYYDIGIRGDEPGSVKNPLQLTVKEDNGFQNGIIFYQFDTFTKNICMRTGFVNLLNTFEIKTVASKVAFLKKLSGIYYDNDINEFVFEFTWRNIGCILKDEELSLYNGMDKIWKVRTHFTRYMRNAEKNKYVEIDGTEVLKELIRKNHPDMIGGKIDVDRLTSEEVKKVFEIFTLYTNGYIPRMDDAESGYMSPACDWNNFGTIRYDEMTALQLAKKSSLMIGKVKSGKDWKDMNVSRVEWLNHVLKADW

SEQ ID NO: 865 - protein, 1264 aa, unidentified
  REGION 1..1264: note = Cas Enzyme sequence
MFKLLPDITGIVFFYRDSWRGYEEVITVDVVFYIGGNVMANSLSGFTGLYSLSKTLRFELRPVGKTKENMKIKGLLSEDEHRAKSYKQVKKIADDYHRKFIENALKNVHLEGVEEYAELYCKRNKTEKERKEIDKAADNLRKQVIKLMTTRDEFKKLGKKDFIEEMLPEFVDSEEKKKLIKEFKGFTTYFGGFFENRNNMYSAEKKSTSIGYRVIDQNLPKYIDNVNALKKILEVNPGNMIENIENDFMDMLEGKALNEFISLDNYSYFITQSGIDKYNTVIGGKSCDERTRIKGINEYVNLYNQKADKKIGILKPLYKQILSDKDSKSFLPESFERDNELLNAIELFNAGQKENIESIKGLFEQLSEYEADHIYVKDIFLSEISNELFSEWGYIKGRLEDKYDEEYTGKKKANTEKYIEERKKYFKNKRSYSLSELDAVLENNAVTSYFSGEQLKQAIINMADSYKDIEDLVNTDYPSDRKLQKDKESTKLIKGYLDACKDFGRFIQPLLGDGKESEKDAAFYGKFTPAWEAFDSITPLYNKVRNYMTKKPYSTEKVKLNFENQTLLAGWDLNKEEGNKSLIFIKDNNYYLGIMDKQHNKIFRDVEEAKSEPYYRKMEYKLLPGANKMLPKVFFAKSNIDFFNPSNKILEDYNAGRHKKGDNFDIKACHALIDFFKEAIEKHQEWRQFEFEFSPTETYKDISDFYREVEAQGYKISFKNISEKYIDELVDEGKLYLFKIWNKDFSPHSKGTPNLHTLYWKMIFDEKNLQDVVYKLNGEAEVFFRKASIDEKDIIKHEANKPIENKNKLNDKKKSVFNYDLIKDRRYTVDKFQFHVPITLNFKALGRDNIDRYAREYIKEAKDLHIIGIDRGERHLLYLTVIDMDGNIKEQYSLNEIVNEYNGKEHHINYHDLLDKREKEMERAKKEWQTIESIKELKEGYISQVIYKISQLMIKYNAILVLENLNEGFINGRKKVGKQVYQKFEKMMIDKLNYLVDKNLEEGEAGGLLKAYQLASKFESFKKLGKQSGMMFYIPAWNTSNIDPCTGFVNLFERKHLKYSSVNAAVDFWSKFESIAYDDKGEYFKFSFDYSRFTGRAEGTKTDWTVCSVGERIVNFRNPDNNSQWDSKTVDPTAEIIELCRGYDIDYKSEDLKTEFVSVKDRRFHEELLRLFRLVLQMRNSVTGTEIDYMISPVANAEGVFYDSRNCKKNLPENADANGAYNIARKGLWIINRIKETKEAELNKVNLNISNKEWLNFAQKNILR

SEQ ID NO: 866 - protein, 1264 aa, unidentified
  REGION 1..1264: note = Cas Enzyme sequence
MNRDISIFTNIFQVAKTLRFELIPQGNTFKQFNNNNFINKDEHRAESYTIVKDIIDDYHRDFIDVALNEVQLTDLDAFYELYFSPNKNNSGKQQLIDIQTRLRKQIANRFSKHPDDRIRKRYFNIFKKELITQDLHNWILTNKEESIVGEFNKFTTYFRGFHKNRENMYSAEEKSSAISYRIIHENLPKYLDNLKVINLIKTKYIDFNFEQISELCELLDIQSIEKYFTVSSFNNTLTQLGISKYNNLLGGYTKKDKKIQGLNEVINLYRQKNHLAKKDLPNLVPLYKQILSDRSTISFIPNSFDNDQELIENITKFYNEEIIGWVFEKNNLLRSIKKLIEQLAQFDITKIYIKNDSSLTNISKKFFGDWSLIRNALRDYYMIKINPKPATLTKKYENLVNGFVNNSKYFDIEVIEKAVLLYQEHHSEIVANISKHPICNYFANFEQEIRSDNKTVKLNIIDRIYSSYENIKSLLENDYPIEKKLIQDSKNKVKIKEFLDNINTLRWYIKPLQIGQDIETKDVGFYNDFIQLFDQLSKITTLYNKTRNYLTKKPYSTEKIKLNFENSTLLSGWDANKEKDNTSVLLIRDDKYYLAIMDKNHNKVFENIPKSGDMEFYKKIHYKLLPGANKMLPKVFFSKSRIDYFAPSNEIIKNYKKGTHKKGNLFNIKDCYALIDFFKSSINKHPDWKNFNFNFSDTMKYNDMSDFYKEVEQQGYKITFVDVPVSYIDQLVNTGKLYLFQIYNKDFSNYSSGRPNLHTIYWKMLFDKENLNDVVYKLNGEAEIFYRKRSLNSDDMAVHKAGSKLANKNKLNQKQISKFKYDIIKDKRYTCDKFQFHVPITLNFKASGQTNINSRVNRYLKNNSDTHIIGIDRGERHLLYISVVNQKGQIIEQYSLNNIINNYNNNTYGTDYHQLLEQKEKERKQARVNWSTIRNIKELKQGYLSQVVHKISGLIVKYNAIIAMEDLNFGFKRGRIKVEKQIYQKFEKMLIDKLNYLINKKLALRDVCGPLNALQLTNKFTSFKKLGKQCGFIFYVPAWNTSKIDPITGFVNLFYTKYENISKAKLFFKKFDSIRYIARKDHFEFDFDYSNFTLKGDGTKTQWTVCADNRARYKWRKKLNNGKGGYEMLEVAKMISELFESKNINFRNGEDLISQIIAQKNLNFFRQLIKLFTATISLRHNNGKKGRDEEDNIISPVYPFFNSKYAKENQPVDADANGAYHIALKGLWAKHQIDKSENLNKLKLAISNKEWLNWIQKRPFSYER

SEQ ID NO: 867 - protein, 1264 aa, unidentified
  REGION 1..1264: note = Cas Enzyme sequence
MENYGGFTGLYPLQKTLKFELRPQGRTMEHLVSSNFFEEDRDRAEKYKIVKKVIDNYHKDFINECLSKRSFDWTPLMKTSEKYYASKEKNGKKKQDLDQKIIPTIENLSEKDRKELELEQKRMRKEIVSVFKEDKRFKYLFSEKLFSILLKDEDYSKEKLTEKEILALKSFNKFSGYFIGLHKNRANFYSEGDESTAIAYRIVNENFPKFLSNLKKYREVCEKYPEIIQDAEQSLAGLNIKMDDIFPMENFNKVMTQDGIDLYNLAIGGKAQALGEKQKGLNEFLNEVNQSYKKGNDRIRMTPLFKQILSERTSYSYILDAFDDNSQLITSINGFFTEVEKDKEGNTFDRAVGLIASYMKYDLSRVYIRKADLNKVSMEIFGSWERLGGLLRIFKSELYGDVNAEKTSKKVDKWLNSGEFSLSDVINAIAGSKSAETFDEYILKMRVARGEIDNALEKIKCINGNFSEDENSKMIIKAILDSVQRLFHLFSSFQVRADFSQDGDFYAEYNEIYEKLFAIVPLYNRVRNYLTKNNLSMKKIKLNFKNPALANGWDLNKEYDNTAVIFLREGKYYLGIMNPSKKKNIKFEEGSGTGPFYKKMAYKLLPDPNKMLPKVFFAKKNINYYNPSDEIVKGYKAGKYKKGENFDIDFCHKLIDFFKESIQKNEDWRAFNYLFSATESYKDISDFYSEVEDQGYRMYFLNVPVANIDEYVEKGDLFLFQIYNKDFASGAKGNKDMHTIYWNAAFSDENLRNVVVKLNGEAELFYRDKSIIEPICHKKGEMLVNRTCFDKTPVPDKIHKELFDYHNGRAKTLSIEAKGYLDRVGVFQASYEIIKDRRYSENKMYFHVPLKLNFKADGKKNLNKMVIEKFLSDKDVHIIGIDRGERNLLYYSVIDRRGNIIDQDSLNIIDGFDYQKKLGQREIERREARQSWNSIGKIKDLKEGYLSKAVHKVSKMVLEYNAIVVLEDLNFGFKRGRFKVEKQVYQKFEKMLIDKLNYLVFKEVLDSRDAGGVLNAYQLTTQLESFNKLGKQSGILFYVPAAYTSKIDPTTGFVSLFNTSRIESDSEKKDFLSGFDSIVYSAKDGGIFAFKFDYRNRNFQREKTDHKNIWTVYTNGDRIKYKGRMKGYEITSPTKRIKDVLSSSGIRYDDGQELRDSIIQSGNKVLINEVYNSFIDTLQMRNSDGEQDYIISPVKNRNGEFFRTDPDRRELPVDADANGAYHIALRGELLMQKIAEDFDPKSDKFTMPKMEHKDWFEFMQTRGD

SEQ ID NO: 868 - protein, 1264 aa, unidentified
  REGION 1..1264: note = Cas Enzyme sequence
MIGMAIYDNMYGIYSIQKTLRFELKPIGKTKEVIDAIDIDSNSSIFVDDQRRYDEYLSAKALLDNYYRDFVNEVLSSFTFLPTDLKTAFLLYSQSNKDDSKNDNAKELVKVQTKMMKELSATFKQSSGDFGLDGYQKLFGNDQKPLNKWLKNEFEIKHSITKEEYDKAVEVSSLFGSGFVGYFNSYKKARDNLFEAEGNSASIAHRVVEDNMIIYFKNCLLFATIKEKYPDLFENINNKTIMKAEDYNDLLTQQNINQYNAIIGGDKEQKTVGLNGLLNQYRQAKNLKSRELPLFLPLFKQILSEKEGYLINDYNNDEEMLNEIKSLYNKYLSDLSSIQSLCQEYICDDNKLNIFITTKALSSMSQELTGDWSVFKSSIDSSTITYTKKKQDMYKKTISLGELQTFYDKYNQSLDEKKAPVSFISYFANYDISHIKTLYEDCIPIFESKTICLQEMLSPKERVVKKDEEKIVKLKTLLDHMIEIIHHYKPLLLVENHKQIELKDEDVDFRTQFDELYSHLNDVFFLYNRVRNYITQVKDNKKEKIRQYFDCSSLLVSWGCSFNNNDCALFKKGNLYYFAKCLCKISDVSLGKLFNAQNKGDAFYYKYFQQKLDVKNFPRCYIRSKGISIAPRVEQYNLPIQDILDIYDQGTYKKDVCDAMGLNEKTYRKNLGKLINYYKLAISKDELYKGCTFSFKDTSAYNNIKEFAEDAINSSYYLKKISINFDELLKMAELDQILLFQVYNKDYSEFSKGKPNIHTIYWNAVFDDYNLSLAGQPAEAMHKLNGGAQIYHRKASVKYKETHPKDQPINNKQIINNKITSTFNFPLIKDRRYTMSKTLFHCPITLNHKTRGFGKSYVGFNTIVNQAIRDEKVNYIGIDRGERHLLYYSVIDNKGNILEQNSFNILREEKDGTTWGVNYNQILTTIDNDRKEARKNWKTINQIKDTKSGYLSQVIHKIVLLMLKYNAIIVMENLNISFKRSRVRFEKQVYQNFEKALISKLNYLVLKDKKIDEVGGALKGYQLTYPIQTLDKVQSQNGVILYVNPAYTSKIDPTTGFVSKIHLKYENLDKAKKDFNLFKSFRFNPKEGYFELSFDYKDFGNIDMSKTDWVVCSYGAERYYYNKQTMKGELVDITQTLKGLLLSKHINISDGKDLKNQILISFEPSEYKTLFWAINILLALRYETSSGSLDQDDYILSPVKNSQDYFYDSRKANHNLPNNGDANGAYNIALKGLYSTRNMQDEKIESISNSEWFRLVQNRQWNKE

SEQ ID NO: 869 - protein, 1264 aa, unidentified
  REGION 1..1264: note = Cas Enzyme sequence
MNIKFNKFTGVKPVSKTLRNALIPTEFTMVNLERNGIISADELRAEKRQELKKIMDDYYRDLIERTLAENHSINWHILFELMKSKMHGDEKDTAKKLENEQKSKREEIHRLFAEQEEFGKIFSAKLVSDILPGFVASYAMYNDEDRTEKAEVVKLFNKFMSSFTEFFENRKNVFSKENISTSLCHRIVNDNALIFLNNMDSYKRIMENFKSESELVSKGLETMLGEWKISQIYSEDFFGMTMTQSGIEFYNDICGELNLVLNLYCQKSKKNSARFKMKRLHKQILCTEKSSFEISYKYDNDKDVYTSVNGFIKNIKNNNIIERLLKLGTETEQYDLNKIYISSQSYETVSIAIGGTWETIRNCLTSWYDDNIKGSGKAKENKIKAVVKADKYQSIARVDYLTETYNASGTDLQKAESYLSHIVQIIGDYEPEELYFDESIHLIENGDKISEIKKILDIYIDVVHWIKTFEISESVEKEPEFYYELDDIYDKILDAVPLYNKVRNYVTQKPYNQEKFKLNFDSPTLANGWSKSKERDNNAIILSRDGKYYLGVFNVRNKPDKEILEGHSKPKNETDYAKMVYNLLPGASKMLPKVFLSKKGIDNFKPSDYILEGYIKKKHIKSSETFDIKYCRDLIDYFKNSISRHPEWKNFGFNFTETSKYNDISEFYKEVEKQGYKIEWTYITEEDINKLDEAGQIYLFQIFNKDFAVGSKGTPNLHTLYLKNLFSKENLDNVVLKLNGEAELFFRRSSIKTPVIHKKGSILVNRCYVDADDGKRKPIPEKEYMEIYNYCNGKRDTELSESARKYYNISQRYEATMDIVKDYRYSVDKLFIHLPITINFKATENKNVNDMVLEYIAKSDDIHIIGIDRGERNLIYVSVIDMHGHIVMQKSYNVVNEYDYKTKLKECEQGRDAARKNWKEIGKIKELKEGYLSMVIHEITQLIIEYNAIVMMEDLNFGFKRGRFKVERQVYQKFENMLINKLNYLVDKHKAVDEPGGLLNGYQLTYIPDRMSELGRQCGIIFYVPAAYTSKIDPTTGFFNAFRFNLLTSAESRRDFLNRFKCIKYNGSMNMFEFDFDYNDFITHNTTIARTQWKVFTNGGRIKNIISKSGWNGTKKIDDITALMKEIFDSRKIDFSDGGNLLPEILAYEGADKDKFIVELLDIFKLTVQLRNSMLDGSDIEYDRIISPVINENNTFYDSDMYTEPNSPLPIDADANGAYCIALKGLYEVNQIKENWKEGETFPKSVLKLNNANWFDFVQNKRYE

SEQ ID NO: 870 - protein, 1264 aa, unidentified
  REGION 1..1264: note = Cas Enzyme sequence
MAMSHISDFSGLYPLSKTLRFELKPIGDTLKNIKASGILEEDHQRRKDYEIVKKVIDDLHREFIHSTLAQVNINWKHLAEAILSGDDKLLEKEQEKKRKELINYFDEQPDNEKLFSKELFTELLPKMLDKQKELPPEEKTEKLRAIKAFDKFSTYFKGFHENRKNMYSDEKKSTSITYRTVDQNFPKFLSNIRAFEFIKENAPSIIEQTEEELSELLEGHRLNDIFCLDYFNKVLTQKGISFYNTIIGGLAGEAGAKSVRGINQFSNLHKQKNPEFSKTKQAKMVPLFKQILSDRVTFSFIPKSIEDDKELIGIVTELLDSLKENDVMKKLQEFFGQNNISSLAFEKIWVSESEISNISSLLFGSWETISKSLFAKKENEIGSAEIEKNRKKIEVYLKSKSFSLNEIDDALSFNMESLPEDKQTLRMVDYLKSFDLIHKNITDNTKEFSLLQGDVALNLAENEEQSTLVKRLMDSLILVVRFLKPFTNIERMEIDTDFYSEILPIYEQSMPILTIYNAARNYITRKPYSTAKFKLNFKNPTLLDGWDKNKEQDNTSIILIKDGMYYLGVMNAKNKLKAEELDGDGNKDVFMKMNYKLLPGPNKMLPKVFFSKKGLETFDPPESILRGYQKGLHKKGDSFDRRYCHKLIDYFKEAIQQHPDWSQFGFNFSDTSSYEDISGFYREVESQGYKLTFTTLSDEKVNKWVKEGRLYLFKIWNKDFAPGSTGKPNLHTLYWKQLFDEKNLSNVVFKLNGEAELFYREKSIEKPVLHGKGSLKVNKRDIDGRPIEEETYNEILLFANGKKKREALGESARSLIDNQKVRISEFKFDIVKDRRFTEDKFAFHVPITINFSTFGNPRINSEVNLFLKNNPEIKIIGIDRGERHLIYLSLIDRKGNIIEQRTFNSVNEMDYHEKLDQMEKARDKARKSWQTIGKIKEMKEGYLSQVIHEIACMMVKNNAIVVMEDLNFGFKRGRFKVEKQVYQKFEKMLIDKLNFLAFKDREPEEKGGLLKGLQLTEKFESFEKLGKQSGFLFYVPAAYTSKIDPTTGFSNLFNFSELSSKERQKEFLLNFDAIRYDSKCDCFIFDFDYGKFKTFQTSFVNKWSVFSHGERIRNFRNKSNKWEIKRTLPTDEIKKKLIEGKINFGNGHNILEDLGHMDKKLSSDIFYIFRDIMQMRNSDPKTGDDYIISPVMNSSGAFFDSRKSEGYLPCDADANGAYHIALKGIYMLNAIDEKLKPDGRIDYKSMMVGNKEWFEFVQSAPFRD

SEQ ID NO: 871 - protein, 1264 aa, unidentified
  REGION 1..1264: note = Cas Enzyme sequence
DGVTFDDAVAHIYEGCDRLDVLPYVEHYVIEQTQKGEGAIQQQGRELLPKLCNSDFEGNFDYSIKERKANSGKQKLLRELNRDDVSDEELYALAQEMDLSWVVKTIPNENHDEPLYYDPEEQEEKVITSIHKLLSSLDNGNLKIATLPKYVQIDGFREQMRQDLLNRMPLKGLRLAKSSRGISVDVEQAGIYFMFYPGRISAAHLASKLGKEKPKKTDEVREYDCFSLENDPLILARGKRGYVYKGFSALPNWESSDNRMYSKEWDILAFKEALKTLHGFELKTKERDAERAKYVAQLEYVERGKKTKDYVEPDEEKTVAVLGGDYRFELLKKLVAEISPDPVTEYHISSRTLNDYEEVRALWLKRELTGDCSSHDLSKIVREYQAKSKRFGSQVLFAALCQDEYRPIWHDYHALKDEKLPRSKNILRDFSNWQYLCGQVEKYSRDVRVTAADVVASPRQMIYSDLSNFGNGKGCEYIPGCEGGLRMQVVVRNAKGHWETDSIRVTFSAPRFLRDEMGQDAGKWMVPKKGENTTLPWLQPMMKALGDDIAPVRLERTPAIGLQVWGQGSEACYYLNFPVSLDVSALQKSLGKAARWAGQFLGGRDEKLHLHWPATYKGKNRPWWEQEKEFTVLGIDLGLRSSVAWSLLRVSTCSTSSNSRGDELIGRLIGDSSNAKWYGYVIKQGLSRLPGEQPRRVGDKKIPAVSLASPEDRRIAKLIIEAAGAQFDENESEDVLRLGNRTLKSFKSLTSRLKTYLSFLSGLKDPGRKPAVLKRMADYFAYAEIIPGVCVLLEAHQEDEVYERVLDAAEELRSMLPKYAERVTSLILPRKHGSWKWEPERRKGWQGSGVMRLTEEDGIPHRPVFHRGGLSVARLTQLETLRQLLQSMGKVLSFVPGESVTFGRRLKDEKVIDPCPEILEKIENMREQRVNLIAHDIVAQALGVRLKSSRPHKNSGGLDVIHGEYERIHGREPVDFVVMENLSRYLTSLDRAPLENSGLMRWAHRQIVAKVTQLLEEIFGIPVVFTHAHYTSKFDSMTSEPGFRPVMLKPEYLKWLQRNGKGNECKAAAVYQAIWDEVVNASKTKKVTLVLPHLTKGGELANGGELFLSQKGGKFTLRNADMNAATNVAWRGLAAPESLHLLHRVRMEMKKAGFVPVCDNAREKSLKTGWSLTKLKSIQPEGNKISAFAVSSEWKDEYFAAYGNAETRAYLAYGKTLWGIMKRKQWQMCHLFNIQQLKNAGIDARLVEQLLHTDENDTSDDIPT

SEQ ID NO: 872 - protein, 1265 aa, unidentified
  REGION 1..1265: note = Cas Enzyme sequence
MKHLSDFTNKYQISKTLRFKLIPIGKTEEFIKRGQFIENDERRENEYKKIKGFIDEYHKLFIAEILSSLKLPLCQIESLYDWYANRGSDPERKKNIKDIQAALRKTIANAFTKDKRYEKMFKKEMITEILPNFLTDEQDKSIVNNFKKFVSYFVNFHNNRKNIYSGEEKSTAISHRIVNQNLMKFFDNHTIFSSKVKSTLPDSIIMAIESDFNDILCGKSIEQLFSLDNFTHTLCQADIERYNAVIGGRTVESKNKEIKGINQYINEHNQICDKGDRIPLLKPLFNQILSDREKVSFVIEDFKKAPEAIHAIFDAYNSVISAQISKISTLLKSLNDYNLDGIFIKVGKDSSLVSARHFGSHSLIADTIAENWEKEHPRGKTKPATYQKNKDKYLKTVTSISLGAINSFEKGAPIENYFMALGETDKPERQEISIPDKIKIAFSEFEKAFPEPDKCTTEYLQSNVATIKSLLDLIKEYQWFVALLLGNGDESEKDENFYGEFTPSFEQFEQVITPLYNKVRNFLTKKPYSTEKFKINFENVTLLKGWDENKEKDNASIILRKDGLYYLGVFNNNSANILNNIWPCEGECYEKMVYKFFKDATTMIPKCSTQLNKVKEHFAKSCADFTLFDSKTFTSPITITKEIFDLNNITYDGKKKFQKEYLEKTGDQKGFSNALSTWKHFCLQFLKAYKSTANYDFSEIERNIDSYSDLPLFYQELNNFLYKVTFERVSADFIHQLVSEGCLYLFQIYSKDFSPYSKGKPNLHTIYWRMLFDEENLSNVVYKLNGEAEIFFRPSSIKCTGPTHLANQPIENKSEYNKKNKPNSTFGYDLFKDRRYTKDQFEFHAPITLNFKQPKPSMFNDEVRTFLKENGVRHIIGIDRGERNLLYLVMVDLDGNIKKQISLNNIASNPNNTEFKQDFHAILHNREGDRQEARRNWSTIQNIKELKEGYMSLVVHEIVKLMLKEDAIVVLENLNRSFMQIRGGIEKSVYQKFEKMLIDKLGYIVDKDKVPTENGGALHAIQLADTFENYNKYQSGIVRQCGFIFYVPAWCTSKIDPTTGFVPMLKCKYENIESSQTFFSKFDSIRYNEAEEYFEFKTNYANFYTSSKGGKQQWNICTFGERILTQRAKDGHFESKTIALAPAFKELFAQAGINIQGNIKAQIVKQNDASFFKELHHLLRLTLQMRNSNSTTGDDYIISPVKNKDGEFFDSRRSGEKLPQDADANGAYNIARKGLMLMQQLNDTKANSKFKPDISNEKWLEFAQK

SEQ ID NO: 873 - protein, 1265 aa, unidentified
  REGION 1..1265: note = Cas Enzyme sequence
MNKKTTNSIFENFTNQYSLSKTLRFELKPVGKTEEMLKDNDVFSADKLRHDRYVEIKLYIDRLHREFTDEALQDINNDLCDMFRPLYEKYESQKQLPKRSDEYRQASDELYKIRLEAKKKIIEVFDNKARDWKKKYGLFKKDGLKILFEEAVLDLLKIRYPEAKKVFDPVKKEEVTVFDLYKGFFTSLGKYNQTRDNLYKIDIPTAHAVRLIDQNLLRYFDNYDIAIKRYREHKIDFEETCLSPKVYHRYLTQSGIDSYNSTIGEINALVNEFKQNNKGIKLPLLKRLDKQILSLVEIEENELTKDNFFSELNDFVADTDVRLRKAKELFVKLFNECNGFDLDRIYFSKKALNTILHKYFTASARFALEQKISKLSGGNKNKEGKYTLSSNFYSLQSLKGSLEDIGIAEEIFKDEAISASSSWEKFSRLFLQEIDSLFDEYINAGEKAKVVIDGNIFPNGTTEKEKAAKGDVQRYLDAVRTLYAVFGYVALEYKRQWKDELPQDDLFYGEFKDGFYDNNRTITFYNQTRNLLSQKEWSEEKWLLNFETGNLLNGWPDSPEGNTQYKSFIFRKHGIYYLGITDHARLFDRSRYPEAYHSNDNVYEKMVYKQLDGKTIYGSVYMGMFGSKYADDKKSKNVGEMQGRIKDILLTKVQDFPELKYIIDKINNKDYDGLNEIAVDISKLSLYKISFKRVSGEYVEMGLYRNKNKTHKLYLFQILNRDFTSKKNGSKNLHSLYFEGLFDDSLNLKLDGGAEIFFRPASIEAVVDKDRKTKHDVIVKKRYTEDKILFHLPITLNRVSKKIDSPRLFNESINQAFSKNIDDIAVIGIDRGEKHLLYYSLINSKGEIIEQKSLNEVNGIPYYRLLRDAERKRLEDRRSWNSARKIKDLKKGYVGHVVKELVDLVIKHNAVIVFEDLNMRFKQIRGGVDRSVYMQIEKALLNKLNYLSFKNRKPSEIGGIANGYQLAPLIKKESDKRKQAGIVLYTTAEYTSTTDPVTGFRKNIYLSSGTKQKDVSDIIGKFDAIGWDDKLQSYYFVYEPKNFESKTNKKKEDYVGKPWCVYADAPRVKREKNKESGIWEYELVNPNDMLRSLFSVWGFTQLEGDIKEQILEMEQEGLLSGKKQFDGKERTFIASLVYIFNLILALRNSFAKKLLINKKTGEVNEIGDDIDFIASPVAPFFSTYAKSDKYGELSPLNLAGLDQKIIGEKKAEIKEEFNGDANGAYNIARKGLLMLQKIHDDPQKPDLYISINEWDKFAQSQNKLD

SEQ ID NO: 874 - protein, 1265 aa, unidentified
  REGION 1..1265: note = Cas Enzyme sequence
MIIEKIMEKKTLEKFTNKYQLSKTLRFELIPQGETLLNIEKSGLLKQDEQRAENYKLTKKIIDEYHKDFINKVLDGLKLKDLDEYFDLYKIAKRDDSQKKQFEDAQCKLRKQIAERFTKHPNQELQVKFKNLFNKELIKVDLLNFVKTADEILLVKGFENFTTYFTGFNENRANMYSAEDKSTAIGFRLVHQNLPKFIDNKGIFEKVLESPVHEKFPLILSELESVLQVNKIEEIFDLDYFSETLTQIGIDKYNYLLGGYTSDDGKTKIQGLNEYINLYNQQVKDKKLKIAKLKPLFKQILSDRNAISFLPEEFKTDAELLESVEQLYQELNTLVLQLQNNDSTTLPILLKQLPEFDLSKIFIKNDLGLTDIAKKMFGNWGVFQQAVNADFDNNYKGKLKKETEKYEEEQNKYFKRFDSFSIHYLNQSLLLLNDPKYSKNIAEYFAQLGEVKADNTVSLFEQVTLKYEIAEETLKTYDVNNNLSQDQFSVDKIKDFLDSIKAIQHFIKPLLGKGNEPEKDEKFYSEFEKLWQILDQVTQLYNKVRNYLTRKPYSLEKIKLNFENSTLLDGWDVNKEEANASVLFVKEGNYYLGIMDKKHNKVFREIPKTKSTENYQKVNYKLLPGASKMLPKVFFSNSNIGYFAPSEEILRIRNHGSHTKNGQPQDGYDKLDFSVTDCRKIIDFFKASINKHNEWTNYGFEFKPTIQYESIDEFYREVENQGYTISYTNIGDDYINQLVCEGKLYLFKIYNKDFSPNSKGTPNMHTLYWKMLFNNDNLKDVVYKLNGQAEIFYRKRSIKSENTIIHKANQVINNKNELNTKKQSTFTYDIIKDRRFTLDKFQFHVPITLNFKAKGIGSINTDVNQEIQHEGISHIIGIDRGERHLLYLTVIDLAGNIKEQFSLNEIVNEHNGNNYKTNYHNLLDAKEGGRDEARKNWKTIETIKELKEGYLSQVIHKITELMVKYNAIVVLEDLNMGFMRGRQKVEKQVYQKFEKMLIDKLNYYVDKKKNPTEIGGSLNALQLTNKFESFQKMGKQSGFLYYVPAWNTSKMDPVTGFVNLFQIKYESIEKAQAFFGQFKAINYNSDANYFEFSFDYSQFTNKAEGTQTNWTICSYGMRIKTFRNPAKNNQWDNEEINLTEAFETLLNKYAIKYKSIDIKSGILNQTDKAFFEELIFLFKLMLQMRNSITNSTIDYLISPVANASGQFYHSDKAASNLPQNADANGAYNIARKGLWVIEQIKQTVDLRKIKLAITNKEWLAFAQKK

SEQ ID NO: 875 - protein, 1265 aa, unidentified
  REGION 1..1265: note = Cas Enzyme sequence
MLEFINKYSLQKTIGFNLIPQGETLNFINSREFLERDEIRANSYIRVKVLLDNCHKDFIENILVNVMLYKLNEFNELHLIKFKTETERKELKKLKDEMLNSISSKFQKDSLYKILFKEELFSKHLPNFVETEEDQEHIDVFKKFQTYFTKYNTSRKNLYSNEDKSSTVASRIVNDNLPKFLDNLKNYTDIKKAYPDFDFKTIEEGLVEILKGNSLDDVFSIGFFNSVISQSGIDFYNTILGGRTEEDRVKIKGLNEAINLYKQANKLPNNKISHFKPLYKQILSDRISDSVIPMKFESDIELLESICNYYENIMCSFEDSGRKVNVFNEINDILKFSQYDTSKIFIQRSSFGNISTKLFGEYSAIDSALENYYTNVLVPIPAKPTKAYETKMNQWLKLKYYSIDQVHQAIEFYKTQVEEVADKGTILDYISSSDKLIEAVEATYPVVKELYMTHGNLNEGVKDSPEKVLAFMESIKELHNFTKPFLLKDDTDKIDKDEAFYVRFTTLMEVLDQSIVLYDKTRNYITKKPYSTEKLKVKFDIGDFLKGWSVDYKSKGAMFFIKDGKYYVGIVDKLFTDEDRNIINENPHENPITRIINDFQKPDFKNFPRIFIRSINKPERQQIAPAVEKYNLPVDEILEIYDKGLYKTKHRDINPVEYGESLTKMIEYYKQAIRRHESYCHYAFNWKESCEYNDISEFFKDSEESCYQLIEEVVSFDGLLKLVEQGKIYLFEIYGKDLSTHSKGTPNLHTIYFKMLFDQRNLNDIVYKINGGGEIYFRKKSLDYPEAIMREGHHAAKLKGKFKYPIIKDKRYTTDSFKLNISVTMNFKCPAKQNVDVDILAYLKANSDEVKIIGIDRGERNLLYVVLIDKDGKMLFQSSLNVIKTYSNGVEHSVNHNDKLSQKQKNRSEARKSWSVIEEIKKHKDAYMSDVVHFLSNMVLEHKAIVIMEELNIGFKRGRQKIDKQTYQSFEEKFIKKFQYLVLKDRPVDQPGGALKALQLTGSYEDFSKNKSLQSGILFCVPAQSTSKICPATGFVNFLRFNNYENIKNSQKYLSQFDSIQYNLEKEWFEFAFDYKKFGRDVDGSISKWTICTTPGSRYKWNKTTREYTAYDVTEQLRNIFDVCGINYASGEDIKNDILISDDAKLFKKLYEMLNLTLALRYMTEAEDFILSPIVRDGKYFNSLTPDNILMPLDSDANGAFHISLKGLLLLERLYKSDDTKNFNCKIGIYEYLKFVQDLALKRNVISIEVEESVSAGKCIELIST

SEQ ID NO: 876 - protein, 1265 aa, unidentified
  REGION 1..1265: note = Cas Enzyme sequence
MANSDNLKKFTNLYQVSKTLRFELIPQGKTLEHIEKNGLLEQDEHRAESYILVKKIIDEYHKAFISGALENLKLNYLEDYLHYYQIPKRSEDEKKKFDEMQTKLRKQIADCFTKHAAYKNLFAKELIKEDLKAFVQTDEDKKLVEEFDNFTTYFTGFHKNRKNMYSAEEKSTAIAFRLIHQNLPKFIDNMRTFEKVGNSPVKNNFQTILSNEALGPIVQVGAVEDMFTLEYFNETLTQKGIDIYNQLIGGYTPEGSKEKIKGLNEYINLYNQTAKKEERIPKLKPLYKQILSDRSTASYIPEQFTNDNEVLESIEKFYQEIYEHVLNKNVKGEHSLKGLLGNIGEFDLHKVYLRNDLSLTDISQKMFGDWGFFQKAMNHWYDLNYKGKAKHETEKYEEEQKKYFRNQDSFSVGFINDCLLLPDNSGKKNLEEYFKLSLDGTDENGKTESLFVQLENNYNTVKDLLNNPYPQDKDLAQDQTNVDKIKTLLDSIKAVQWFIKPLLGKGNEAEKDERFYGEFSDLWTTLDQVTPLYNKVRNYMTRKPYSTEKYKLNFESSYLLNGWAKDYETKAGLIFIKDNNYYLAINNKKFNEEERNKLKTNHESNPAKRIILDFQKPDNKNIPRLFIRSKGENFAPAVDKYQLPIDKVIDIYDNGKFKTEYRKIDESDYLKSLHILIDYFKEGFTKHDSYKHYSFAWKTTKEYKDIAEFYNDVEVSCYKVLFEDINWNTLIDFVEQGKLYLFQIYNKDFSPYSKGTPNMHTLYWKMLFDEENLKNVVYKLNGQAEVFFRRSSIKEENKVVHKAGRHIDNKNEQNEKKQSRFEYDIIKDRRYTVDKFQFHVPLTLNFKAAGINNINKEASEFLKKEKDIHIIGIDRGERHLLYLTLIDSTGNIKQQFSLNEIINEYNGKTYKTDYHALLDKKEGGRDEARRNWKTIENIKELKEGYLSQVIHKISELMVTYNAIVVLEDLNTGFMRGRQKVEKQVYQKFEKMLIDKLNYLITTKDILKKNENGGALNAYQFTESYADFMKYKKKQCGFLFYVPAWNTSKMDPVTGFVNLFDTRYENMEKAKTFFGKFKSIKYNQAKNYFEFDFDYADFTNKAEGTKTRWTLCTYNTRIETFRNPAKNSQWDNREIVLTGEFINLFNKYGIEYNNTNIKDAITSQTDKAFYERLLYLLKLTLQMRNSITGTDIDYLVSPVANDKDSFYDSRTADETLPKNADANGAYNIARKGLWVVEQIAQAPDLKKVKLAISNKEWLSFAQNSGR

SEQ ID NO: 877 - protein, 1265 aa, unidentified
  REGION 1..1265: note = Cas Enzyme sequence
MTIKYQDFINLYPLQKTLRFELRPVGKTLENIKIAEILEHDEDLAAKYKIVKNIIDRFHRKHIDEALSLANFKDNISLLTQYKELYVKKDKDEKDKKQLSEIEKDLRKLIVNVLQGKTNHSQSKKIKARYEILFKKKLFDDEEFISLAQNQEESNALNAFKGFTTHFKDFQENRKNMYSEDKESTAIAYRIIHENLPVFITNNIRFEKIINELDRSNIHSIEKELKEELANNKLKDIFNIEYFQNTLTQNDITRYNTIIGGKVKADGKKVQGLNEYINLFNQHNKDKKLPLLKPLYKQILSEENSASFIVPAFEKDNEVLQSIFDFWNKCIIDAKGPISGKKYNLLSKIQSLLQNLDKLKNNQLEEMYFENENLSTISNDVYGQWNLIRDALGNFYNSIDAKKNKKDYYSWKEIQDALVYYKQTNDEYKDIDQKAFLIYFKEMKVNDGEENTNNNIINLINERYKRIEPLLKEDRDNRKDLHQDKGKVAIIKEFLDSLKLLQNTIKLLYVDDSLDNMNYDFYNQLTDYYETLRPLNTLYNRVRNYMTRKPFSEEKFVLTFNSPTLLDGWDLNKEEANLGVILRKDNKYYLGIMNKGDNKIFKKYDEEPGDDYYEKMVYKLLPGPNRMLRKVFFSNKNIEYYKPNQDIQNLYNKGEFKKGESLNKESLHKLIDFYKNSISKNGDWSVFNFKFKKTTAYDDISQFYKDVENQGYKLFFKTIKTSYIDQLVNEGKLYLFQIYNKDFSENKKRKDESNPNLHTIYFKNLFSEDNLKNVVYKLNGKAEVFYRKKSIEYPEEIRRKGHHYNELKDKFDYPIIKDKRYSEDKFLFHVPITLNFLAKSDEKVNEMVKNYIAATNEKIHIIGIDRGERNLLYLSLIDSNGNIVKQQSLNIIELPKYQKQIDYHAKLNEKEKQRLAARQNWDVIENIKELKEGYLSQVIHQIARLMVDYKAILVMEDLNFGFKRGRFKVEKQVYQKFEKMLIDKLSYLVFKEKNLCEPGGSLRAYQLSAPFKSFKALGKQSGMIFYVPAQYTSKIDPTTGFYNFLNIDVSNLARSKETFSKFDKIVYNKKEDYFEFYCKMINFESANQLTKKSQNKANAELKEFQWILCSTHHDRFKVERKNNQINYCKINVNEELKKLLNSKGINYEKSNDLKSEILNIDESKFFKELGYLLKILVSLRYNNGKKGSEEQDFILSPVKNASGKFFCTLDNNNTLPLDADANGAYNIALKGLMIVQRVKAGGKLDLSISKDDWINFLIMNKKLPK

SEQ ID NO: 878 - protein, 1265 aa, unidentified
  REGION 1..1265: note = Cas Enzyme sequence
MSTQYNDFINLYSLQKTLRFELRPIGKTLENIKIAEILEHDEDLAAKYEIVKNIIDRFHRKHIDEALSLANFKDNISLLTQYKELYVKKDKDEKDKKQLSEIEKNLRKLIVNVLQGKTNHSQSKKIKARYEILFKKELFDDEEFISLAQNQEESNALNAFKGFTTHFKDFQENRKNMYSEDKESTAIAYRIIHENLPVFITNNIRFEKIINELDRSNIHSIEKELKEELANNKLKDIFNIEYFQNTLTQNDITRYNTIIGGKVKADGTKVQGLNEYINLFNQHNKDKKLPLLKPLYKQILSEENSASFIVPAFEKDNEVLQSIFDFWNKCIIDAKGPISGKKYNLLSKIQSLLQNLDKLKNNQLEEMYFENKNLSTISNDVYGQWNLIRDALGNFYNSIDAKKNKKDYYSWKEIQDALVYYKQTNDEYKDIDQKAFLIYFKEMKVNDGEENTNNNIINLINERYKRIEPLLKEDRGNRKDLHQDKGKVAIIKEFLDSLKLLQNTIKLLYVDDSLDNMNYDFYNQLTDYYEILRPLNTLYNRVRNYMTRKPFSEEKFVLTFNSPTLLDGWDLNKEEANLGVVLRKDNKYYLGIMNKGDNKIFETYDEEPGDDYYEKMVYKLLPGPNKMLPKVFFSNKNIEYYKPNQDILNLYNKGEFKKGESFNKESLHKLIDFYKNSISKNGDWSVFNFKFKKTTAYDDIRQFYNDVEEQGYKLFFKTIKTSYIDQLVNEGKLYLFQIYNKDFSENKKRKDESNPNLHTIYFKNLFSEDNLKNVVYKLNGEAEVFYRKKSIEYPEEIRRKGHHYNELKDKFDYPIIKDKRYSEDKFLFHVPITLNFLAKSDEKVNEMVKNYIAATNEKIHIIGIDRGERNLLYLSLIDSNGNIVKQQSLNIIELPKYQKQIDYHAKLNEKEKQRLAARQNWDVIENIKELKEGYLSQVIHQIARLMVDYKAILVMEDLNFGFKRGRFKVEKQVYQKFEKMLIDKLSYLVFKEKNLCEPGGSLRAYQLSAPFKSFKALGKQSGMIFYVPAQYTSKIDPTTGFYNFLNIDVSNLARSKETFAKFDKIVYNKKEDYFEFYCKMINFESANQLTKKSKNKANAEFKEFQWILCSTHHDRFKVERKNNQINYCKINVNEELKKLLNSKGIDYEKSNDLKSEILNIDESKFFKELGYLLKILVSLRYNNGKKGSEEQDFILSPVKNASGKFFCTLDNNNTLPLDADANGAYNIALKGLMIVQRVKAGGKLDLSISKDDWINFLIMNKKLPK

SEQ ID NO: 879 - protein, 1266 aa, unidentified
  REGION 1..1266: note = Cas Enzyme sequence
MKSLHSFTNLYQVSKTLRFELIPQGKTLENIEKSELIAQDEHRAESYKKVKKIIDEYHKFFITNSLENLRLEGLEDFHFEYQIPKRTEDDKKRFALSQTKLRKQIANSFTSNELYKTLFAKELIKRDLKGFVRTEEELELVKEFDSFTTYFTGFHDNRKNMYSPDDKSTAIGYRLIHQNLPRFIDNMKVYYKIRNTPVYQKFAQLLNDMEEILQVVTIDEMFELEYFNDTLTQRGIDVYNSLIGGYSKPDGEKVQGLNEYINLYNQTASKENRIGKLKPLYKQILSDRQTASYIPEQFKNDQEVLDTMNSFIVELTHYLLDDSEIANHSLVKLLKGLKEFDLNGVFLKNDLSLTEISQKMFGDWGIIQKALDKWYAEKYYEGKLKPESEKYQEEMKKYFRNRDSYSIQFLNECLLLLDQNYHKKIEDYFAGLGDFGDEEKKSGNLFEKYKNLYQSISSLLVEPYDENKDLSQNQKDVEKIKGFLDAIKSIQWFVKPLHGQGDEAEKDDKFYGEFSALCSILDNITPLYNKVRNYMTQKPYSTEKIKLNFENSYFLNGWAQDYETKAGLLFIKDGNYYLGINNKKLSVEEKESIKKNYQLSPAKRIILDFQKPDNKNIPRLFIRSKGENFAPAVNKYNLPINRIIDVYDKGKFKTEFRKVNEEEYEKSLHALIDYFKEGFTKHESYKHYPFSWKETSKYKDIAEFYKDVEVSCYQIFEENINWDILMDFVDKGKLYLFQIYNKDFSPYSKGTPNLHTIYWKMLFDEKNLQNVVYKLNGQAEVFFRKSSIKNENIIVHKANQSIENKNSLNKKAESVFDYDIIKDRRYTMDKFQFHVPITMNFKAEGLNNINQKVNEAIKESEENHVIGIDRGERHLLYLTLIDSKGRIKEQYSLNEIINTYNGETYRTNYHDLLDRKEGDRDEARKNWKTIETIKELKEGYLSQVIHKIAELIVKYNAIVVLEDLNFGFMRGRQKVEKQVYQKFEQMLIDKLNYLVDKKKPINEMGGSLNAYQLTNKFESFQKLGKQSGFLFYIPAWNTSKMDPVTGFVNLFSLKYENMEKAKTFFGKFDSIRYNARNNWFEFSFDYLNFTNKAEGTKTNWVVCTNKTRVETFRNPEKNSSWDNREILLTDEFVHLFDANKIEWKSGECVKENIVNQTDKSFFEKLLHLLKLTLQMRNSITNTEIDYLISPVANEQGEFYDSREELAKGKDSANRWKSVLPVDADANGAYNIARKGLWAIEQIKKAEDLKKVKLAISNKEWLSYVQG

SEQ ID NO: 880 - protein, 1266 aa, unidentified
  REGION 1..1266: note = Cas Enzyme sequence
MTSFSKFCGLYPLSKTLRFELKPIGKTKENIEKNGILERDSERATAYKAVKKVIDEFHKSFIELQLNDFELEQSKLEEFYHLYHLPTSDQKRKNDLPKVQESLRKLISERFTKNDYYKRLFGKELIREDLTDFVNTPYYENIIRNVPGNEQLSDEKVKQIQENTIREISQFNDFTTYFVGFYDNRKNMYVAEDKATAIAYRMINENLPKFIDNMDVFEKIAASDVAQHFGELYKEMEPYLNVSEIAEMFHLNYFSTVLTQTQIDVYNAIIGGKTLDDGTKIQGLNEYVNLYNQQQKDKSKRLPKLKPLFKQILSERNAISWLPDEFKNDNEMLQSIEKCYQDLKEQVFGALKQLLTTIKDYNLQHIYLPNDLQLTDISQKQYGSWSVIKNAIIEDLKKTNQPKKKEDAEDFENRLSKLADSYSIAYINQVTGSNIENFKPIEDYFAKMGAEDNENGQKLNHFARIENAYTEIKQLLNSEYPTGKSLSQDKANVEKIKNLLDAIKDLQHFVKPLLGSGTESEKDNSFYGEFTPLWENLDQITPLYNMVRNRMTKKPYSEEKIKINFDNSTLLAGWDLNKEADNTCTLLRKDGNYYLAIIDKRHNKVLKAENLSSDGECYEKMEYKLLPGANKMLPKVFFSKSRIAEFKPSEKIIRNYENETHKKGDKFNLADCHALIDFFKESIKKHEDWSKFGFNFSPTNSYEDLSGFYREVEQQGYKISFRNISVNYINKLVDEGKIYLFQIYNKDFSPFSKGTPNMHTLYWKALFDEKNLADVVYKLNGEAEVFFRKHSLNGAKPTHPANQPIANKNAQNEKKQSTFAYDLIKDRRYTVDKFQFHVPITMNFKAAGINNINPLVNEYLKESNATHIIGIDRGERHLLYLSLIDLKGNIVEQYSLNEIVNEYNGNTYRTNYHNLLDAKEKQRDEARRSWQTIENIKELKEGYMSQVIHKIAELMVKYNAIVVLEDLNLGFMRGRQKVEKQVYQKFEKMLIDKLNYLVDKKLDADATGGVLNAYQLTNTYKVFHDQYKKQQNTIGKQCGFLFYIPAWNTSKMDPTTGFVNLFDTRYENMEKAKAFFGKFDSIRFNSVKGWFEWAFDYDKFTTKAEGTQTKWTLCTYGTRIETKRNPEKNNEFDSVEFDLTERIKELFAKYQIDANGNLKEQICSQTDATFFKELLHLLHLTLQMRNSITGTETDYLISPVMNAKGEFYDSRVCGKDLPENADANGAYNIARKGLWVIEQIKHADDLTKPKLAISNKEWMRYAQGLK

SEQ ID NO: 881 - protein, 1266 aa, unidentified
  REGION 1..1266: note = Cas Enzyme sequence
MSMKHIKDFTGLYPISKTLRFELKPIGETLMHIKKDGILEEDHQRKKDYEVVKKIIDDYHRGFIDSTLSQVNINWRELAEAIASEDAEILKDIQDKKRKELIDYFDNNPDENKKKLFSKELFDELLPELLEEKDGLSAEEKKDKLEAVSSFNKFTTYFTGFHENRKNMYSDEKKSTSISYRVVDQNFPKFLSNVKTFNFIKENAPAIIQQTQNELADYLNGMSLEEIFSIDYYNKVLTQRGIVFYNTIIGGVAGEAGTQTKRGINQFSNLFKQQNPDFTKAKQTKMLPLYKQILSDRETFSVIPKSVETDEEMMLIISELLKSLEEKEVLKKAHTLFSVDNVATYSLEKIWVSHSELPNLSTALFGSWEAITKSLSTQKEDEIGSSLVAKNKKQIDSYLKSTSFSLSEIDKAVEFYRESLPEEKRAVRTGDYFKLFISLKQQLSEAIKRYKHLEENAVLNLIGNEEQSSIVKELMDALISLVRFIKPFIDIDRTDIDTEFYSDIFFIHENCTPIITIYNAARNYITRKPYTTSKYKLNFKNPTLADGWDKNKEQNNSAIILLKDGMFYLGIINAKNKLNSDELAEDGSSDGYKKMHYKLLPGPNKMLPKVFFSKKGIENFNPPESILRGYHEELHKKGKDFNKAFCHKLIDYFKKAINEHPDWCQFDFNFSDTSTYEDISGFYREVETQGYKITFTNLSSEKIDKWVKEGKLYLFKIWNKDFSENSKGRPNMHTLYWQQVFSEENLKEVVFKLNGEAELFYRERSIKEPKSHEKGSVRLNKRDVDGNPINEDLYNELLQFANGKKTKESLSEKAKELIDNERITFTEFDYTIVKDRRFTEDKFAFHVPLTINFKSFGSSRINKDVNLFLKNNSDIKIIGIDRGERHLIYLTLIDRNGKIIEQRSFNIVNQMNYHGKLDQMEKARDKARKSWKSIGKIKDMKEGYLSQVVHEISCMMIENNAIVVMEDLNFGFKRGRFKVEKQVYQKFEKQLIEKLNYLAFKDFDSNENGGVLKGLQLTEEFKSFEKLGKQSGFLFYVPASYTSKIDPTAGFVNLFNFSEFTSQEKRKEFLQLFDSICYDPKYDAFIFDFDYDKFKTYQESHIKKWSVYSMGERIINLKNKSGKWESKKVSPTNDIKAVLEKEKVNYLGGQNILKAIESMDKKSCSDIFNSFRNITQIRNSDSSSGEDFIISPVKNREGVFFDSRKAGDSLPKDADANGAYHIALKGLYLLNSIDENLKENGEINYKLLTISSKDWFKFVQTAPFRK

SEQ ID NO: 882 - protein, 1267 aa, unidentified
  REGION 1..1267: note = Cas Enzyme sequence
MKTMQNFTNLYSLSKTLRFELIPQGKTLENIQKNGFLENDEHRAESYKKVKKIIDEYHKLFIENSLSVVSLQYDDEGKKNSLWEFYHIYLNKGNENRKKLLEEIQTKLRKQIADIFKDKGVNRLYTKELIKEDLPNFVQNEEDKALVAEFENFTTYFTGFHENRKNMYSSEEIATGIAYRLIHENLPRFIDNMGVFEKVKNTNVVEKFDTIYTQFEEYLNVNGIEEMFQLSYYSSVLTQKQIDVYNAIIGGKTEEKEKIKIQGLNEYINLYNQQQSDKTKRLPKFKPLYKQILSDRNAISWLPEVFSSDSDVLVSIEKCYQDICDQVFFPSEDSKHSLIELLTNIKEYDITKIYIRNDLALTDISQKMFGSWQIIQKAIELRYMATNQQKKKEAYEQYGERISKMVGNADSFSIHFITDCLSALGEIKNGEEVCEKDVVRYFGKLGKAKDIENVFVRIENSYNGVKELLKLGNQYPKDKNLSQQKEDVEKIKTLLDSIKELQRFVKPLLGKGNEPDKDPYFFGELTKFWTVLDQVTPLYNKVRNYMTKKPYSLEKFKLNFENSTLLDGWDMNKEEANTSILFMKGDCFYIGIMDKKSNKVFRELPENKTNNVYRKVNYKLLPGASKMLPKVFFSNSNIEYFQPNEKIIEIRNYGTHTKSGKPQEGFEKRDFDVNDCRLMIDFFKASIEKHTEWRNFNFEFSETNTYPSIDEFYREVESQGYSISDTNIDAEYIDSLVENGKLYLFQIYNKDFSEYSKGTPNMHTLYWKMLFDQKNLDDVVYKLNGQAEVFYRKSSINNENAVIHVANEKIANKNSMNVKKESVFSYNIVKDKRYTLDKFQFHVPITLNFKNKTAGTINETVNHFLKQSPDTHIIGIDRGERHLLYLSLIDPEGKIVEQFSLNEIANEYNGNTYRTNYHDLLQKREKERMDERQSWKAIETIKELKEGYISQVIHKIATLMVEYNAIVVMEDLNFGFMRGRQKVEKSVYQKFEKMLIDKLNYLVDKKKDPTEPGGTLKALQLTNKFESFKAMGKQNGFLFYVPAWNTSKIDPVTGYVNMFDTRYESVEKAQKFFQKFEEIRYNAHKDYFEFVVDNYTEFNPKAEGTRQNWIIGTHGDRIKAFRNEKKNNQWDNETVILTPAFKDFFRKNNINFEQGDIKSTIVVQNDKKFFDELMHLFQLTVQMRNSITNSEIDYMVSPVADKNGKFYDSRTAPKSLPKDADANGAYNIARKGLWVIEQIKKSGDDFKNLKLAISNREWLQFVQKSDE

SEQ ID NO: 883 - protein, 1267 aa, unidentified
  REGION 1..1267: note = Cas Enzyme sequence
MNQRLFENFTNQFTLSKSLSFQLIPQGKTLEYLHNDGILDIDKRRNEDYQVVRRGIDDYHREFIDNALSSLRLTGLNEYHELYQTPYKERSDAQKKRMFEIETYLRKQVAQQLRSNDLFHVLFSKELISEVLPEYFADNQPMLNALESFDGFTTYFKNFHTIREAMYSDEKKASSIANRIVHDNLPKFIVNMDVFGKVLASPVCANICEIEKWIGELTDTDGIAGIVENMFRLDHFSATATQSGIENYNLIISGYSDEDGIMHKGLNSYINEYNQTVGRTERLPLLVPLYKQLLAHSSTVSFVPDRFESDQEVLDCIKDFYTESKATLKKQELLVNSLEEYDLDRIFIKNDSSINDISLNLYGNWDYIRKALHFVYDKENRKRPVRNEEKYIEKRRKHFNKIGSFSISELNDALREYAGEVDVPVQDYFKTDNLQGVSSFMLIDDLYDDMGHLMTQPYPSAKNLKNDKGSIKKIKAFLDALKDWQKTIKPLCGSANESEKDDLFYGQFDILWSELFALNGIYNKVRNYITKKVTTADKIKLNFSNSQLGGGWSVGVERDKGCLLFKDVTAEGREYYYLGVINKESRNMFKEYPQPKDSSDAIFKVFYYQSADPTKSIMNLMVIDGETRKINGRREKSGPHAGENIMLEEAKNTYLPDDVNRIRLNRAYSKRSEHFSDKDLQTYINYYRERIKEYMPEFDFGSDFDSLIFTDWNDFTAYIKKKAYQVPLREISKSWLYERVEKGDLYLFQIYNVDFNPNRKGKKKITTRYFEMLFNPANFENGAIYKLNGGAEIFYRPAALDLKDTAIHVKGVPIQNKNPLNDKKESVFDYNIVKNNKSTKDIFILNCSIECNFSADENEPLNIKARKAIRENDATNVMIGVSRGENHLLYYSVVDENGNILEQKSLNVIDTISHSGDVKMYDYNASLEEKESERENARLDWQDIDSIKNMKEGYLSQVIWVLYKLMLKYNACIAVEDISSSFKSKRQKIEKNVYSKFDTALVNKLSFLIDKDMPDNATGGLLKALQLAAPEKQLLLRKDNQNGFLFYVQPAYTTSMDPTTGFASMLGKYLTYSNANDAVLFVRKLDSIKYNNDKDFFEIELDYAVFGLGEGTKTDWTICTAGKRTKVTRNERSARWQYDVVDLTMEFKALFKDYDIDISGDIQKQLLEKASPRLLKNFMELFKLTMQMRNMIDGEYHIVSPVQNENGDFYNTHESDGSLPVCAAANSAYNIAQKGLLYIDMIKAMNDDDNSKLIMRNVDWLTYMQNK

SEQ ID NO: 884 - protein, 1267 aa, unidentified
  REGION 1..1267: note = Cas Enzyme sequence
MSNNMFDQFTNLYSLSKTLRFELKPIGETSKMLEEAKVFEKDETIQKKYEATKPYFDKLHREFVKEALQDVHLSELNNEYFELFKKWKADKKTNEKDFQKKEKELRSEVVSFFDMQGKTWAEKYTGLKNKNIEILFEEAVFESILKVRYGKEKETEIVDESTGEITSIFNAWKGFSGYFGKFFETRKNFYKDDGTSTALATRIIDQNLKRFCDNILVFENIKEKMDYLEVEKNFEKILSEVFSIDFYNFCLLQNGIDKYNAILGGDSKDQNKRGINQLINEYKQKTGEKLPFLKSLDKQILSEKEKVFIDEIQTKEELSEILKAFYQSAEKRIKKLNLLFNDFFQHQENYNLSEIYLSKESFNTIVYKWTNETEIFEKSIYEVMKNEKLAKYEKKDESYHFPDFIALSYIKKALEILKTEKFWKERYDKLPKFKEKTTWEQFLLIFNFEFSTLFENERVNQETGETMKFGYNFAKKELETLLFNFILNDTSKIVIKNFADSCLTIYQMAKYFALEKKRKWIGDDYTLGEFYQNPDYGYKEHFYDGAYEEIVQVYNKIRNFLTKKPYSEEKWKLNFENPTLADGWDKNKESDNSAVILQKDGKYFLGLMAKGGNKIFNDRYAEKFLEGLEKDKYKKVVYKFFPDQAKMFPKVCFSTKGLDFFQPSKEIYRIYKNSEFKKGNTFSIQSMHILIDFYKDCLIKYEGWKGYEFVHIKPTKEYKENIGEFFRDVAEDGYKITFQDISEKYINEKNEKRELYLFQINNKDWNEGSSGSKNLHTLYFESLFSAENIAKNFPLKLNGQAEIFYRPKTKNLNKEKIITQKGKTLQKGEKAFQKNRFTENKIFFHVPLTLNRTVNNLYQFNTKINNFLANNPDIKIIGVDRGEKHLAYYSVITQKGEIVENGSLNKINGVNYAEKLEAKAKDREQARKDWQAVEGIKDLKKGYISQVVRKLADLAIQHNAIIVFEDLNMRFKQIRGGIEKSVYQQLEKALIEKFNFLVKKGETDSTKAGHLLKAYQLTAPFISFKEMGKQTGIVFYTQANYTSKIDPITGWRPHLYLKYSNAEKAKIDILKFSKIEFINRQFEFTYDIKNFRKDNEYSQKTKWTVCSCIERFRWNKCLNNNKGSYDHYTNITENFNSLFIEFEIKSEENILEQIKELEVKGNEKFFKDFIFFFNLICQIRNTDEKATDTNKQDYILSPVAPFFDSRKDNDKNLPINGDDNGAYNIARKGVVILSKISEYSKQNGNCQNMKWGDLFISNTDWDNFATK

SEQ ID NO: 885 - protein, 1268 aa, unidentified
  REGION 1..1268: note = Cas Enzyme sequence
MGTLKQFTRVYPLSKTLRFELKPVGKTLETITNSGLLEQDQHRADSYIKVKGIIDEYHKDFIETVLNDFKLIYTDEGKKNSLEEFFTCYMSKSKDKSQTKLYEDLQKELRGQIAKAFDNGGKLKRIFSEKLLKEDLNTFVTTHKQYNGNTQTLQNLINEFEKFTTYFDGFHKNRKNMYSVEAQSTAIAYRLIHENLPKFIDNMLVFDKVAASPVSEQFVGLYSSFEEFLNVMNIAEMFRLDYFNIVLTQKQIDIYNYVIGGRTLDDGTKIKGLNEYINLYNQQQKDKSARLPKLKLLYKQILSDRNTISWLPEQFESDEKALEAIERAYQELNEQVLNRNKEGEHSLKELLQTLAEYDLDKIYVRNDLQMTELSQKVFGHWEVISKALLEQLKKDLPKKSKKETDEAYEERLNKVLKSQGSISIAQINNSVGVMGVEEQNSIQAYFARLGAVNIEAVQQENIFSRIENAYTEVKDLLNTPYPSNKNLAQDKVNVEKIKNLLDAIKSLQHYVKPLLGDGTESEKDEKFYGEFVALWEELDKITPLYNMVRNYMTRKPYSTEKVKLNFENSTLMKGWDLNKEQDNTTVILRKDGLYYLAIMNKNHKKVFDVMNMPTGGDCYEKMEYKQIADAGKDIQNIIYHDGKYQRFTKNLDRLKEENIPQIYRIRERGSYLQDAPKSDVKKFSKEDLRTFIEYYKDAAIHYWDWCEFSFKKSEDYANWKEFTNHVNMQGYKISFRNVSVDYIHSLVEEGKIYLFQIYNKDFSPYSKGTPNLHTLYWKMLFDERNLADVVYKLNGEAEVFFRKSSIICERPTHPAHQAIENKNALNEKKQSVFTYDLIKDKRYTVDKFQFHVPITMNFKSIGNDNINQSVNEYIQKSDDLHIIGIDRGERHLLYLTVIDMKGQIKEQCSLNEIYRTDYHELLSKREDERMKARQSWLTIENIKELKEGYLSQVIHKISELMVKYNAIVVLEDLNMGFMRGRQKVERSVYQKFEKMLIDKLNYLADKKKNPEEEGGILNAYQLTNKFTSFQKMGKQSGFLFYTQAWNTSKIDPVTGFVNLFDTRYETREKAKAFFCKFDFIRYNRDKDWFEFAFDYNKFTSKAENTRTQWTLCTYGKRIETFRDEKQNFQWISQECDLTDKFKRFFAKYGIDIHTNLKEVIAQQDSVEFFKGLLYLLKLTLQMRNSKTGTDIDYMQSPVADANGNFYNSGLCDNSLPKNADANGAYNIARKGLWIVRQIKASDDLKNLKLAISNKEWLQFAQSKPYLND

SEQ ID NO: 886 - protein, 1269 aa, unidentified
  REGION 1..1269: note = Cas Enzyme sequence
NEMDIGWAGIKCKPDEVITGEALKERLIEAVKHQRKRFTDPQTIAEKECLIAEPNILSRLEEIASKIPALPDDIALSVNKGGNISWDLVHAAFLFRLFPSSITAAILALSVKKPKATQDGEAAKGIHFTRLGDDPVKLARGTRGYVFPAFTALNAWSPKSTGQPAWKEFDIAAFKEALKSLNQFNQKTVERNETEKYLRGRITILLGGSKPTGWKPRKTEGDELEAMPETLEPTLLSKTWELESRLTKELTDTVVRSESSNLTFGDGQVYPNRDGQWRISPASLRGFRDIAEKWNSLAEENGEFLTQGDLEQVVKEYQQNEKNKKQVGSIPLLLALCHPDFRPLWDKKNDPKQEDLPSYNRFLFQVLNLHQDVRDYHRSHEAINLTPAEPRHSRRLYMFSDITGKEKVVFRDGNIVETTLALKEGATCRKQRVRISFSAPRLFRDQILGNETSQWLQPMTAALGYEVPEAAGLSAVSLMPDFDREGNARFLLNFPKTIDESWLKKAIGKETVWAGMFNGIKGKNLHLHWPDAYKKKSGQSAWWERKPFQQNGFWILSIDLGQRTAGAYTRIFITAKKPGVEERRPWHILGEAGGHTWYAIVGNGGMLRLPGEDQKVRQRERDQNGNTIPGSTTLARELSGSAGRNATESEYEAAINLAKKLRAEDSDFSEGSDAAAKAWVGGNEKERSFPEQNDSLIALANRRLSRLNTFHRWSCQEAALADEAKDDQSKIRVVAALLAELSHWSDESVTSWHQELHENHPYLDELFSAPETDPKTGKKTRLSESKKASSKWSDKQRKLWEDNFDPAHFTNFSQSAGEAYSELRDELQTVLLELAHRSAPLRGKKWIWETRKQDDANKAAYGFLEWLPEKGVKAPKIRGQRGLSMQRLEQLESLRTLFLRYNRSLDKIPGERSKIGFGFSNEAGEPAELLLRKIDRMKEQRVNQTAHLILAQALGVKLREHEIPDEERKSRDIHGEYEKMEKYDPVEFVVIENLDRYLTSQGRAPSENRRLMKWAHRAVRDKLKMLCEEPFGIPVVEAPAAYSSRFSAKSSEPGSRCRESCELSLFFRERLKSKAEAKPVPGRKDLRELYAKLLKQFDALEEQNQKRETGKKPHTLLLPQPGGPLFLGSVSGGLVQADLNAAANVGLRALASPGALHLLHKIRTEQKKGVVKPVLKNAREKSAFSNSETAISLQGNPSQKLQKAAKPNFFHLPKSAIGSDWYDLATLEIEGKSCHLVSGIALHTVTDDLVLKRIVEINETRLSKNNVAI

SEQ ID NO: 887 - protein, 1269 aa, unidentified
  REGION 1..1269: note = Cas Enzyme sequence
MKKIFEKFTNQYELSKTLRFELKPIEKTKELLEKNQVFQKDKQVFENYQKTKKYFDKLHCNFIDSSLKLLTFSDYDYKEFQKLYFNYKQDRQRGLKAFNNYSKKLRTKILQNFEKTAQIWQTKYIENIKDEKEKNKIKKLKGLDLLFKTEVFNFLKFKFSDDKNIQIFNSKNEKKGTIFDCFNKFSTYFINFHQSRKNFYKDDGTQSSIPTRIIDVNLPKFLDNKNIFENKYKVLNLSEKEKEIFHFIYFNNCFTQRDIEKYNEIIGEINSKINKYRQKNKENKIPFLKELFKQILFERSKQETEQDEFISIENDEDVFKILKKFIEETKTNNQKIKSIFTDFIHNLNNYDLEKIFIKGGSINTISNKWFTSWDVFGAMLPKKSSNKNKISDFVSIKEIKQTLENQGTVDQNLIFKKEYFEKNVINNAKNPFDNFLAIFDHELKNNLAECTQNIREVERMILQDKTYSNKKEKLKNGKYGEIQKEIIKDFAESALNIYQIKKYFALEKSKKIVSDMNEDSAFYNKYNEWLNEDKTYLYYNEFRNYLTKKPYSKDKIKLNFECGYLLSGWATKYETYKSLIFKKNENYYLGIIGNQKLSEDEINQLEHIDKEKNIAHRMIYDFQKPDNKNVPRLFIRSKGVNFSPVVKELNLPVDSILDIYDRGLYKTLNKNNSNYKPSLIKLIDYFKLGFKKHPSYKHYNFKWKKSNQYENIAEFYQDTISSCYTLSWEKINFENLKKLVKLNKIYLFQIYSKDFQTDKTTEINDHKYKKRGKDNLHTSYFKLLFDKQNLESKDGVVFKLSGGGEIFYRKASIKKEIDKNRKASQVVIKNNRYTEDKIFLHFPIQINYTKSKKQINLAVNKALASQQKQRIIGIDRGEKHLLYISAIDENGNIIKTKSLNQIEVPNKKKPDDYHKLLDEREKSRDEARKSWQEIEKIKDLKQGYISQVVHEISKLIFQSLDEGILPIIVFEDLNIGFKRGRFKIEKQVYQKFELALAQKLNYLASKSRKNYLKALQLTPPIQNFQDIKKQTGIIFYIPASFTSAICPVCGFRKQLYGFTFKNIKQSKKILTDHDFKIKFEKNKFNFECLTSQESNKNTKNKNELFAKKVPRPKLNFNSDIERLINIRSKDNKKWKTTSFDPTKELLSLFENKIDPDKNIVNQITISNFEASFYKQLIFIINAILKLRNFDNLSDRDFIACPNCYFHSDKGFQNNKFNGDANGAYNIARKGILITKKIKQFSKDNSTEKLKPFDHLQIQMQEWDKFVQKA

SEQ ID NO: 888 - protein, 1269 aa, unidentified
  REGION 1..1269: note = Cas Enzyme sequence
MTDNLKQFSNLYQVSKTLRFELKAVGKTKENIERNGILERDNQRAVGYKAIKKVIDEYHKSFIELMLDYFELNLTDNGNLDSLEEYFLLYHLPSNDPTRNDRMARVQDALRKQISDRFMKSEPYKRLFGKELIREDLLQFVLTPQFEVYIRSQKGNANLSEHEVRLVQEDYLQEIAQFKDFTTYFSGFYENRKNMYVPDDKATSIANRVITENLPKFIDNMDVFARIAASEVATHFNTLYKAMEAYLNVNSIDEIFRLDYFSKVLTQKQIDVYNAVIGGKTLSDGTKIQGLNEYVNLYNMQHKDKTERLPKLKPLFKQILSERNAISWLPDEFVSDNEMLESIESCYQNLKELVFDGKDSLKELLKGIGEYDLEHIYLPDDLQLTKISQKLYGNWSVIKKAYEVFLKTENPQRRNETIEKYEARIEKMLKANDSFSMAQINRLMSDYLGDEYKPVESYFASMGAEDDGNVQKPNLFIRIENTHTEANPLLTKIYPEGKNLSQDKANVERIKNLLDAIKDLQLFVKPLLGKGTESEKDSRFYGELTPLWETLDQITPLYNMVRNRMTQKPYSEEKIKLNFDNSTLLSGWDLNKEVDNTCTLLRKDGLYYLVIINKQHNRVLTSENISSEGDCYEKMVYKQLGQISQQLPRIAFSNSWQQKITIPADVLRIKKTESFKTNNDDLQRLIAFYKYFISQHEEWNSFFNIKFTDRDNYKNLPEFYSEVDSLFYSLSFSKVSVAYINQLVDEGKIYLFQIYNKDFSAYSKGTPNLHTMYWKMLFDERNLADVVYKLNGEAEVFFRKHSIEAGRPTHPANKPIENKNKLNEKKTSVFEYDLVKDRRYTVDKFQFHVPITLNYKAVGMNNINPIVNAYLKESKATHIIGIDRGERHLLYLSLIDMKGNIVEQYSLNEIVNKYKGNTYRTNYHDLLDAKEQQRNEARRSWQTIENIKELKEGYMSQVIHKIAQLMVKYNAIVVLEDLNLGFKRGRQKVEKQVYQKFEKMLIDKLNYLVDKGCEADQMGGVLNAYQLTNKFESFQKVGKQSGFLFYIPAWNTSKMDPTTGFVNLLDTRYENMARAKAFFAKFKSIRYNATKEWFEFAFDYDDFTTKAAGTKTRWTLCTYGSRIETRRDSQQNNHFISEEFHLTDRFKELFSQYDVNLKGNMMEQICSQDDASFFKKLLHLLHLTLQMRNSQTGTDVDYLISPVMNDKGEFYDSRNCGQSLPVNADANGAYNIARKGLWIVEQIKHSDDLSKPKLAVSNKEWMRYAQGLE

SEQ ID NO: 889 - protein, 1269 aa, unidentified
  REGION 1..1269: note = Cas Enzyme sequence
MLNFTNLYQLSKTLRFELKPIGKTLEHIQEKGLLNKDEQRAESYQKMKKTIDDFHKYFIDLALNHVTLTHLDAYLDLYNQSTETKKEPKFKEELKKVQDYLRKEIVKSFSDGEAKSIFAILDKKELITVELEKWIAEQNLKDIYLDDKFKIFTTYFTGFHQNRKNMYSAEANSTAIAFRLIHENLPKFLENLKAFEKIKQIPELEPKIAKIYKDFEAYLNVNTIAELFELNYFNEVLTQQGIDVYNNIIGGRTETEGKPKIQGLNEIINLYNQNKDKKDRLPKLKQLYKQILSDRVSLSFLPDAFKNGKEVLKAIFDFYKVNLLSYKIDDQTESQNLLQLIKQLLENLYSFDTTKIFIKNDTNLTTISQQLFGDFSVFASALNRRYETVVNPKFESEYSKANEKKRENLDKAKAVFTKQEYFSIAFLQEVVSDYIKTLDKDAEIVQKFNPTTVVDYFKNHFNAKKENETDKSFDFISNITAKYQCIQGILENVDLYEEELKQDQKLIDNVKFFLDSILEVLHFIKPLHLKSETITEKDTAFYEIFEKYYEELSLLTPLYNMVRNYVTQKPYSTEKIKLNFENAQLLNGWDANKETDYLTTILRKNGNYFLAIMDKKHNKAFQNYPKGDHNYEKMVYKLLPGVNKMLPKVFFSDKNIAFFNPSTELLENYKNDSHKKGDNFNMNHCHQLIDFFKDSLNKHEDWKHFNFDFSETKSYKDLSGFYREVEHQGYKIKFDEIDSQYINTLVEEGKLFLFQIYNKDFSPHSKGKPNLHTLYWKALFEEKNLENVMYKLNGQAEVFFRKASIQKKNIITHPANQPIQAKNPLTPDSKSTFAYDIVKDKRYTIDKFQFHVPITLNFKATGGNYINPSVLEYLKNNPEVKIIGLDRGERHLVYLTMIDQQGNILQQESLNNITDSKITTPYHTLLDNKEAARDIARKNWGSIESIKELKEGYISQVVHKITTMMVEHNAIVVMEDLNFGFKRGRFKVEKQVYQKLEKMLIDKLNYLVEKDKQPHETGGLYNALQLSNKFESFQKMGKQSGFLFYVPAWNTSKIDPNTGFVNYFYTKYENLDKAKNFFEAFESIRFNGNYFEFKVDQYSKFNPKAVETQQEWTICTYGQRIETKRDVKQNNNFVSREVELTTLFEDFFGKHRITYGDGNCLKKDIDIQEDKKFFEELMHLFKLTLQMRNSVTGTDEDYLISPVKNQDGYFYDSRKADETLPKDADANGAYNIARKGWMLIDKIKKADLSKKIDLSISNKDWLNFAQKNI

SEQ ID NO: 890 - protein, 1270 aa, unidentified
  REGION 1..1270: note = Cas Enzyme sequence
MNDLTQFTNLYSLSKTLRFELKPVGKTQENIEKNGILERDNQRAVGYKSVKKVIDEYHKAFIERILNDYERKLDDLQRSVWEDSLNEFYRLYHLPTSTPKRKDDLSKVQETLRKQISDCFKKDRQYGRLFGKELIREDLAEFVTTPLFEDYIISQKDNENLSADEIRKIQEGIIQDLSQFNDFTVYFSGFHENRRNMYVPDSKTTSIAHRMIDENLPKFIDNMDVFEKIAASEVAQHFGVLYKEMEPYLNVNEIPELFKLPYFSMVLTQNQIDVYNAIIGGMVLDDGTKIQGLNEYVNLYNQQQKDKTKRLPKLKPLFKQILSERNAISWLPDEFNSDNEMLQGIEKCYQDLREHVFEGDHSLKALLHNIGDYDLAHIYIPNDLQLTDISQKHFGSWSLIKAAIEEDLKSRTPVKRNESGEKYDERVAKTLKGIDSFSIADINRMMQAKVDDFKPVEAYFAQMGAEDNGNGQKLNHFARIENAYTDVKALLNTEYPKGKALSQDKKNVEKIKNLLDAIKDLQHFVKPLLGSGSESEKDSQFYGEFTPLWEMLNDITPLYNMVRNRMTSKPYSEEKIKVNFDNSTLLAGWDLNKEVDNTCTLLRKEGNYYLAIINKRHSRVLLPEYLVAEGDCYEKMVYKQLGQISQQLPRIAFSNSWQQKIKIPEEILKIKKTESFKTDKDDLQKLIAFYKFFLSQHEEWNSFFNIHFSNKTYYNNLAEFYSEVDSLFYSLSFTNVSVSYINQLVEEGKLYLFQIYNKDFSPYSKGTPNMHTLYWKMLFDERNLADVVYKLNGGAEVFFRKHSIKVDKPTHPANHPIANKNTQNKKKESVFAYDLIKDRRYTVDKFQLHVPITVNYKAIGLNNINPVVNAYLKDSKATHIIGIDRGERHLLYLSLIDLKGNIVEQYSLNEIVNEYNGNTYRTNYHDLLDAKEGKREEARRSWMEIENIKELKEGYMSQVIHKIAQLMVKYNAIVVLEDLNMGFMRGRQKVEKQVYQKFEKMLIDKLNYLVDKQCDAAELGGVLNAYQFTNKFESFQKMGKQSGFLFYIPAWNTSKMDPTTGFVNLLDTRYENMAKAKAFFGKFKSIRYNAKKVLFEFTFDYDDFTTKAADTRTQWTLCTYGTRIETKRDPKQNNNFVSEEFDLTDKFKELLAKHNIGIDGNLLEKICSQSDAAFFKELLHLLHLTLQMRNSITGTDTDYLISPVMNANGEFFDSRKCGKNLPENADANGAYNIARKGLWIIDQIKHSDDLSRLKLAISNKEWLQYAQKMV

SEQ ID NO: 891 - protein, 1270 aa, unidentified
  REGION 1..1270: note = Cas Enzyme sequence
MNFEQFTHLYPLSKTLRFELRPVGATLARIKEGGFLENDNHRAESYKKVKKLIDEYHKHFIEQALGDFSLTENETEGSKCLNSYLETYIQLYRSSRIEDAEKKAFEKVQAEMRKFIAKTLKGSEAYKRLFKKELIKEDLPAFLRTHADKELVAEFKNFTTYFKGFYKNRKNMYSEEEKSTAISYRLVNENLPKFVDNMAAFAIIAQVPEVRAMLDVLQKDLGAELDGTTIDELFTLPFFNKVLTQKQIAVYNAVIGGKVSDSHSKEESHIKGINQIVDCYNQQHKDARLPKLKKLYKQILSDREALSWIPEKFDKDADLLKAIHDGYERLASDRALEKLRTLLESMADYQTEGIFITNDQQLTRISQKMFGEWSFISEAILCALKKEVSQKRNECDEKYEKRIDKMLKNHGGFSIRFIDDCVAAYVNTLDDEEQKKRFIPTVEAYFATLGAFDTEKGQTINFFSRIQNARVALRGLLDSAYPEGRSLIQDKENGALLKELLDAILALMHFIKPLLGKNENGKDERFYGELIQIWDEFDTFVPLYNMSRNYLTQKAYSEEKYKLNFENSQLLNGWDLNKEVANTSIILRKDGLFYLAIMNKKHNKLFTRELPTDGDCYDKMTYKFLSGYRDLPHVFFSKSRKAEFVPSEHIMDVYEKGAFKKGDTFNLQDCHDLIDFYKASILKHEDWRQFDFKFSETEQYDDISGFYREVEAQGYKVTFRQVSVSYIDRLVKEGKLYLFQIYNKDFSPYSKGTPNMHTLYWRALFDERNLSDVVYKLNGEAEVFYRKKSIEAHPTHPANRPIKNKNKLNDKEESLFAYDLIKDRRYSEDKFSLHVPITMNFKSVGGPNINDDVVEFLRTNENLHFIGIDRGERHLLYLTVIDSHGHILEQRTLNDVVNNYQGKDYHTDYHDLLKTRERQRQEERSSWKVIENIKDLKEGYLAQVVHQIAQLMVKYHAIVVLEDLNGGFMRERQKKAERSVYQQFEKKLIDKLNYLVDKKTDAHAPGGLMNAYQLANQVESSKNKSSRNKNFKSMGRQSGFIFYIPAWNTSNIDPVTGFTNLFDTRYKNAHDAQQFFSTFKSIRYNKTADRFEFRFSYSDFTRKAEGSRTDWTVCTYGTRIKTFRDPQKNNEWTSKEVVLTEEFKKFFAAYHVDIHSNLKDSIAAHGEKAFFKQLLALMRLTLQIRNSKSGTDIDYLLSPVADENGVFFDSRSCGNSLPQDADANGAYNIARKGLMLVRQMREAKDLKKFKADMTNRNWLKFVQEKPYLND

SEQ ID NO: 892 - protein, 1270 aa, unidentified
  REGION 1..1270: note = Cas Enzyme sequence
MCGKIMADEFTNLYQCSKTLRFELKPIGRTLEYIERDEILKTDNERGIKYQKAKSLIDEYHKDFINEALRNVHLEGLNEYNELYLLPKRDEKQEKSFNDIQTSLRKQIVKCFTSHTRYKNLNKKELIKNDMVEFLKDRPEDKSLISEFADFTTYFTGFNTNRQNMYSEEDKSTAIAYRIIHQNLPKYIDNIKVFEILKENNVDLDVSELKKILNEKYGIDSIEKYFELDGFNNVITQSGIDKYNTIVGGVSQDNDIKIKGINECINLYNQKNKTKLPKMKMLYKQILSDREGSSFVLDNFETGEEVIKAVNEFYEMLYNSVIDNANEISIRELISDINSYDLENIYVSNDTTITTISQYLFDDWSIIKNAISTDYDNLYMNKNVIKNLEKYNDTKIKNLKRQNVFSIDKLNKITEEYTGGKVNIQSYFTLQIDEKINAIRNTYREYENQVANSDYSKLNKNQNLIEKLKNFLDAIKDLQALIKPLIKGQDEAQKDEIFYVELIRLNDEIDKINPLYNKVRNYITKKPYSTEKVRINFDKSTLLDGWDRNKEKDNLGVIFIKDDLYYLGIMNRNSNKVMEEAPKPITNDTYQKMEYKYTKDVTTTVPKCSTQLKKVKAHFTQEDADYVLSDDTFLKPLIITRKVFDLNNVNYEGQKKFQVEYLRRTGDAEGYTDALVTWIDFCKEFLVSYKSTAIYNYDSLKPSDQYKSLDEFYGEVNNKLYMLSFRQIDKSYIDELVDNGQMYLFQIYNKDFSPYSKGTPNLHTMYWKMLFAPENLKNVVYKLNGQAEIFYRKRSIAEDEIIKHNANEILRNKYPLAIKKTSQFDYEIIKDKRFTVDKFQFHVPITQNFQAKGEKYINSKVRRTIHDSDNIHIIGIDRGERNLLYLCVIDMQGNIVKQLSLNKIITKSNDGADITKNYHMLLDKRENENLSARQNWQTINSIKELKDGYLSQVIHLISKLMIEYNAIVVLEDLNFGFMRSRQKFEKQVYQKFEKMLIDKLNYLVDKSKVPNEMGGLLNAYQLTDKFESFQNMGKQSGFLFYVPAWNTSKIDPTTGFVNLFNTKYETKEKSREFINKFKYITYVNADNNSYFEFNFDYTDFTYKAEGSRTQWCICTEGDRIETYRNPQKNNEWDTRKINLTGEFKSLFDKYSIEWTKDNLIAEITNIDETEFYRSFMHLMSLVLQIRNSNENEDWILSPVKNSRGKFFNTNQDEPNYPKDADANGAYNIAKKGLWIVEQIKNSDIDKLDKVKLAISNKEWLAYAQEHTLNG

SEQ ID NO: 893 - protein, 1270 aa, unidentified
  REGION 1..1270: note = Cas Enzyme sequence
MENFVNKYSLSKTLRFELIPQGKTKEYIDAKGLLKQDADRADSYQKVKKIIDAYHKYFIELAMDKVQLSKLEEFRKLYFAPAEKKKEEVFKKEFEKIQEDLRKEIVNGFKTGNAKEIFASLDKKELITELLNDWVEKQEDKEEVEKFKTFTTYFTGFHENRKNMYSDKAQSTAIAFRLIHENLPKFLDNSKGFEKVRAIPELHETCKTLYKEIEEYLNISSIDEVFELDYYNTVLTQKQIDVYNLIIGGRTPKENVKKVQGLNEYINLYNQKQQDKIPKLKVLYKQILSDRESVSFLAEKFENSQEVLSAINEYYHSNLISFPIEGKEETENILKRIQELLENLSSNNLAQIYIRNGKAITDISQALFSDFSIIKEALKFSFTKTLEMGKKGLSTKQEESIEKYLKQDYFSIAEIENAFWSYRNENETLKDLKQDEHKIADYFKNNFKNKVGKKEYDLVSNVVAKYSCVKGILETDYPENKKLNQEQNDIDNIKNFLDSLMEILHFVKPLMLPNDSTLEKDADFYNTIQPYYEQLQHLIPLYNKVRNFATQKAYNVEKIKLNFENSTLLEGWDVNKEEANTSILFRKGDLYFLGIMDKKYNKIFRDIPKAKTENTYSKINYKLLPGASKMLPKVFFSNKNIAYYNPSNEIINIRNHGTHTKGGSPQEGFKKLDFNLSHCRMMIDFFKDSIDKHPEWKLFGFNFSNTKTYDSIDGFYREVEAQGYNITYTEIDNDYINQLVSEGKLYLFQIYNKDFSEYSKGRPNMHTMYWKALFDKENLKDVIYKLNGQAEIFYRKKSIEEDKKIIHKAKETIDNKNPDASKKQSTFDYDLIKDKRFTVDKFQFHVPITLNFKSKGNEYINFDVLDFLKNNPNVNIIGLDRGERHLIYLTLINQKGEIREQFSLNDIINEHKGETHKTSYKNLLDKKEAERAAARENWGTIETIKELKEGYISQVVHKIATMMVEYNAIVVMEDLNMGFKRGRFKVEKQVYQKLEKMLIDKLNYLVFKDRADNELGGLYKALQLTSKFESFQKMGKQSGFLFYVPAWNTSKIDPTTGFVNLFNTKYESIEKTQNFFEKFDSIHFNSKENYFEFVFDYDNFTERAKGTKTKWTVCTHGERILTFRNPETNNLWDNKEINLTERFEDLLGKFNITYGNGTDIKTQIAAQDSKELLKGLLDLFKLTLQMRNSITNSEVDYLISPVKNSNGNFYDSRKADATLPKDADANGAYHIAKKGLMWLNQINEFEGENWKKLDFEKTNKAWLNFVQEIK

SEQ ID NO: 894 - protein, 1270 aa, unidentified
  REGION 1..1270: note = Cas Enzyme sequence
MCGKIMADEFTNLYQCSKTLRFELKPIGRTLEYIERDEILKTDNERGIKYQKAKSLIDEYHKDFINEALRNVHLEGLNEYNELYLLPKRDEKQEKSFNDIQTSLRKQIVKCFTSHTRYKNLNKKELIKNDMVEFLKDRPEDKSLISEFADFTTYFTGFNTNRQNMYSEEDKSTAIAYRIIHQNLPKYIDNIKVFEILKENNVDLDVSELKKILNEKYGIDSIEKYFELDGFNNVITQSGIDKYNTIVGGVSQDNDIKIKGINECINLYNQKNKTKLPKMKMLYKQILSDREGSSFVLDNFETGEEVIKAVNEFYEMLYNSVIDNANEISIRELISDINSYDLENIYVSNDTTITTISQYLFDDWSIIKNAISTDYDNLYMNKNVIKNLEKYNDTKIKNLKRQNVFSIDKLNKITEEYTGGKVNIQSYFTLQIDEKINAIRNTYREYENQVANSDYSKLNKNQNLIEKLKNFLDAIKDLQALIKPLIKGQDEAQKDEIFYVELIRLNDEIDKINPLYNKVRNYITKKPYSTEKVRINFDKSTLLDGWDRNKEKDNLGVIFIKDDLYYLGIMNRNSNKVMEEAPKPITNDTYQKMEYKYTKDVTTTVPKCSTQLKKVKAHFTQEDADYVLSDDTFLKPLIITRKVFDLNNVNYEGQKKFQVEYLRRTGDAEGYTDALVTWIDFCKEFLVSYKSTAIYNYDSLKPSDQYKSLDEFYGEVNNKLYMLSFRQIDKSYIDELVDNGQMYLFQIYNKDFSPYSKGTPNLHTMYWKMLFAPENLKNVVYKLNGQAEIFYRKRSIAEDEIIKHNANEILRNKYPLAIKKTSQFDYEIIKDKRFTVDKFQFHVPITQNFQAKGEKYINSKVRRTIHDSDNIHIIGIDRGERNLLYLCVIDMQGNIVKQLSLNKIITKSNDGADITKNYHMLLDKRENENLSARQNWQTINSIKELKEGYLSQVIHLISKLTIEYNAIVVLEDLNFGFMRSRQKFEKQVYQKFEKMLIDKLNYLVDKSKVPNEMGGLLNAYQLTDKFESFQNMGKQSGFLFYVPAWNTSKIDPTTGFVNLFNTKYETKEKSREFINKFKYITYVNADNNSYFEFNFDYTDFTYKAEGSRTQWCICTEGDRIETYRNPQKNNEWDTRKINLTGEFKSLFDKYSIEWTKDNLIAEITNIDETEFYRSFMHLMSLVLQIRNSNENEDWILSPVKNSRGKFFNTNQDEPNYPKDADANGAYNIAKKGLWIVEQIKNSDIDKLDKVKLAISNKEWLAYAQEHTLNG

SEQ ID NO: 895 - protein, 1271 aa, unidentified
  REGION 1..1271: note = Cas Enzyme sequence
MEDKQFLERYKEFIGLNSLSKTLRNSLIPVGSTLKHIQEYGILEEDSLRAQKREELKGIMDDYYRNYIEMHLRDVHDIDWNELFEALTEVKKNQTDDAKKRLEKIQEKKRKEIYQYLSDDAVFSEMFKEKMISGILPDFIRCNEGYSEEEKEEKLKTVALFHRFTSSFNDFFLNRKNVFTKEAIVTAIGYRVVHENAEIFLENMVAFQNIQKSAESQISIIERKNEHYFMEWKLSHIFTADYYMMLMTQKAIEHYNEMCGVVNQQMREYCQKEKKNWNLYRMKRLHKQILSNASTSFKIPEKYENDAEVYESVNSFLQNVMEKTVMERIAVLKNSTDNFDLSKIYITAPYYEKISNYLCGSWNTITDCLTHYYEQQIAGKGARKDQKVKAAVKADKWKSLSEIEQLLKEYARAEEVKRKPEEYIAEIENIVSLKEAHLLEYHPEVNLIENEKYATEIKDVLDNYMELFHWMKWFYIEEAVEKEVNFYGELDDLYEEIKDIVPLYNKVRNYVTQKPYSDTKIKLNFGTPTLANGWSKSKEYDYNAILLQKDGKYYMGIFNPIQKPEKEIIEGHSQPLEGNEYKKMVYYYLPSANKMLPKVLLSKKGMEIYQPSEYIINGYKERRHIKSEEKFDLQFCHDLIDYFKSGIERNSDWKVFGFDFSDTDTYQDISGFYREVEDQGYKIDWTYIKEADIDRLNEEGKLYLFQIYNKDFSEKSTGRENLHTMYLKNLFSEENVREQVLKLNGEAEIFFRKSSVKKPIIHKKGTMLVNRTYMEEVNGNSVRRNIPEKEYQEIYNYKNHRLKGELSTEAKKYLEKAVCHETKKDIVKDYRYSVDKFFIHLPITINYRASGKETLNSVAQRYIAHQNDMHVIGIDRGERNLIYVSVINMQGEIKEQKSFNIINEFNYKEKLKEREQSRGAARRNWKEIGQIKDLKEGYLSGVIHEIAKMMIKYHAIIAMEDLNYGFKRGRFKVERQVYQKFENMLIQKLNYLVFKDRPADEDGGVLRGYQLAYIPDSVKKMGRQCGMIFYVPAAFTSKIDPTTGFVDIFKHKVYTTEQAKREFILSFDEICYDVERQLFRFTFDYANFVTQNVTLARNNWTIYTNGTRAQKEFGNGRMRDKEDYNPKDKMVELLESEGIEFKSGKNLLPALKKVSNAKVFEELQKIVRFTVQLRNSKSEENDVDYDHVISPVLNEEGNFFDSSKYKNKEEKKESLLPVDADANGAYCIALKGLYIMQAIQKNWSEEKALSPDVLRLNNNDWFDYIQNKRYR

SEQ ID NO: 896 - protein, 1271 aa, unidentified
  REGION 1..1271: note = Cas Enzyme sequence
MNNNLNKFTGLYQLSRTLRFELKPIRKTRDNIERNGFLANDEHRAESYKKVKKLIDRYHKAYIDSVLGRFCLNEDVLANYYDLYMRSSKTEKEAKKFEAIQDYLRKSISAALKKDDRFKRIDKKELIRLDMIVYLTDDEEKALVEEFHDFTTYFTGFHENRQNMYSAEAKSTAIAYRLIHDNLPKFIDNIAVFRQIAETSVADNFLKIYMENEEYLNVNSIEEMFDISYYSMVLTQTQIEVYNSIIGGRTLEDGTKLQGINEYINLYNQNLTDKKKRLPKLKPLFKQILSDRAQLSWLQEEFNTGADVIDAVKEYCKDYYDNIEKSIKALLTSLNDYDISKIYVPNDLQLTDISQRMFGNWSIIPNAIEHDIMYNNPRKANETEEKYAERIAKLKKQQKSFSLAYINDCFRELKDADLSTYFASLGAQNTAEKQTTSITSEIDIYYKQLRPLFNVEYPREKNLSQDKLTVMQLKDLLDAFKTLQRFVKPLLGNGDEAEKDEKFYGELMQLWEIINNLTPLYNKVRNYVTRKPFSTEKIKVNFENAQLLDGWDENKEKDNASIILRKDGVYYLGVMKKEQRKLLAKPMPSSGECYEKVVYKFFKDITTMVPKCTTQTKPVKEHFENSTEDYILFDKKSFDAPVVITKEIYDLNNVLYDGVKKFQIEYLRSTNDKKGYEHAVNTWKAFCIQFLKSYKSTSIYNLSSIEEDIEKYKDLNSFYSAVNLLLYSLTFRKVSVDYIDQLVEEDKMYLFQIYNKDFSQYSKGTPNMHTMYWKMLFDEENLKDVVYKLNGQAEVFFRKKSINVSSPTHPANKPIENKNALNKKKQSTFEYDLIKDRRYSVDKFQFHVPLTLNFKSRGTGNINIDVREYIKESNDIHFIGIDRGERHLLYLCVIDGKGNIVEQYSLNEIVNEYKGNKYSTDYHNLLQERDKKRLEERSSWQTIEGIKELKQGYLSQVVHKISQLVVKYNAIVILEDLNMGFKRGRQKVESSIYQQFEKALIDKLNYLVDKSKAPSEDGGLLRAYQLTSKFDSFQKMGKQSGFLFYIPAWNTSKIDPVTGFVNLFDTRYDNVAKSQAFFNKFDSIRYNEKNDWFEISFDYNNFTAKAEGTKTQWTLCTYGTRIETFRNVDKNSNWDSKEVNLTEKWKSLFDDYSIKYDSNLKDAIILQSSKEFYVRLLHLLKLTLQMRNSITGTEVDYMISPVADANGKFFDSRKSDSSLPENADANGAYNIARKGLWIAQQIREAEDLKKVKLAITNKEWLQFAQTKPYLS

SEQ ID NO: 897 - protein, 1271 aa, unidentified
  REGION 1..1271: note = Cas Enzyme sequence
MSKKPEFKDFTGLYSLSKTVRFELIPQGKTKENIETKGLIKEDEERAEKYKKVKKIIDEYHKNFIEEALQGLELKNLNDYYQSYIDADDLKRKDNLDKLSTKLRKEVAASFTGEGAKRLFSKELIKEDLIEFVKSEKEKSLINEFSNFTTYFTGFHENRKNMYSDEPKATSVAYRLVNDNLPKFIDNIKVFEKIKKTDLSGKFKQIQTELNEHLAADSVEELFTIQSFNKALNQTQIDNYNAIIGGKTLSDGTKIQGLNEYINLYNQRQADRKNRLPKFKPLYKQILSDRKSISWLPEEFESGNDNAVLGSIELFYQDIKDTVIDKNNAPEKSLKELLSSIEEYYLDKIYLKNDASLTDISQKLCGSWSFITSAIEADYEEKNPRKAKESEEKYNTRKEKYIKSFTSFSLNELDTYIKKVYPEGNEIKISDYYKQKHPDLFKEISQSYDNIKNILNTKYPEDKNLSQDEENIEKIKRFLDSLKELQHFIKPLLGHGNEPEKDERFYSDFVKLWDILNKLTPLYNKVRNYLTRKPYSQEKIKLNFENSTLLDGWDVNKEPANSCVLLRKEGLYYLGIMDKKHTHVFMEDFETFNEPCFEKMEYKFFKDITTMIPKCSTQMKDVKHHFENSNDDYLIENDKYSVPFKITKEIYELNNVLYEGKKKFQIDYLRQSGDEQGYKTAVKQWIEFCLSFLQSYKSTDSYGYDKIETFLTYDRIDRFYEEINKILYNISFRKIPESYINNLVDSGKLYFFQIYNKDFSPHSKGTPNMHTLYWKMLFDPDNLKDVVYKLNGQAEIFYRKAGIKKNDIIIHPANTPVKNKNKNNPKPESIFEYDIIKNRRYTVDKFQFHVPITLNFKAPNIKNINEKVNIFIKESTAPFVIGIDRGERHLLYLTLIDFNGNIVQQFSLNEIINEYQGNVYKTDFRNLLDKKESGRDEARKSWKTIENIKELKEGYLSQVVHKITELMIKYNALVILEDLNMGFKRGRQKVEKQVYQKFEKMLIDKLNYLADKKKNPGSEGGLLNAYQLSNRFESFQAMRKQNGFLFYIPAWNTSKIDPVTGFVNLFDTRYESIDKSREFFSKFESIRFNNEKNYFEFLVSDYSKFNGKAEGTRLNWKICTHGTRIESFRNPTKNNQWDSREINLTEEFEELFKDKIDINNSLKKSIAAQTDKAFFSKILHLFKLTVQMRNSKTGTDIDYMLSPVADSKGTFYDSRTALEHLPQNADANGAYNIARKGLWVIEQIKKADDPGKINIAISNREWLQFAQKEQQ

SEQ ID NO: 898 - protein, 1271 aa, unidentified
  REGION 1..1271: note = Cas Enzyme sequence
MKEIKELTGLYSLTKTIGLELKPVGKTQQLIESKKLIEQDDQRAEDYKIVKDIIDRYHKDFIDKCLNSVEIKKEDLEEYVSLAENSNRNTKDFDEVKTKMRNQITEAFKKNHLFTGLFKKNLIKDYLPDFVSEEEKNVVNKFSKFTTYFDAFNNNRKNLYSGDAKSGTIAYRLIHENLPMFLDNIASFNKISETRVNEYFSSIEAEFTDTLNGKHLADLFQIDYFNNTLTQKKIDNYNYIVGAVNKAVNLYKQQHKNIRIPLLKKIHKMILSDRVTPSWLPERFESDEEMLTAIKATYESLKEVLVGDDDDSLRNLLLNIDNFDLEHIYIAKDSGLTSISQQIFGYYDTYTLAIKDQLQRKNPATKKQRENPNLYDERIDKLYKKEGSFSIAYLNRLVDTKEHITINEYYRLLGSYCREGGKSNDDFFKQIDGAYSAISYLFSAEHGEIAQSDSDTAVVQKLLEAYKGLQRFIKPLLGHGDEADKDNEFDVKLRKVWDELNIITPLYDKVRNWLSRKIYNPEKIKLYFENNGKLLSGWSDSQTEYDNGTQYGGYIFRKKNEIGEYDFYLGISADAKLFRRDETICYEDGMYERLDYYNLKPNTLLGNSYIGNYGEDSNAVLSAFNDAVTKLHLEKKLVPKDNEKVPTYLKRLKQDYANFYQILMNDNNVVDAYKSMKQHILATLASLIRVPAAIELTTQTNLDIDKLIDEIINLPSESFGYFPVATAAIEEANNREKKPLFLFKMSNKDLSYAEKFSKGDRKSRGTENLHTMYLKALLGMTQNVFSIGSGMVFFRHNTEGLAETTARHKANEFIANKNKLNDKKKSIFDYEIVKNKRFTVDKYLFHLSLKLNYTQPNKFDINSKVREIIRNGGIKHIIGIDRGERNLIYLSLIDMEGNIVMQKSLNILKDDHNAKGTDYKGLLTEREGENKEARRNWKKIANIKDLKRGYLSQVVHIISKMMVEYNAIVVLEDLNPGFIRGRQKIERNVYEQFERMLIDKLNFYVDKHKDANETGGLLHALQLTSEFKNFKKSEHQNGCLFYIPAWNTSKIDPATGFVNLFDTRYTNAEKALEFFRKFDAIRYNEEKDWFEFEFDYDEFTQKAHGTRTRWTLCTHGKRLRSFRNPAKQYNWDSEVVALTDEFKRILGEAGIDIHENLKDAIRNLEGKRRKYLEPLMQFMKLLLQLRNSRKNPEEDYILSPVADENGVFYDSRSCGDTLPKNADANGAYNIARKGLMLIRQIKEAKELGKVKYDISNKAWLNFAQQKPYKNE

SEQ ID NO: 899 - protein, 1271 aa, unidentified
  REGION 1..1271: note = Cas Enzyme sequence
MKEIKELTGLYSLTKTIGVELKPVGKTQELVEAKKLIEQDDQRAEDYKIVKDIIDRYHKDFIDKCLNCVKIKKDDLEKYVSLAENSNRDAEDFDNIKTQMRNQITEAFRKNSLFTNLFKKNLIKEYLPAFVSEEEKSVVNKFSKFTTYFDAFNDNRKNLYSGDAKSGTIAYRLIHENLPMFLDNIASFNKISETGVNEYFSSIEAEFTDTLNGKYLADLFQIDYFNNTLTQKKIDNYNYIVGAVNKAVNLYKQQYKNVRVPLLKKIHKMILSDRVTPSWLPERFESDEEMLTAIKETYESLKDVLVGYNDDSLRNLLLNIDNYDLDHIYIANDSGLTSISQKIFGCYDTYTLAIKYQLQRKHPATKKQKEAPDLYEERIDKLYKKEVSFSIAYLNRLVDTNEHITINEYYRQLGSYCREEGKSKDDFFKQIYGAYSDMLYLFSAEHGEIAQSDSDTAVVQKLLEAYKGLQRFIKPLLGHGDEADKDNEFDAKLRKVWDELDIITPLYDKVRNWLSRKIYNPEKIKLCFENNGKLLSGWVDSRTKSDNGTQYGGYIFRKKNEIGEYDFYLGISADTKLFRRDAAINYDDGMYERLDYYQLKSKTLLGKSYAGDYGLDSMNLLSALKNAAAKFQFEKEMIPKDKENVPKYLKRLKLDYAGFYQILMNDDKVVDAYKSMKQHILATLASSIRVPVAKELATQTELGIDELIDEIMNLPSKSFGYFPIATAAIEEANKRENKPLFLFKMSNKDLSYAATASKGLRKGRGTENLHTMYLKALLGMTQSVFDIGSGMVFFRHQTKGLAETTARHKANEFIANKNKLNDKKKSIFGYEIVKNKRFTVDKYLFKLSMNLNYSQPNKFDVNSKVREIISNGGIKHIIGIDRGERNLLYLSLIDLKGNIVMQKSLNILKDDHNAKETDYKGLLTEREGENKEARRNWKKIANIKDLKRGYLSQVVHIISKMMVEYNAIVVLEDLNPGFIRGRQKIERNVYEQFERMLIDKLNFYVDKHKNANETGGLLHALQLTSEFENFKKSEHQNGCLFYIPAWNTSKIDPATGFVNLFDTRYTNANKALEFFSKFDEIRYNEEKDWFEFEFDYDEFTQKAHGTRTKWTLCTYGMRLRSFKNPAKQYNWDSEVVALTDEFKRILEEAGIDIHENLKDAIRNLKGKKQKYLEPLMQFMKLLLQLRNSKAGTDEDYILSPVVDENGIFYDSRSCGDELPENADANGAYNIARKGLMMIEQIKDAKDLDNLKFDISNKAWLNFAQQKPYKNG

SEQ ID NO: 900 - protein, 1271 aa, unidentified
  REGION 1..1271: note = Cas Enzyme sequence
MEYENFKKIYPLSKTLRFEAKPVGSTLKNFIESGLLEEDEHRAQSYVKVKKLIDEYHKVFIDRVLNDGCLPLENKGNKNSLEEYYESYLSKNRDENANNTFKEIQQNLRSVIAKKLTDDKAYANLFGNKLIESYKDKEDKKKIIDSDLIQFINCANSSQLNGMSEDEAKELVKEFWGFTTYFEGFHTNRKNMYTAEEESTAIAHRLVNENLPKFIDNMDVFKKAVAKPEIQANIEELYANFAAYLNVESIQEMFQLDYYNMLLTQKQIDVYNAIIGGKTDEDHDVKIKGINEYINLYNQQHKNEKLPKLKVLFKQILSDRNAISWLPEEFNDDQEVLNAIKDCYERLSENVLGDKVLKSLLCSLGDYNLDGIFVRNDAQLTDISQKMFGDWGVIQNAIIQNIKNVAPARKRKESEEDYEKRISDIFKKADSFSLRYINDCLNEMDEKNPYTVQWYFSTLGAVNTPTMQRENLFALIQNAYTDISDLLNSQYPTDKNLSQDKTNVAKVKALLDAIKSLQHFVKPLLGRGDESDKDERFYGELASLWTELDTVTPLYNMVRNYMTRKPYSEKKIKLNFENPQLLGGWDANKEKDYASIILRRNGLYYLAIMNKESKKLLGKTMPSDGECYEKMVYKLLPGANKMLPKVFFSKSKIDYFKPSKQIVENYNNDTHKKGKNFNINDCHDLIDFFKQSIDIHEDWSKFGFKFSDTSTYKDLSGFYREVEQQGYKLSFTKVSVSFIDKLVDDGKMYLFQIYNKDFSKYSKGTPNMHTLYWKALFDERNLADVVYKLNGQAEMFYRKKSIVYTHPTHPANHPILNKNKENKKKESVFEYDLVKDRRYTVDKFLLHVPITMNFKSVGSENINQQVREYLQQAEDTHIIGIDRGERHLLYLVVIDMQGNIKEQYTLNEIVNEYNGNTYRTNYHDLLNTREEERLTARQSWQTIENIKELKEGYLSQVIHKITQLMVKYHAVVVLEDLNKGFMRGRQKVEKQVYQKFEKMLIDKLNYLVDKKADAAQLGGLLNAYQLTSKFDSFQKLGKQSGFLFYIPAWNTSKIDPVTGFVNLLDTRYQNTEKAKAFFSKFDAIRYNADKDWFEFYLDYDKFGTKAEGTRTKWTLCTQGCRIRTFRNADKNSQWDNQDVDLTKELKALFEIYHINIGGNLKEGICSQTDKAFFTGLLHILKLTLQMRNSITGTETDYLVSPVADENGVFYDSRSCGDTLPKNADANGAYNIARKGLMLIEQIKETKDLANFKYDISNKAWLNFAQQKPYEK

SEQ ID NO: 901 - protein, 1271 aa, unidentified
  REGION 1..1271: note = Cas Enzyme sequence
MKEIKELTGLYSLTKTIGVELKPVGKTQELIEAKKLIEQDDQRAEDYKIVKDIIDRYHKDFIDKCLNCVKIKKDDLEKYVSLAENSNRDAEDFDNIKTKMRNQITEAFRKNSLFTNLFKKNLIKEYLPAFVSEEEKSVVNKFSKFTTYFDAFNDNRKNLYSGDAKSGTIAYRLIHENLPMFLDNIASFNAISGTGVNEYFSSIETEFTDTLEGKRLTEFFQIDFFNNTLTQKKIDNYNYIVGAVNKAVNLYKQQHKTVRVPLLKPLYKMILSDRIAPSWLPECFKSDNDMLTAIKAAYESLREVLVGDNDESLRNLLLNIEHYDLEHIYIANDSGLTSISQKIFGCYDTYTLAIKDQLQRDYPATKKQRETPDLYDERIDKLYKKVSSFSIAYLNRLVDAKGHFTINEYYKQLGAYCREEVKEKDDFFKSIDGAYCAISHLFFGEHGEIAQSDSDVELVQKLLEAYKGLQRFIKPLLGHGDEADKDNEFDAKLRKVWDELDIITPLYDKVRNWLSRKIYNPEKIKLCFENNGKLLSGWVDSRTKSDNGTQYGGYIFRKKNEIGEYDFYLGISADTKLFRRDAAISYDDGMYERLDYYQLKSKTLLGNSYAGDYGQDSMDLLSAFKNAAAKFQFEKEVVPKDKENVPKYLKRLKLDYAGFYQILMNDDKVVDAYKGMKQHILATLASSIRVPAAIELATQTELGIDELIDEIMNLPSKSFGYFPIVTAAIEEANKRENKPLFLFKMSNKDLSYAATASKGLRKGRGTENLHTMYLKALLGMTQSVFDIGSGMVFFRHQTKGLAETTARHKANEFVANKNKLNDKKKSIFGYEIVKNKRFTVDKYLFKLSMNLNYSQPNKFDVNSEVREIISNGGIKHIIGIDRGERNLLYLSLIDLKGNIVMQKSLNILKNDHNVKGTDYKGLLTEREGERKDARHNWKKIANIKDLKRGYLSQVVHVISKMMVEYNAIVVLEDLNPGFIRGRQKIERNVYDQFEKMLIDKLNFYVDKHKDINEVGGLLHALQLTSEFKNFKKSEHQNGCLFYIPAWNTSKIDPATGFVNLFNTKYSNAVEAHEFFSKFDAIRYNEEKDWFEFEFDYDNFTQKAHGTRTRWTLCTYGMRLRSFKNPAKQYNWDSEVVALTDEFKKILGEAGIDIHENLKDAICNLEGKSQKYLEPLMQFMKLLLQLRNSKAGTDEDYILSPVADENGIFYDSRSCGDELPENADANGAYNIARKGLMMIEQIKDAKDLDNLKFDISNKSWLNFAQQKPYKNE

SEQ ID NO: 902 - protein, 1271 aa, unidentified
  REGION 1..1271: note = Cas Enzyme sequence
MKEIKELTGLYSLTKTIGVELKPVGKTQELVEAKKLIEQDDQRAEDYKIVKDIIDRYHKDFIDKCLNCVKIKKDDLEKYVSLAENSNRDAEDFDNIKTKMRNQITEAFRKNSLFTNLFKKNLIKEYLPAFVSEEEKSVVNKFSKFTTYFDAFNDNRKNLYSGDAKSGTIAYRLIHENLPMFLDNIASFNKISETGVNEYFSSIEAEFTDTLNGKYLADLFQIDYFNNTLTQKKIDNYNYIVGAVNKAVNLYKQQHKNVRIPLLKKIHKMILSDRVTPSWLPERFESDEEMLTAIKETYESLKDVLVGDNDDSLRNLLLNIDNYDLDHIYIANDSGLTSISQKIFGCYDTYTLAVKYQLQRKYPATKKQKETPDLYEERIDKLYKKEVSFSIAYLNRFVDTNEHITINEYYRQLGSYCREDGKSKDDFFKQIDGACSDMLYLFSAEHGEIAQSDSDTAVVQKLLEAYKGLQRFIKPLLGHGDEADKDNEFDARLRKVWDELDIITPLYDKVRNWLSRKIYNPEKIKLCFENNGKLLSGWVDSRTKSDNGTQYGGYIFRKKNEIGEYDFYLGISADTKLFRRDAAINYDDGMYERLDYYQLKSKTLLGKSYAGDYGLDSMNLLSAFKNAAAKFQFEKEMIPKDKENVPKYLKRLKLDYAGFYQILMNDDKVVDAYKSMKQHILATLASSIRVPVAKELATQTELGIDELIDEIMNLPSKSFGYFPIATAAIEEANKRENKPLFLFKMSNKDLSYAATASKGLRKGRGTENLHTMYLKALLGMTQSVFDIGSGMVFFRHQTKGLAETTARHKANEFIANKNKLNDKKKSIFGYEIVKNKRFTVDKYLFKLSMNLNYSQPNKFDVNSKVREIISNGGIKHIIGIDRGERNLLYLSLIDLKGNIVMQKSLNILKDDHNAKETDYKGLLTEREGENKEARRNWKKIANIKDLKRGYLSQVVHIISKMMVEYNAIVVLEDLNPGFIRGRQKIERNVYEQFERMLIDKLNFYVDKHKDANETGGLLHALQLTSEFENFKKSEHQNGCLFYIPAWNTSKIDPATGFANLFDTRYTNAVEAQEFFSKFDEIRYNEEKDWFEFEFDYDKFTQKAHGTRTKWTLCTYGMRLRSFKNPAKQYNWDSEVVALTDEFKRILEEAGIDIHENLKDAIRNLKGKKQKNLEPLMQFMKLLLQLRNSKAGTDEDYILSPVADENGIFYDSRSCGDELPENADANGAYNIARKGLMMIEQIKNAEDLNNVKFDISNKAWLNFAQQKPYKNG

SEQ ID NO: 903 - protein, 1271 aa, unidentified
  REGION 1..1271: note = Cas Enzyme sequence
MATTFFKNFTNQYSLSKTLRFELKPIGTTLENIQKKGLLEQDNQRAESYKKLKKTIDEYHKDFIELALKDVNLSQIDEYYKLYSISKDERDDVVFKKIKDDLRKEIVKTFTSDNVKEKYTNLFAKELLKEDLEIWINKQEKPEDFYFDEKFKNFTTYFTGFNENRRNMYGSDEKSTAIAYRIVHENLPKFIENVKLYKMIKEKHTDLDFKPILTQMEDVIQGESLDTIFSLNYFNNVVSQNGIEFINFIIGGKTPEKGKKIPGLNEYINLYNQQQKDKKNRVPKFKQLYKQILSDRSSISLKFDAFENDSELLEAIEVFYQSELCEFETEGKIKNVFDEIKTLCESIKSYDLEKIYLRNDTNLTNISQHIFGTYSVFKDAMSFYYDNFIDPDFQSKYSNAKTEKHIKTLTDIKSKWNKDFISIGLLQLTLENYVSSLDAEHVIKKVFSKTIIADYFNLHTIKQDIDDKKTDVELFYAIKGQYLGVKGLLNIEKNEKKALAQDKEKVHQLKSFLDSILELSHFIKPLYITEDAISEKDEVFYSQFSPMYDQLNKLTPLYNMVRNYLTQKAYSTDKIKLNFENSTLLDGWDVNKEADNSSVILRKEGLYYLAVMDKADRSVFINAAKSTDIKNSFEKMNYKLLPGANKMLPKVFFSKKNIDFFSPSKELLENYKKETHKKGETFNIDHCHALIDFFKNSLFKHEDWKQFNFVFSPTKSYKDLSGFYREVEHQGYKMTFENIPTDYINKLVEDGKIYLFQIYNKDFSVFSKGKPNMHTLYWMAIFDEKNLADVVYKLNGQAEIFFRKSSIEEKNKIVHKANVALQSKNPLTPDNKNTFDYDIIKDRRYTVDKFQFHVPITMNFKATGSDIINAQTNEFLQNNPDVKIIGLDRGERHLIYLTLIDQQGNILIQESLNTISNSERNIETPYHTLLHEKEKERDAARKSWNAIENIKELKEGYISQVVHKIAEMMIEHNAIVVMEDLNFGFKRGRFKVEKQVYQKLEKMLIDKLNYLVFKNAESTKPGGLLKALQLTNKFESFQKMGKQSGFLYYVPAWNTSKIDPVTGFVDFLKPKYENVKSSHDFFSKFDSIKFNSSKNYFEFAFDYNSFTTKAEGSKTKWTICTFGDERFYYVPSDKSTPKINITEKLKELFKEENITFENGVDLIPAILKAESKFLVKLTKYLSITLALRYSCSSLGRDFILSPIANKNGVFFNSETADKTLPKDADANGAYHIALKGLWCLQQINKTDDLKKVKLAISNKEWLQFIQEKLFK

SEQ ID NO: 904 - protein, 1271 aa, unidentified
  REGION 1..1271: note = Cas Enzyme sequence
KDLSQKAGQWLSSRFGTGTGADFCRFYEVYDAMAKHCQNIQAGVSGAAVCGSLADALHGFSPSSRSINGILELISGPGYKSATRNVLQQINNMQSVSQLDIDRVRDASEKDAQQSREKVGGKGSRPYANAVLQDVEAASGITYHNACNGPSHHWQYAVILDHAARRVSMAHSWIKRAEEERSKFEIEKDKLQCVPSDARAWLDAYCARRSSESGAIDAYRIRRSAVDGWKQVVAEWAALLAKAKNAGSEPPSEAESARIQAARKLQDTIEKFGDIQLFESLSLPDAKCVWLTNGKPDAQPLMDYVAGTDAVSKKQRFKVPAYRHPDAFLHPVFCDFGNSRWSIDYAVHRAPEKLARAQQLLEKKKEELTRAEQALSKASDPSKRSSIEKKLKTLNVAFKQQEAEVLWLESHHAMTMGLWNGSRIEDTPLLWQSKRFGSDIGQAGAEHPLVASRADRFGRAVAMAKDNAPVVPSGLFDLADWNGRLQAPRRQLDAIAAIHDRTDLSVEEKRQLVAKRIRTIRWLVTFSAKLQSRGPFIAYAAQHGFDWRYGAHGIENKSREGLAKLVLCRLPGLRILSVDLGHRYAAACAVWETLSAAQMQNACLEAGMEAPSQRTLYLHLKHFVNGKEKKTIYRRIGAETLPDGSPHPASWARLDRQFLIKLQGEDRDARQATCDEVVAVEQLETELGYVRPIKRKGREHLVDELMSDALRTLRLGLQRHGARARIAFNLTATKRTRPGGIQELLDQESRIGLLTETLLEWNELYAGERWADELARDMWNKHIQPLLGGTILQETNNQDVTPSAAKRRMQREETREKLRPVAKQIAENDSLCRQLNVLWSTRWQIEDAAWRMRLRWMRRWLLPRGINRDPQFRKSIRDVGGLSLIRIASFKSLYQVQKAYWMRPHPDDLRRNIPERGDSSLTSFGQRVLDAMERMRENRVKQLASRIAEAALGIGDETSVNAKNGRRKRPTERSNDPRFAPCHAVVIEDLTHYRPDETQTRRENRQLMSWSSSKVKKYLGEACQLNGLYLREVPPAYTSRQDSRTGAPGLRCNDVTVAEFYTSRFWRKQVEAAEKNQKDGKKGDARERYLLSIDERIRSEANDRDVFRIPVKGGEIFVSACGQDGGSNANRKAPPGLQADLNAAANIGLRAIFDPDWEGRWWYIPCDATTICPVAKKFNGCKAVDSSKPLRIVAEKVAVSSSSINEKRSGRKGIALTDGSRIVNLWRDPSGAPIRRDVPSNSEWQDYAEYWNKVQSRVIANLRKSYGLREI

SEQ ID NO: 905 - protein, 1272 aa, unidentified
  REGION 1..1272: note = Cas Enzyme sequence
MKDETMFSEFTNQYELSKTLRFELKPVGETQQMLEDNNVFQKDEIIQKKYKQTKVYFDRLHREFVAEALRDVSLSNIQEYVDALKNVKKITKETDKKQEDQWKKDFANEEKRLRKEVVGLFDIQAKKWSEEYLGLKNNDLKILDEEAVFSELLKVRYGKESETLISVEHINKETGELTDEEVSIFDEWKGFTGYFTKFFETRKNFYKDDGTSTALATRIIDQNLRRFMENIEIVRFIERNYSDFSFGSVIEQYGFSIEDICSFEFYASHCLLQEGIDDYNKEFVGKIKYAINHYRQANKGAKVPYLKTLDKQILSEKEKFIDEIEDDVRLKAVLVELLQTGTEKTQILKSLFEKFINLPEEFELSKIYWSKKGFETISRRWTYKTNEWADALAKVFKEEEKKTLKRNEGGEIPFPDFIPLDYLKKSLEKVNVAEDFWKEKYQENINLQENIWNQFLHIFEIEFSELFEKTIQTDKGEKMIGYDVYSEKLKSLLTEEKLDKTPEMKIIVKDYADGLLSVYQFSKYFAIEKSKNWDESIDIDVNFYSLFKDEFYHNTFETIIQPYNLLRNYLTKKPWEEVQKWKLNFENSTLGAGWDKNKETDNFSIIFRKDGKFYLGLMKKGCNHMFADKNKEQFAGNGYEKMVYKFFPDQAKMFPKVCFSKKGLDFFQPSEEIWNIYKNAEFKKGDTFSIKSMQKLINFYKDTLTKYEGWQCYNFTDIKPTEEYIENIGEFYRDVAQNGYKISFQNVSEKYIEEKNKRGELYLFQIKNKDWNEGSTGRKNLHTMYFENLFSEANIAKNFIFKLNGQAEVFYRPKAIDEVKVKRNFPREIIEKKRYTKDKVFFHVLLTLNRGMGKSFSFNRQINEFLAHNPKINIIGVDRGEKHLAYYSVINQQSEILESGTLNVINGVDYHQKLEEKAKNREQERKDWQAVEGIKDLKKGYISQVVRKLADLAIEHNAIIVFEDLNMRFKQIRGGIEKSVYQQLEKALIEKLNFLVNKGEDDAEKAGHLLKAYQLAAPFETFKDMGKQTGIIFYTTASYTSKIDPVTGWRPNLYLKYSSAEKAKQEISKFSKIEFKDDKFEFTYDIANFKELRDAPQNTIWTVCSCVERFRWDRKLNNNKGGYLHYDDLTNEFSKLLEEVKIDWNKDILGQIYVLNEKEQVKFFKDFIFFFNLICQIRNTDNSEKTKKEGKDDFILSPVAPFFDSRAENGDRLPKNGDDNGAFNIARKGVITLGKINDWREANEVLKKEGKPEKKYPDLFIGNTEWDNFTQQ

SEQ ID NO: 906 - protein, 1272 aa, unidentified
  REGION 1..1272: note = Cas Enzyme sequence
MTPIFCNFVVYQIMLFNNNININVKTMNKKHLSDFTNLFPVSKTLRFRLEPQGKTMENIVKAQTIETDEERSHDYEKTKEYIDDYHRQFIDDTLDKFAFKVESTGNNDSLQDYLDAYLSANDNRTKQTEEIQTNLRKAIVSAFKMQPQFNLLFKKEMVKHLLPQFVDTDDKKRIVAKFNDFTTYFTGFFTNRENMYSDEAKSTSIAYRIVNQNLIKFVENMLTFKSHILPILPQEQLATLYDDFKEYLNVASIAEMFELDHFSIVLTQRQIEVYNSVIGGRKDENNKQIKPGLNQYINQHNQAVKDKSARLPLLKPLFNQILSEKAGVSFLPKQFKSASEVVKSLNEAYAELSPVLAAIQDVVTNITDYDCNGIFIKNDLGLTDIAQRFYGNYDAVKRGLRNQYELETPMHNGQKAEKYEEQVAKHLKSIESVSLAQINQVVTDGGDICDYFKAFGATDDGDIQRENLLASINNAHTAISPVLNKENANDNELRKNTMLIKDLLDAIKRLQWFAKPLLGAGDETNKDQVFYGKFEPLYNQLDETISPLYDKVRSYLTKKPYSLDKFKINFEKSNLLGGWDPGADRKYQYNAVILRKDNDFYLGIMRDEATSKRKCIQVLDCNDEGLDENFEKVEYKQIKPSQNMPRCAFAKKECEENADIMELKRKKNAKSYNTNKDDKNALIRHYQRYLDRTYPEFGFVYKDADEYDTVKAFTDSMDSQDYKLSFLQVSETGLNKLVDEGDLYLFKITNKDFSSYAKGRPNLHTIYWRMLFDPKNLANVVYKLEGKAEVFFRRKSLASTTTHKAKQAIKNKSRYNEAVKPQSTFDYDIIKDRRFTADKFEFHVPIKMNFKAAGWNSTRLTNEVREFIKSQGVRHIIGIDRGERHLLYLTMIDMDGNIVKQCSLNAPAQDNARASEVDYHQLLDSKEADRLAARRNWGTIENIKELKQGYLSQVVHLLATMMVDNDAILVLENLNAGFMRGRQKVEKSVYQKFEKMLIDKLNYIVDKGQSPDKPTGALHAVQLTGLYSDFNKSNMKRANVRQCGFVFYIPAWNTSKIDPVTGFVNLFDTHLSSMGEIKAFFSKFDSIRYNQDKGWFEFKFDYSRFTTRAEGCRTQWTVCTYGERIWTHRSKNQNNQFVNDTVNVTQQMLQLLQDCGIDPNGNLKEAIANIDSKKSLETLLHLFKLTVQMRNSVTGSEVDYMISPVADERGHFFDSRESDEHLPANADANGAFNIARKGLMVVRQIMATDDVSKIKFAVSNKDWLRFAQHIDD

SEQ ID NO: 907 - protein, 1272 aa, unidentified
  REGION 1..1272: note = Cas Enzyme sequence
MKFDDFKKLYSLSKTLRFEAKPVGSTLKNIIESGLLEEDEHRAQSYVKVKKLIDEYHKVFIDRVLNDGCLTIENKGKKDSLEEYYESYMSKSNDENVSKTFKEIQENLRSVIAKKLTDNNAYANLFGNKLIESYKDKDEKNKIIDSDLIQFINTAEPSQLDSMSQDEAKELVKEFWGFTTYFVGFFDNRKNMYTSEEKSTGIAYRLVNENLPKFIDNMEAFKKAIAKPEIQANMEELYSNFAEYLNVESIQEMFQLDYYNMLLTQKQIDVYNAIIGGKTDEEHDVKIKGINEYINLYNQQHKDEKLPKLKALFKQILSDRNAISWLPEEFNSDQEVLNAIDDCYKRLSENVLGDKVLKSLLCSLDDYNLDGIFVRNDLQLTDISQKMFGNWSVIQNAIMQNIKNVAPARKRKESEEDYEKRISDIFKKADSFSIQYINDCLNEMDDNNLHAVDGYFATLGAVNTPTMQRENLFALIQNAYTDISNLLETPYPENKNLAQDKTNVAKVKALLDAIKSLQHFVKPLLGKGDESDKDERFYGELASLWTELDTVTPLYNMIRNYMTRKPYSEKKIKLNFENPQLLGGWDANKEKDYATIILRRNGMYYLAIMDKDSKKLLGKTMPSDGECYEKMVYKLLPGANKMLPKVFFAKSRINDFKPSKLIVENYNNGTHKKGKNFNINDCHNLIDYFKQSIDKHEDWSKFGFNFSDTSTYEDLSGFYREVEQQGYKLSFTNVSVSFIDKLVDEGKMYLFQIYNKDFSDFSKGTPNMHTLYWKALFDERNLADVVYKLNGQAEMFYRKKSINNTHPTHPANHPIQNKNKDNKKKESVFEYDLIKDRRYTVDKFLFHVPITMNFKSVGSENINQQVREYLQQADDTHIIGIDRGERHLLYLVVIDMQGNIKEQFTLNEIVNEYNGNTYRTNYHDLLDTREEERLTARQSWQTIENIKELKEGYLSQVIHKITQLMVKYHAVVVLEDLNKGFMRGRQKVEKQVYQKFEKMLIDKLNYLIDKKADAAQSGGLLNAYQLTSKFDSFQKLGKQSGFLFYIPAWNTSKIDPVTGFVNLLDTRYQNTEKAKAFFSRFDAIRYNANKDWFEFYLDYDKFCTKAEGTRTKWTLCTQGSRISTFRNAEKNSQWDNLEVDLTREMKSLFERYHINICGNLKEEICLQTDKAFFTGLLHMLKLTLQMRNSITGTETDYLISPVADENGTFYDSRSCGATLPKNADANGAYNIARKGLMFIGQIKETKDLANFKYDISNKAWLNFAQQKPYKNE

SEQ ID NO: 908 - protein, 1272 aa, unidentified
  REGION 1..1272: note = Cas Enzyme sequence
MKFDDFKKLYSLSKTLRFEAKPVGSTLKNIIESGLLEEDEHRAQSYVKVKKLIDEYHKVFIDRVLNDGCLTIENKGKKDSLEEYYESYMSKSNDENVSKTFKEIQENLRSVIAKKLTDDNAYANLFGNKLIESYKDKDEKNKIIDSDLIQFINTAEPSQLDSMSQDEAKELVKEFWGFTTYFVGFFDNRKNMYTSEEKSTGIAYRLVNENLPKFIDNMEAFKKAIAKPEIQASMEELYSNFAEYLNVESIQEMFQLDYYNMLLTQKQIDVYNAIIGGKTDEEHDVKIKGINEYINLYNQQHKDEKLPKLKALFKQILSDRNAISWLPEEFNSDQEVLNAIDDCYKRLSENVLGDKVLKSLLCSLDDYNLDGIFVRNDLQLTDISQKMFGNWSVIQSAIMQNIKNVAPARKRKESEEDYEKRISDIFKKADSFSIQYINDCLNEMDNNNLHAVDGYFATLGAVNTPTMQRENLFALIQNAYTDISNLLETPYPENKNLAQDKTNVAKVKALLDAIKSLQHFVKPLLGKGDESDKDERFYGELASLWTELDTVTPLYNMIRNYMTRKPYSEKKIKLNFENPQLLGGWDANKEKDYATIILRRNGMYYLAIMDKDSKKLLGKTMPSNGECYEKMVYKLLPGANKMLPKVFFAKSRINDFKPSKLIVENYNNGTHKKGKNFNINDCHNLIDYFKQSIDKHEDWSKFGFNFSDTSTYEDLSGFYREVEQQGYKLSFTNVSVSFIDKLVDEGKMYLFQIYNKDFSDFSKGTPNMHTLYWKALFDERNLADVVYKLNGQAEMFYRKKSINNTHPTHPANHPIQNKNKDNKKKESVFEYDLIKDRRYTVDKFLFHVPITMNFKSVGSENINQQVREYLQQADDTHIIGIDRGERHLLYLVVIDMQGNIKEQFTLNEIVNEYNGNTYRTNYHDLLDTREEERLTARQSWQTIENIKELKEGYLSQVVHKITQLMVKYHAVVVLEDLNKGFMRGRQKVEKQVYQKFEKMLIDKLNYLVDKKADAAQSGGLLNAYQLTSKFDSFQKLGKQSGFLFYIPAWNTSKIDPVTGFVNLLDTRYQNTEKAKAFFSRFDAIRYNANKDWFEFYLDYDKFCTKAEGTRTRWTLCTQGSRISTFRNAEKNSQWDNLEVDLTREMKSLFEHYHINICGNLKEEICLQTDKAFFTGLLHMLKLTLQMRNNITGTETDYLISPVADENGTFYDSRSCGDTLPKNADANGAYNIARKGLMFIGQIKETKDLANFKYDISNKAWLNFAQQKPYKNE

SEQ ID NO: 909 - protein, 1272 aa, unidentified
  REGION 1..1272: note = Cas Enzyme sequence
MKDFTNLYPVSKTLRFELQPIGKTKENIEKNGILQRDEKRAEDYKLVKGFIDEYHKQFIKDRLWNFELPLHSEGHLDSLEEYQALYELSKRDDALEAEFTEVKDNLRSIIAKRLTESGSAYERIFKKELIREDLVDFLEKNEDKEIVRQFADFTTYFSGFHENRKNMYTAEEKSTAIAYRLIHQNLPKFMDNMKAFAKIAETSVAEHFAGIYDGWKEYLNVGSIEEIFRLDYFSETLTQPHIEVYNYIIGKKILEDGTEIKGINEYVNLYNQQQKDKKLRLPFLVPLYKQILSDREKLSWLAEEFDSDEKMLAAINESYTHLHDLLMGNENESLRSLLLHIKDFHLAQINITNDLSLTDISQHLFSRYDVFSNGIKDELRNLTPRKGNESDESFEDRISKIFKTQKSFSIDLLDKLPQPVMEDGKPRTIEDYFTSLGAVNTQTTQKENLFVQIENAYEDARTVLQMKDTGDTLSQNKPAVAKIKALLDALKDLQHFIKPLLGSGEEQEKDELFYGSFQLMWDELDTVTPLYNKVRNWLTRKPFSTEKIKLNFESPTLLKNMTVPQTSSAAIFRDKQGCYYLGILDSDSRNCLNEFLSVPADPSGFDFMQYHQGGDMGKNVQNLMVINGKVCKKNGRKERSGQFVGQNLILEKLKNEYLPKDVNEIRLKQSYLTSSSTFSKNDLARFVEYYIPLVKAYYSEYSFIFKKPSEYKSFADFTDHINQQAYQLSFTPISKDSIENLVEEGKLYLFRIWNKDFSEFSKGTPNLHTLYWKMLFDERNLQDVVFMLNGQGAEVFYRKASIKAENRVIHKANQPIANKNELNKKETSIFEYDIIKDRRYTVDKFQFHVPITINFKAAGQTNINPIVQDAIRQGEFSHIIGIDRGERHLLYLSLIDLKGNIVKQMTLNDIVNEYKGQTYKTNYHDLLAKREGDRTDARRSWDTIETIKELKEGYLSQVVHIISKMMVEYNAIVVLEDLNTGFMRGRQKIERQVYEKFEKMLIEKLNCYIDKHVDPSENTGLLHPLQLTCDAQKWKRSHQCGCLFYIPAWNTSKIDPVTGFVNLLDTRYDTREKARLFFSKFQRISYNAQKSWFEFTFDYNDFTAKAEGTRTQWTLCTYGERIRTFRNPQQNHQWDDERIILTDAFKQLFDKYDIDINGNLKEAISTQTDAQFFRELLGLMKLLLQMRNSITNSEEDYLLSPIADDAGHFFDSREGINSLPIDADANGAYNIARKGLWVIRKIQETPDGEKPSLTITNKEWLQFAQTKPYLND

SEQ ID NO: 910 - protein, 1273 aa, unidentified
  REGION 1..1273: note = Cas Enzyme sequence
MKENFIGKYQITKTLRFSLIPIGKTEEYFNARCMLEEDEQRAEDYVKVKSFIDEYHKAFIERILSNLIKQKSTSKGTEFIEKVRDYADLYNSSQRDDKKLNKIGEELRKSISEAFTKDDHYDRLFNKDIIEELLPEYLGDSRKEDTKIVENFVGFKTYFNGFFENRKNMYVKEQETTAIAYRCIDENLPRFLDNATIWKKKLRDALPEEDICRLNKECTDFHDKKVEDIFDIDFFTQVLSQSGIDWYNQILGGYTKEGNIKIQGLNEYINTYNDKVSEKERSHRLPLLKPLYKQILSDRVSTSFIPEKFTSDEELLSAVHKLYTVKEDGRVSLKEAISEIKELFAELSIFNLSGIFVSAKTGLSDVSNRVFGYWGAVKEGWIDNYHENNPLGKRESIELYEKKLNKEYGNIPSFSIEEIQQFGEGKAKEEYRNETVIHFYSGTVRKQSNKICDSYKDAYKRIKPLLEAPNESGNDLRSNKEAIELLKIFLDSVKELEFLVKPFRGEGNETDKDNNFYNRFLVAFDTFTDFDFLYDKVRNYITQKPFSTEKIKLNFNNPQFLGGWHENKESSYSSILLRSAGKYYLGVMDTKSKHSFKKYPSPKSKNDVVEKMFLHQVANPAKDVQNLMVINGKTVRRTGRKETEGEYKGENLRLEELKNTHLPEEINRIRKSQSYLKSSGEIFSKQDLVAFIKFYMERTKEYYTNSHFEFRNAENYQDFKEFTDDIDAQAYQVHFKEISHSFINSLVDKGELYLFQIYNKDFSPYSRGTPNLHTLYFKMLFDERNLADVVFKLDGNAEMFYRKASLKKQITHPANKPIPNKNTMNPKKESTFGYDIIKDKRYTERQFSLHFPITLNFKEAKNANISKEVRDTLYKSDLPYIIGIDRGERNLLYICVIDGNGNIVEQMSMNEITTDNNYKVNYHNLLQRKEEERKKARGNWSVIENIKELKEGYLSQVINKICGLVIKYNAVIAMENLNYGFKRGRFRVEKQVYQKFENNLIKKLNYLADKKLPPEQDGGLLRAYQLTEKFEKINKSNQNGIIFFVPAWLTSKIDPTTGFTNLLYPRYESVKKAKNFFANFNLITYDASEDMFRFDFDYTKFLCGVADFKKKWSVWSYGERIKTRRKEKHNNDIEYTTVQLTDEFKNLFENYRINYLDNLQKQIIEADDKEFFYSLYSLLNLTLQMRNSNPNSGDDYLISPVRNTSGGFYDSRNYLKSGNLSLPVDADANGAYNIARKCLWQIMKLKSLSEDETKKPNLTISNKDWLCYAQENK

SEQ ID NO: 911 - protein, 1273 aa, unidentified
  REGION 1..1273: note = Cas Enzyme sequence
MKDKLMDGFIGKYPLSKTLRFELKPVGKTLAHIEAKGLLAEDTHRAESYQKVKKLIDRFHKPFIEEVLDSFCFSENELNEFLHLYNLSKKSDAEQKEFSKIQAQLRKTVAQQFKKHPHYQGLFKKELIRHDLFELDLTPDEKEMVLYFGKFTTYFKGFHDNRENMYSNESKSTAIAYRIIHQNLPKFIDNLKAFEKVKAIPDLLEKFGTIEQELAAILQGKHLDEIFTLDFFSQTLSQKGIDEYNEILGGYTDPNNASVKYKGLNEYINLYNQKAPKNERVGKLTRLFKQILSDRESISFLPEFYEDDQAVLESIRIFHESYLDNLLHHNEDSRKSLIELLKNLNSFDLSHIYITNERSLSDISQKMFGDWGRIQTCLFAQYDATYAGKKKKKPEKYAEERKNYFKRIESFSLESLNEALTFYNADKFQSVADYFSCLGKDDNGKNLPQFIDEAYQNIISLVQNRYPEDKNLSNDVNNVEKIKTYLDSVNTLLSFIKPFNGKGTDPDKDARFYGDFNEIWQELRKVTPLYNSVRNYMTRKSYSTEKIKLNFENPELMGGWSREIATSCLLLKDDKYFYLGIMDKKSKSKLKHFPAPENDRDIFYKMKYAQVADPKQDVPGLMVIDGKTVKKNGRKEKEGAHAGENLILEDLKNQHLPQEINTIRKLRTYLKTSDYFSSNDLIKYIDFYKQRVVEYFVNFEFEFKDSKDYHNFDEFLAHVNAQAYQVSFKPVSLNYINSLVESGKLYLFQIYNKDFSPYSKGTPNLHTLYFKALFDEVNLKDVVYKLNCSAEIFYRKASPGIKKDPTHYKNKMVKNKNPLNPKKQSVFEYDLIKDKRYTVDKFQFHVPITLNFKAEGWDYLNTDVNRCLKTAENFHVIGIDRGERHLLYLTVIDPQGKIVEQYSLNQIVNEHQGRQYETNYHDLLSEKEKGRDEARKNWQTIENIKELKEGYLSQVIHKIAQLMVKYDAIVVLEDLNFGFMRGRQKVEKQVYQKFEKMLIDKLNYLVDKTVPVNSPGGLLKAYQLTSKFESFQKLGKQSGFLFYIPAWNTSKMDPTTGFVNLFNGKELRYESVDKALAFFDKFDRIAYNQAEEHFEFAFDYSNFTYKAEGSQTRWILCSHGQRIHTFRNPQKNSQWDSETIDLTAAYKALFKANDINFHESDLKAAILTQSDKAFFVELLSLLRLTLQMRNSITGSDVDYLISPVKNCSDAFFDSRQNRPGLPENADANGAYNIARKGLWIIEQLKEKELAELDKPKLAISNKEWLAYAQSHQQ

SEQ ID NO: 912 - protein, 1274 aa, unidentified
  REGION 1..1274: note = Cas Enzyme sequence
MAKIFEDFKRLYPLSKTLRFEAKPIGATLDNIIKSGLLDEDEHRAASYVRVKKLIDEYHKVFIDRVLDNGCLPLKNEGHNNSLTEYYESYVTKSQNEDAKKVFKEIQQNLRSIIAKKLTEDKAYANLFGKNLIESYKDKTDKTKIIDSDLIKFINTAESTQLDSMSQDETKELVKEFWGFTTYFVGFYDNRKNMYTAEEKSTGIAYRLVNENLPKFIDNMEAFKKAIARPEIQANMEELYSDFSEYLNVESVQEMFQLDYYNMLLTQKQIDVYNAIIGGKTDDEHDVKIKGINEYINLYNQQHKDDKLPKLKALFKQILSDRNAISWLPEEFNGDQEVLNAIKDCYERLSENVLGDKVLKSLLGSLSDYSLDGIFIRNDLQLTDISQKMFGNWCVIQNAIMQNIKHVAPARKHKESEEDYEKRIAGIFKKVDSFSISFINDCLNEADPNNAYFVENYFATFGAVNTPTMQRENLFALVQNAYTEVAALLHSDYPTAKHLAQDKVNVAKIKALLDAIKSLQHFVKPLLGKGDESDKDERFYGELASLWAELDTVTPLYNMIRNYMTRKPYSQKKIKLNFENPQLLGGWDANKEKDYATIILRRDGLYYLAIMNKESKKLLGKAMPSDGECYEKMVYKLLPGANKMLPKVFFAKSRMEDFKPSKELVEKYNNGTHKKGKNFNIQDCHNLIDYFKQSISKHEDWGKFGFNFSDTSTYEDLSGFYREVEQQGYKLSFARVSVSYISQLVEEGKMYLFQIYNKDFSEYSEGTPNMHTLYWKALFDERNLADVVYKLNGQAEMFYRKKSIENTHPTHPANHPILNKNKDNKKKESLFDYDLIKDRRYTVDKFMFHVPITMNFKSSGSENINQDVKAYLRHADDMHIIGIDRGERHLLYLVVIDLQGNIKEQYSLNEIVNEYNGNTYHTNYHDLLDVREEERLKARQSWQTIENIKELKEGYLSQVIHKITQLMVKYHAIVVLEDLNMGFMRGRQKVEKQVYQKFEKMLIDKLNYLVDKKADASVSGGLLNAYQLTSKFDSFQKLGKQSGFLFYIPAWNTSKIDPITGFVNLLDTRYQNVEKAKVFFSKFDAIRYNKDKDWFEFNLDYDKFGKKAEGTRTKWTLCTRGMRIDTFRNKEKNSQWDNQEVDLTAEMKSLLEHYYIDIHGNLKDAISAQTDKAFFTGLLHILKLTLQMRNSITGTETDYLVSPVADENGIFYDSRSCGDELPENADANGAYNIARKGLMMIEQIKDAKDLDNLKFDISNKSWLNFAQQKPYKNE

SEQ ID NO: 913 - protein, 1274 aa, unidentified
  REGION 1..1274: note = Cas Enzyme sequence
MAKNFEDFKRLYPLSKTLRFEAKPIGATLDNIVKSGLLDEDEHRAASYVKVKKLIDEYHKVFIDRVLDKGCLPLKNEGHNNSLTEYYDSYVSKSQNEDAKKAFGENQQNLRSIIAKKLTEDKAYANLFGKNLIESYKDKKDKKKIIDSDLIQFINIADSTQLDSMSQDEAQKLVKEFWGFTTYFVGFFDNRKNMYTAEEKSTGIAYRLVNENLPKFIDNMEAFKKAIARPEIQANMVELYSDFSEYLNVESIQEMFQLDYYNMLLTQKQIDVYNAIIGGKTDDEHDVKIKGINEYINLYNQKHKDDKLPKLKALFKQILSDRNAISWLPEEFNSDQEVLNAIKDCYERLSENVLGDKVLKSLLGSLADYSLDGIFIRNDLQLTDISQKMFGNWSVIQNAIMQNIKHVAPARKHKESEEDYEKRIAGIFKKADSFSISYINDCLNEADPNNAYFVENYFATLGAVDTPTMQRENLFALVQNAYTEITALLHSDYPTEKNLAQDKANVAKIKALLDAIKSLQHFVKPLLGKGDESDKDERFYGELASLWAELDTVTPLYNMIRNYMTRKPYSQKKIKLNFENPQLLGGWDANKEKDYATIILRRNGLYYLAIMNKDSKKLLGKAMPSDGECYEKMVYKLLPGANKMLPKVFFAKSRMEDFKPSKELVEKYNNGTHKKGKNFNIQDCHNLIDYFKQSIDKHEDWSKFGFNFSDTSTYEDLSGFYREVEQQGYKLSFTRVSVSFIDQLVEEGKMYLLQIYNKDFSEYSKGTPNMHTLYWKALFDERNLADVVYKLNGQAEMFYRKKSIENTHPTHPANHPILNKNKDNNKKESLFEYDLIKDRRYTVDKFMFHVPITMNFKSSGSENINQDVKAYLRHADDMHIIGIDRGERHLLYLVVIDLQGNIKEQFSLNEIVNDYNGNTYHTNYHDLLDVREDERLKARQSWQTIESIKELKEGYLSQVIHKITQLMVKYHAIVVLEDLNMGFMRGRQKVEKQVYQKFEKMLIDKLNYLVDKKADASVSGGLLNAYQLTSKFDSFQKLGKQSGFLFYIPAWNTSKIDPVTGFVNLLDTRYQNVEKAKAFFSKFDAIRYNKDKEWFEFNLDYDKFGKKAEGTRTKWTLCTRGMRIDTFRNKEKNSQWDNQEVDLTTEMKSLLEHYYIDIHGNLKDAISMQTDKAFFTGLLHILKLTLQMRNSITGTETDYLVSPVADENGIFYDSRSCGDQLPENADANGAYNIARKGLMLVEQIKDAEDFDNVKFDISNKAWLNFAQQKPYKNG

SEQ ID NO: 914 - protein, 1274 aa, unidentified
  REGION 1..1274: note = Cas Enzyme sequence
MAKIFEDFKRLYPLSKTLRFEAKPIGATLDNIIKSGLLDEDEHRAASYVRVKKLIDEYHKVFIDRVLDNGCLPLKNEGHNNSLTEYYESYVTKSQNEDAKKVFKEIQQNLRSIIAKKLTEDKAYANLFGKNLIESYKDKTDKTKIIDSDLIKFINTAESTQLDSMSQDETKELVKEFWGFTTYFVGFYDNRKNMYTAEEKSTGIAYRLVNENLPKFIDNMEAFKKAIARPEIQANMEELYSDFSEYLNVESVQEMFQLDYYNMLLTQKQIDVYNAIIGGKTDDEHDVKIKGINEYINLYNQQHKDDKLPKLKALFKQILSDRNAISWLPEEFNGDQEVLNAIKDCYERLSENVLGDKVLKSLLGSLSDYSLDGIFIRNDLQLTDISQKMFGNWCVIQNAIMQNIKHVAPARKHKESEEDYEKRIAGIFKKVDSFSISFINDCLNEADPNNAYFVENYFATFGAVNTPTMQRENLFALVQNAYTEVAALLHSDYPTAKHLAQDKVNVAKIKALLDAIKSLQHFVKPLLGKGDESDKDERFYGELASLWAELDTVTPLYNMIRNYMTRKPYSQKKIKLNFENPQLLGGWDANKEKDYATIILRRDGLYYLAIMNKESKKLLGKAMPSDGECYEKMVYKLLPGANKMLPKVFFAKSRMEDFKPSKELVEKYNNGTHKKGKNFNIQDCHNLIDYFKQSISKHEDWGKFGFNFSDTSTYEDLSGFYREVEQQGYKLSFARVSVSYISQLVEEGKMYLFQIYNKDFSEYSEGTPNMHTLYWKALFDERNLADVVYKLNGQAEMFYRKKSIENTHPTHPANHPILNKNKDNKKKESLFDYDLIKDRRYTVDKFMFHVPITMNFKSSGSENINQDVKAYLRHADDMHIIGIDRGERHLLYLVVIDLQGNIKEQYSLNEIVNEYNGNTYHTNYHDLLDVREEERLKARQSWQTIENIKELKEGYLSQVIHKITQLMVKYHAIVVLEDLNMGFMRGRQKVEKQVYQKFEKMLIDKLNYLVDKKADASVSGGLLNAYQLTSKFDSFQKLGKQSGFLFYIPAWNTSKIDPITGFVNLLDTRYQNVEKAKVFFSKFDAIRYNKDKDWFEFNLDYDKFGKKTEGTRTKWTLCTRGMRIDTFRNKEKNSQWDNQEVDLTAEMKSLLEHYYIDIHGNLKDAISAQTDKAFFTGLLHILKLTLQMRNSITGTETDYLVSPVADENGIFYDSRSCGDELPENADANGAYNIARKGLMMIEQIKDAKDLDNLKFDISNKSWLNFAQQKPYKNE

SEQ ID NO: 915 - protein, 1274 aa, unidentified
  REGION 1..1274: note = Cas Enzyme sequence
VRKYALSKTLRFELKPVGETAGKIEDFKNKTIASIVEQDKKRAEDYKKIKKIIDDYHRYFIEQVLVQEVLTGADIQKAFESYVAFRGSKDESKRKDYQAIQKNLRTKIAKAFKEQSDKYCLFDAGLLNEKGTGKNRTKGLLWIWLKHRLDNKQINQSEFEEAERLIKSFDRFSTYFTGFNQNRQNIYSAEEQQTAISYRIIHDNMVKHFNNCLSFQAIQQNHKDLAEQMKDCKDVFNPATFKSYLGQTGIDCYNEKIGHKPDDINAKGVNQLINEYCQKNSTKNDKIKLPKMAILYKQILSDVEDKFKIDVFETDRQMLETINQFYLDIKDNLESIKTCLGQYLAGNNLEKIYIKKDSLTDISQNLWGSWGFINFALEKYADEILRLNEKKKEKWVKQDTFSIGEIQKALDNYFDGCEEKTERKILAQYFVDFKNDEHNLIVSIENAYQQTAEILPLEKLDKDRREPKGNNNGGKGFLQVEKIKELLDSIMAVVQFVKPLYLIKSGKIIEVGDKCTDFYDTFDGLYRNVSACIGIYNKTRNYVTQKPYSTNKFKINFENSTLLDGWDVNKETANSGILLIKDGRYYLGIMRKDTTDIFNYMPESDDSAKKQQTKKLLKQQVIADGADDYYEKMIYKLLPDPAKMLPKVFFSDSNINSYAPSGEILEIREKGLYKKEAGNPKAISQWIDFLKESIKKHPEWGAYFSFIFSPTADYADTSEFYKEVAQQGYNISFDKIKASYINEKVKAGELYLFEIYNKDFSSYSKGKPNLHTSYWKLLFSPENLNDLVLKLNGQAEIFFRPTSINKSETPVHKAKQSINNKNQLNPKKQSSFDYDIVKDRRFTADKFFFHCPITLNFRSASIAGRFNDAVNGYLKDNPDVNIIGIDRGERHLLYYSVINKNGQIVEQASFNTVANSYNSDGRDIDVKTDYHKLLDEKEKQRDAARKSWSTIENIKELKSGYLSHIVHNLASLMIKYNAVIILEDLNFGFKRGRFKVEKQVYQKFEQALIDKLNYLVFKNSKAGQAGHYLNAYQLTAPFESFQKLGKQSGFLFYVLSHYTSKIDPVTGFVNLLDTTYASVEKSQKFFKKFDGIIFNAKKNYFEFSFNYANFPPDKSGSKKDWAVCTAGKERYRHDKQKKESVCYDVTAELIKLFDKYGISYKNGENLVNVISNNDKTEFFKNLLFYLGLTLQLRHSYKDGDEEKDFILSPVADKDGNFFDSRKAKENQPKDADANGAFNIARKGLMVLRQIRCPDIGKPDVIKNADWFNFAQSGR

SEQ ID NO: 916 - protein, 1274 aa, unidentified
  REGION 1..1274: note = Cas Enzyme sequence
MAKNFEDFKRLYPLSKTLRFEAKPIGATLDNIVKSGLLDEDEHRAASYVKVKKLIDEYHKVFINRVLADGCLPLKNEGHNNSLTEYYDSYVSKSQNEDAKKAFEENQQNLRSIIAKKLIEDKAYANLFGKNLIESYKDKEDKKKIIDSDLIQFICTAEATQLDSMSQDEAKEIVKEFWGFTTYFVGFFDNRKNMYTAEEKSTGIAYRLINENLPKFIDNMEAFKKAIARPEIQANMEELYSNFSEYLNVESIQEMFQLDYYNMLLTQKQIDVYNAIIGGKTDDEHDVKIKGINEYINLYNQQHKDDKLPKLKALFKQILSDRNAISWLPEEFNGDQEVLNAIKDCYERLSENVLGDKVLKFLLGSLSDYSLDGIFIRNDLQLTDISQKMFGNWCVIQNAIMQNIKHVAPARKHKESEEDYEKRIAGIFKKVDSFSISFINDCLNEADPNNAYFVENYFATFGAVNTPTMQRENLFALVQNAYTEVAALLHSDYPTAKHLAQDKVNVAKIKALLDAIKSLQHFVKPLLGKGDESDKDERFYGELASLWAELDTVTPLYNMIRNYMTRKPYSQKKIKLNFENPQLLGGWDANKEKDYATIILRRDGLYYLAIMNKESKKLLGKAMPSDGECYEKMVYKLLPGANKMLPKVFFAKSRMEDFKPSKELVEKYNNGTHKKGKNFNIQDCHNLIDYFKQSISKHEDWGKFGFNFSDTSTYEDLSGFYREVEQQGYKLSFTRVSVSYISQLVEEGKMYLFQIYNKDFSEYSKGTPNMHTLYWKALFDERNLADVVYKLNGQAEMFYRKKSIENTHPTHPANHPILNKNKDNKKKESLFDYDLIKDRRYTVDKFMFHVPITMNFKSSGSENINQDVKAYLRHADDMHIIGIDRGERHLLYLVVIDLQGNIKEQYSLNEIVNEYNGNTYHTNYHDLLDVREEERLKARQSWQTIENIKELKEGYLSQVIHKITQLMVKYHAIVVLEDLNMGFMRGRQKVEKQVYQKFEKMLIDKLNYLVDKKADASVSGGLLNAYQLTSKFDSFQKLGKQSGFLFYIPAWNTSKIDPITGFVNLLDTRYQNVEKAKVFFSKFDAIRYNKDKDWFEFNLDYDKFGKKAEGTRTKWALCTRGMRIDTFRNKEKNSQWDNQEVDLTAEMKSLLEHYYIDIHGNLKDAISAQTDKAFFTGLLHILKLTLQMRNSITGTETDYLVSPVADENGIFYDSRSCGDELPENADANGAYNIARKGLMMIEQIKDAKDLDNLKFDISNKSWLNFAQQKPYKNE

SEQ ID NO: 917 - protein, 1274 aa, unidentified
  REGION 1..1274: note = Cas Enzyme sequence
MAKIFEDFKRLYPLSKTLRFEAKPIGATLDNIIKSGLLDEDEHRAASYVRVKKLIDEYHKVFIDRVLDNGCLPLKNEGHNNSLTEYYESYVTKSQNEDAKKVFKEIQQNLRSIIAKKLTEDKAYANLFGKNLIESYKDKTDKTKIIDSDLIKFINTAESTQLDSMSQDEAKELVKEFWGFTTYFVGFYDNRKNMYTAEEKSTGIAYRLVNENLPKFIDNMEAFKKAIARPEIQANMEELYSDFSEYLNVESVQEMFQLDYYNMLLTQKQIDVYNAIIGGKTDDEHDVKIKGINEYINLYNQQHKDDKLPKLKALFKQILSDRNAISWLPEEFNGDQEVLNAIKDCYERLSENVLGDKVLKSLLGSLSDYSLDGIFIRNDLQLTDISQKMFGNWCVIQNAIMQNIKHVAPARKHKESEEDYEKRIAGIFKKVDSFSISFINDCLNEADPNNAYFVENYFATFGAVNTPTMQRENLFALVQNAYTEVAALLHTDYPTAKHLAQDKVNVAKIKALLDAIKSLQHFVKPLLGKGDESDKDERFYGELASLWAELDTVTPLYNMIRNYMTRKPYSQKKIKLNFENPQLLGGWDANKEKDYATIILRRDGLYYLAIMNKDSKKLLGKAMPSDGECYEKMVYKLLPGANKMLPKVFFAKSRMGDFKPSKELIEKYNNGTHKKGKKFDIQDCHNLIDYFKQSISKHEDWGKFGFNFSDTSTYEDLSGFYREVEQQGYKLSFVRVSVSYINQLVEEGKMYLFQIYNKDFSEYSKGTPNMHTLYWKALFDERNLADVVYKLNGQAEMFYRKKSIENTHPTHPANHPILNKNKDNKKKESLFDYDLIKDRRYTVDKFMFHVPITMNFKSSGSENINQDVKAYLRHADDMHIIGIDRGECHLLYLVVIDLQGNIKEQFSLNEIVNEYNGYTYHTNYHDLLDVREEERLKARQSWQTIENIKELKEGYLSQVIHKITQLMVKYHAIVVLEDLNMGFMRGRQKVEKQVYQKFEKMLIDKLNYLVDKKADASVSGGLLNAYQLTSKFDSFQKLGKQSGFLFYIPAWNTSKIDPITGFVNLLDTRYQNVEKAKVFFSKFDAIRYNKDKDWFEFNLDYDKFGKKAEGTRTKWTLCTRGMRIDTFRNKEKNSQWDNQEVDLTAEMKSLLEHYYIDIHGNLKDAISAQTDKAFFTGLLHILKLTLQMRNSITGTETDYLVSPVADENGIFYDSRSCGDELPENADANGAYNIARKGLMMIEQIKDAKDLDNLKFDISNKSWLNFAQQKPYKNE

SEQ ID NO: 918 - protein, 1274 aa, unidentified
  REGION 1..1274: note = Cas Enzyme sequence
MAKIFEDFKRLYPLSKTLRFEAKPIGATLDNIIKSGLLDEDEHRAASYVRVKKLIDEYHKVFIDRVLDNGCLPLKNEGHNNSLTEYYESYVTKSQNEDAKKVFKEIQQNLRSIIAKKLTEDKAYANLFGKNLIESYKDKTDKTKIIDSDLIKFINIAESTQLDSMSQDEAKELVKEFWGFTTYFVGFYDNRKNMYTAEEKSTGIAYRLVNENLPKFIDNMEAFKKAIARPEIQANMEELYSDFSEYLNVESVQEMFQLDYYNMLLTQKQIDVYNAIIGGKTDDEHDVKIKGINEYINLYNQQHKDDKLPKLKALFKQILSDRNAISWLPEEFNGDQEVLNAIKDCYERLSENVLGDKVLKSLLGSLSDYSLDGIFIRNDLQLTDISQKMFGNWCVIQNAIMQNIKHVAPARKHKESEEDYEKRIAGIFKKVDSFSISFINDCLNEADPNNAYFVENYFATFGAVNTPTMQRENLFALVQNAYTEVAALLHSDYPTAKHLAQDKVNVAKIKALLDAIKSLQHFVKPLLGKGDESDKDERFYGELASLWAELDTVTPLYNMIRNYMTRKPYSQKKIKLNFENPQLLGGWDANKEKDYATIILRRDGLYYLAIMNKESKKLLGKAMPSDGECYEKMVYKLLPGANKMLPKVFFAKSRMEDFKPSKELVEKYNNGTHKKGKNFNIQDCHNLIDYFKQSISKHEDWGKFGFNFSDTSTYEDLSGFYREVEQQGYKLSFARVSVSYISQLVEEGKMYLFQIYNKDFSEYSKGTPNMHTLYWKALFDERNLADVVYKLNGQAEMFYRKKSIENTHPTHPANHPILNKNKDNKKKESLFDYDLIKDRRYTVDKFMFHVPITMNFKSSGSENINQDVKAYLRHADDMHIIGIDRGERHLLYLVVIDLQGNIKEQYSLNEIVNEYNGNTYHTNYHDLLDVCEEERLKARQSWQTIENIKELKEGYLSQVIHKITQLMVKYHAIVVLEDLNMGFMRGRQKVEKQVYQKFEKMLIDKLNYLVDKKADASVSGGLLNAYQLTSKFDSFQKLGKQSGFLFYIPAWNTSKIDPVTGFVNLLDTRYQNVEKAKVFFSKFDAIRYNKDKDWFEFNLDYDKFGKKAEGTRTKWALCTRGMRIDTFRNKEKNSQWDNQEVDLTAEMKSLLEHYYIDIHGNLKDAISAQTDKAFFTGLLHILKLTLQMRNSITGTETDYLVSPVADENGIFYDSRSCGDELPENADANGAYNIARKGLMMIEQIKDAKDLDNLKFDISNKSWLNFAQQKPYKNE

SEQ ID NO: 919 - protein, 1274 aa, unidentified
  REGION 1..1274: note = Cas Enzyme sequence
MAKIFEDFKRLYPLSKTLRFEAKPIGATLDNIIKSGLLDEDEHRAASYVRVKKLIDEYHKVFIDRVLDNGCLPLKNEGHNNSLTEYYESYVTKSQNEDAKKVFKEIQQNLRSIIAKKLTEDKAYANLFGKNLIESYKDKTDKTKIIDSDLIKFINTAESTQLDSMSQDETKELVKEFWGFTTYFVGFYDNRKNMYTAEEKSTGIAYRLVNENLPKFIDNMEAFKKAIARPEIQANMEELYSDFSEYLNVESVQEMFQLDYYNMLLTQKQIDVYNAIIGGKTDDEHDVKIKGINEYINLYNQQHKDDKLPKLKALFKQILSDRNAISWLPEEFNGDQEVLNAIKDCYERLSENVLGDKVLKSLLGSLSDYSLDGIFIRNDLQLTDISQKMFGNWCVIQNAIMQNIKHVAPARKHKESEEDYEKRIAGIFKKVDSFSISFINDCLNEADPNNAYFVENYFATFGAVNTPTMQRENLFALVQNAYTEVAALLHSDYPTAKHLAQDKINVAKIKALLDAIKSLQHFVKPLLGKGDESDKDERFYGELASLWAELDAVTPLYNMIRNYMTRKPYSQKKIKLNFENPQLLGGWDANKEKDYATIILRRDGLYYLAIMNKDSKKLLGKAMPSDGECYEKMVYKLLPGANKMLPKVFFAKSRMEDFKPSKELVEKYNNGTHKKGKNFNIQDCHNLIDYFKQSISKHEDWGKFGFNFSDTSTYEDLSGFYREVEQQGYKLSFARVSVSYISQLVEEGKMYLFQIYNKDFSEYSKGTPNMHTLYWKALFDERNLADVVYKLNGQAEMFYRKKSIENTHPTHPANHPILNKNKDNKKKESLFDYDLIKDRRYTVDKFMFHVPITMNFKSSSSENINQDVKAYLRHADDMHIIGIDRGERHLLYLVVIDLQGNIKEQYSLNEIVNEYNGNTYHTNYHDLLDVREEERLKARQSWQTIENIKELKEGYLSQVIHKITQLMVKYHAIVVLEDLNMGFMRGRQKVEKQVYQKFEKMLIDKLNYLVDKKADASVSGGLLNAYQLTSKFDSFQKLGKQSGFLFYIPAWNTSKIDPITGFVNLLDTRYQNVEKAKVFFSKFDAIRYNKDKDWFEFNLDYDKFGKKAEGTRTKWTLCTRGMRIDTFRNKEKNSQWDNQEVDLTAEMKSLLEHYYIDIHGNLKDAISAQTDKAFFTGLLHILKLTLQMRNSITGTETDYLVSPVADENGIFYDSRSCGDELPENADANGAYNIARKGLMMIEQIKDAKDLDNLKFDISNKSWLNFAQQKPYKNE

SEQ ID NO: 920 - protein, 1274 aa, unidentified
  REGION 1..1274: note = Cas Enzyme sequence
MAKIFEDFKRLYPLSKTLRFEAKPIGATLDNIIKSGLLDEDEHRAASYVRVKKLIDEYHKVFIDRVLDNGCLPLKNEGHNNSLTEYYESYVTKSQNEDAKKVFKEIQQNLRSIIAKKLTEDKAYANLFGKNLIESYKDKTDKTKIIDSDLIKFINTAESTQLDSMSQDEAKELVKEFWGFTTYFVGFYDNRKNMYTAEEKSTGIAYRLVNENLPKFIDNMEAFKKAIARPEIQANMEELYSDFSEYLNVESVQEMFQLDYYNMLLTQKQIDVYNAIIGGKTDDEHDVKIKGINEYINLYNQQHKDDKLPKLKALFKQILSDRNAISWLPEEFNGDQEVLNAIKDCYERLSENVLGDKVLKSLLGSLSDYSLDGIFIRNDLQLTDISQKMFGNWCVIQNAIMQNIKHVAPARKHKESEEDYEKRIAGIFKKVDSFSISFINDCLNEADPNNAYFVENYFATFGAVNTPTMQRENLFALVQNAYTEVAALLHTDYPTAKHLAQDKVNVAKIKALLDAIKSLQHFVKPLLGKGDESDKDERFYGELASLWAELDTVTPLYNMIRNYMTRKPYSQKKIKLNFENPQLLGGWDANKEKDYATIILRRDGLYYLAIMNKDSKKLLGKAMPSDGECYEKMVYKLLPGANKMLPKVFFAKSRMGDFKPSKELIEKYNNGTHKKGKKFDIQDCHNLIDYFKQSISKHEDWGKFGFNFSDTSTYEDLSGFYREVEQQGYKLSFVRVSVSYINQLVEEGKMYLFQIYNKDFSEYSKGTPNMHTLYWKALFDERNLADVVYKLNGQAEMFYRKKSIENTHPTHPANHPILNKNKDNKKKESLFDYDLIKDRRYTVDKFMFHVPITMNFKSSGSENINQDVKAYLRHADDMHIIGIDRGERHLLYLVVIDLQGNIKEQFSLNEIVNEYNGYTYHTNYHDLLDVREEERLKARQSWQTIENIKELKEGYLSQVIHKITQLMVKYHAIVVLEDLNMGFMRGRQKVEKQVYQKFEKMLIDKLNYLVDKKADASVSGGLLNAYQLTSKFDSFQKLGKQSGFLFYIPAWNTSKIDPITGFVNLLDTRYQNVEKAKVFFSKFDAIRYNKDKDWFEFNLDYDKFGKKAEGTRTKWTLCTRGMRIDTFRNKEKNSQWDNQEVDLTAEMKSLLEHYYIDIHGNLKDAISAQTDKAFFTGLLHILKLTLQMRNSITGTETDYLVSPVADENGIFYDSRSCGDELPENADANGAYNIARKGLMMIEQIKDAKDLDNLKFDISNKSWLNFAQQKPYKNE

SEQ ID NO: 921 - protein, 1274 aa, unidentified
  REGION 1..1274: note = Cas Enzyme sequence
MAKIFEDFKRLYPLSKTLRFEAKPIGATLDNIIKSGLLDEDEHRAASYVRVKKLIDEYHKVFIDRVLDNGCLPLKNEGHNNSLTEYYESYVTKSQNEDAKKVFKEIQQNLRSIIAKKLTEDKAYANLFGKNLIESYKDKTDKTKIIDSDLIKFINTAESTQLDSMSQDEAKELVKEFWGFTTYFVGFYDNRKNMYTAEEKSTGIAYRLVNENLPKFIDNMEAFKKAIARPEIQANMEELYSDFSEYLNVESVQEMFQLDYYNMLLTQKQIDVYNAIIGGKTDDEHDVKIKGINEYINLYNQQHKDDKLPKLKALFKQILSDRNAISWLPEEFNGDQEVLNAIKDCYERLSENVLGDKVLKSLLGSLSDYSLDGIFIRNDLQLTDISQKMFGNWCVIQNAIMQNIKHVAPARKHKESEEDYEKRIAGIFKKVDSFSISFINDCLNEADPNNAYFVENYFATFGAVNTPTMQRENLFALVQNAYTEVAALLHTDYPTAKHLAQDKVNVAKIKALLDAIKSLQHFVKPLLGKGDESDKDERFYGELASLWAELDTVTPLYNMIRNYMTRKPYSQKKIKLNFENPQLLGGWDANKEKDYATIILRRDGLYYLAIMNKDSKKLLGKAMPSDGECYEKMVYKLLPGANKMLPKVFFAKSRMGDFKPSKELIEKYNNGTHKKGKKFDIQDCHNLIDYFKQSISKHEDWGKFGFNFSDTSTYEDLSGFYREVEQQGYKLSFVRVSVSYINQLVEEGKMYLFQIYNKDFSEYSKGTPNMHTLYWKALFDERNLADVVYKLNGQAEMFYRKKSIENTHPTHPANHPILNKNKDNKKKESLFDYDLIKDRRYTVDKFMFHVPITMNFKSSGSENINQDVKAYLRHADDMHIIGIDRGERHLLYLVVIDLQGNIKEQFSLNEIVNEYNGNTYHTNYHDLLDVREEERLKARQSWQTIENIKELKEGYLSQVIHKITQLMVKYHAIVVLEDLNMGFMRGRQKVEKQVYQKFEKMLIDKLNYLVDKKADASVSGGLLNAYQLTSKFDSFQKLGKQSGFLFYIPAWNTSKIDPITGFVNLLDTRYQNVEKAKVFFSKFDAIRYNKDKDWFEFNLDYDKFGKKAEGTRTKWTLCTRGMRIDTFRNKEKNSQWDNQEVDLTAEMKSLLEHYYIDIHGNLKDAISAQTDKAFFTGLLHILKLTLQMRNSITGTETDYLVSPVADENGIFYDSRSCGDELPENADANGAYNIARKGLMMIEQIKDAKDLDNLKFDISNKSWLNFAQQKPYKNE

SEQ ID NO: 922 - protein, 1274 aa, unidentified
  REGION 1..1274: note = Cas Enzyme sequence
MKKNLEKFIGLYHMDKTLRFELKPMGKTLENINNNGFIENDNHRADSYKKVKKLIDRYHKHYIESVLGDFKLNSIQLEAYYNLYTQQSKTEKEIKEFEAIQDKLRKSIADALKKDDRFKRIDKKELINEDLNVVLENDDERILVSEFQGFTSYFTGFHENRKNMYSDEAKSTAIAYRLIHENLPKFIDNIAIFKKVAETSVADKFSKLYKDFEEYLNVYNINEMFDLDYYSIVLTQKQIEVYNGIIGGKTLEDGTKVQGLNEYINLYNQQQNDKRASLPKLKPLFKQILSDREQLSWLQEEFKTGGDVLDAVKEYCEAYFMNVDEMIKVLLTSIANYDLSKIYIPNDLSLTDISQKMLGNWNVIPNAIEQDFRNRYIKKPEENEEKYSERISKLVKQEKSFSLAYINSCLSELDNADISTYFASLGAVNIPDKQTSSITTEISMYYNQLKPLFDIEYPKEKNLSQDKLTVMQLKNLLDAFKALQRFVKPLLGKGNEAEKDEKFYGELMQLWGIIDEITPLYNKVRNYATRKPYSTDKIKVNFENAQLLDGWDENKEENNAAIILLKDGLYYLGIVKKEHRNILKVDKPMPSNGECYDKVVYKFFKDITTMVPKCTTQMKAVKQHFENSSESYTLFDKKSFNAPVEITKEIFELNNVLYNGVKKFQIEYLRSTNDRAGYEHAVNLWKEFCMQFLKAYKSTAIYDLSSIEKDWAKYTDLSSFYGAVNLLLYNLSYKKVSVEYIDKLVEEDKMYLFQIYNKDFSEYSKGTPNMHTLYWKMLFDERNLKDVVYKLNGQAEIFFRKKSISMAKPTHPANKPIDNKNVLNKRKQSTFKYDLIKDKRYTLDKFQFHVPITINFKSGGDGKINIDVCKHIKDSNDMHFIGIDRGERHLLYLCVINSKGEIVEQYSLNEIVNEYKGNKYHTDYHHLLQERDKKRQEERTSWQTIEGIKELKQGYLSQVIHKISQLIVKYNALVILEDLNMGFKRSRQKVESSVYQQFEKALIDKLNYYVDKKTEPTEDGGLLRAYQLASKFDSFQKMGKQSGFIFYVPAWNTSKIDPVTGFVNLLDTRYESVAKSQKFFDDFDSIRYNGEKDWFELKFDYNKFTKKAEGTKTDWTLCTYGTRVETFRNSEKNANWDSREINLTDEWKALFDKYNIPLNCNLKDAIAQQTSKDFHNILLHLLKLTLQMRNSETGTDIDYMVSPIANEDGKFYDSRLCDKSLPENADANGAYNIARKGLWIAQQIKEAEDLKKVKLAITNKEWLQFAQQKPYLND

SEQ ID NO: 923 - protein, 1274 aa, unidentified
  REGION 1..1274: note = Cas Enzyme sequence
APAKVTEDESSEEEQEEKAKDLVQKAGQWLSSRFGTGKGADFSRMAAVYGKIAAWADNAQAGTTGNQAINKLAADLSEFTPASNDLQGVLGLISGPGYKSATRNLLNGLATKTTVTQQDFGSLRDKAADDAQKCKQNTGSKGQRPYSDAILKDVEAVCGFTYLQQDGGAARHSEFAVILDHAARRVSLAHTWIKRAEAERRRFEEDTQRLANVPGPVKAWLDSFCSERSATSGALEPYRIRRRAVDGWKEVVTAWSKSSCSTSADRIAAARALQDDPEIDKFGDIQLFEALAEDDAVCVWHKDGDAAKAPDPQSLIDYALAAEAEFKKRHFKVPAYRHPDALLHPIFCDFGKSRWDICFDVHKNVQTPFPRALCLTLWTGSGMVSVPLCWQSKRLARDLAIGSNATNAGYVEVARADRLGRAASNVTKSDEVKISGLFEQADWNGRLQAPRQQLEAIAVVRDNLSLSAQERERRMSSMKDRIRWLVTFSAKLQPQGPWCEFAKTNQLRIDPQYWPHADSNKTRKGQARLILSRLPGLRVLSVDLGHRYAAACAVWEAVNAEQVKKACQVAGHEAPKASDLYLHLKRKATKRKKGNQVVVEETTIYRRIGADTLPDGTQHPAPWARLDRQFLIKLQGEEEGVREASNEEVLKVYHLEAELGRTAPIIDRLVKAGWGQSGKQRTRLEALRELGWKPASEAVVSDGMGADEGEVRKPSLSVDELMSSAVRTMRLALKRHGDRARIAHYLITDEKTRPGGVKEKLNENGRIDLLQDALLMWHDLFSSRGWRDDVARQLWDNHVAKLSGYKAPEEIGEESSGPERKKRQKENREKLHDVAKALAQDVTLREALHDAWKKRWKDDDERWKKQLRWFKDWVLPRGKHASDPAIRKVGGLSLPRLATLTEFRRKVQVGFFTRLQPDGTRAETKEQFGQSALDALEHLREQRVKQLASRIAEAALGIGRMRRPMGGKDPKRPNGRVDEPCHAIVIEDLTHYRPEETRTRRENRQLMTWSSSKVKKYLAEACQLHGLHLREVSASYTSRQDSRTGAPGIRCQDVPVKEFMRLPFWRKQIAQTEKKQAEGKGDARERFLCDLNAKWKGKSEADWEKAGVIRVPVRGGEIFVSASRDSQGAKSLQADLNAAANIGLRALTDPDWPGKWWYVPCDPASFRPIKDKVEGSAAVKPDQALRQSAQAQSGDAAKDKKKRGNKSAGKSKEVINLWRNISSSPLECIEFGEWKEYAAYQNEVQCRVIRILEEQIKGRDKQLHEGAKEDDISF

SEQ ID NO: 924 - protein, 1275 aa, unidentified
  REGION 1..1275: note = Cas Enzyme sequence
MKKENIFENFTHQYSLSKTLRFELIPTEETKRFLEKNEIIKKDAVIDESYHKAKPYFDSLHREFIKESLDPERSLLSFGNFERSWNDFQKDKKSNKKNLLAQKKLLYKDIAKLFDDYVNTWKKQYAPETKNSGTKLLYSADTLSILKKRFPKDSENEKLFIKDEHGNDRYIFDSFDRFTTYLTKFQATRENLYKNDGTSTAVATRIVENLSFFLANKSKFEKFLAYKDILKLTDQEKESSKTEYYMRCMTQPGIEKYNALVGDLNARMKTLRDTAGKDAKKSDYPLLKKLYNQILAEKKIESDKVFDIESNEEVPVRMHEFYEEVERVSTIAKELVTILAQGGFENEYGGIYLHNRAINTIARKWFVSAYEFENCLPQKGKKKEGSVRVAPFVSFAEIKDALGEKLAEDLLKEKLFEEKAYRLVKRTLAYSQFLALFAKDLEILLNEYNEKKNNFSKKDLRIFERGENDENVDALKDALDAGLHIVQFMKYFVLSSKKADDKPTHTSAEFYNHYDELYGDPDQKHDIVRYYDAFRNFLTKKPADQKKIKLNFENGALLTGFDKDKESEKLGIILRKNSIYYLGIINKEHNKIFDDKKHQDAFDVVDATSYEKMEYKLFPDPKRMVPKIAFAKKNRERFGWTQEIQDIKDEYARFQDDRGDRSNWSKQFDKIKLTKLIAYYQHALDRGGYKNTFDFQWNNPVDYSGIGEFNDHLTSQNYKIGFRQVRQRYIDDKVAQGELYLFKIHNKDFGEKSKGTQNTHTLYFLNLFSQHNLTHIKLRLAGNAEVFYRKSSTQRKEEQRKFIRPIVKNKRFTEDKYFFHIPIKIGASVNSISETKFNRTLNEKLRQSACLIIGIDRGEKHLAYYSVINQKGEIVDQASLNKINDVDYCEKLRTREKERLEQRKSWKAISQIKDLKRGYISQVIHKLSELVIKHNAIIVFEDLNMRFKEVRGGIERSAYQQLEKALIEKFGYLVFKDKDPLEAGGVLNGYQLSAPFESFEKMGKQNGVIFYTNPEYTSTTDPVTGWRQHIYIKSDATDNEALKVFTEKIGIGWSDDKQSYTFSYDQKDFWEDSPARKWVLYANAPRLERYRNDAGYWTTRETNSNDLLRELFEVWDFDQPEGDISEQIAMMYEEGKLKGEKIISEKSQRFFKALRYALNLTQQIRNSDSIRYVYERDAQGDIVEDSQGKMVVKEIGENVDFIASPVVPFFTTPNPYTKENLCGLVIENGDANGAYNIARKGIMMLERIKQTQANPDLYISKSDWDEWLMKDIKQK

SEQ ID NO: 925 - protein, 1275 aa, unidentified
  REGION 1..1275: note = Cas Enzyme sequence
MTMKKFVGLYPVTKTLKFELISQGKTSTHIQRKGLLSQDEQLAEQYKKVKEIIDEYHKDFIEKALSGIRLTKLDDFYSQYILSKEQRDDNFFDKIKEELRKEIVAAFSKGELKIQFANMFKKELIKEDLLNWIGDEKRNSVKEFENFTTYFTGFHENRKNMYSAEEKSTAIAYRIIHENLPKFIDNIRIYDTIKFKHKNLDFSPILNELKDIIQGKSLDEIFTLDYFNNLISQNGIDFLNSIIGGRSGKSSEKKIKGLNEYINQYNQKQNDKKDRIPKFKQLYKQILSDRSSISWMPQAFEKDTEVFDAINDFYHVELGNAEIDGRSVNILNAVKTIVKSLSDYEELDKIYLRNDLSITTISQTIFSDYGVLGRALNHYYETFVSPQWLVDYAKAKETKRKKLEAEKEKFIKSTYISIAVLQTALAEYVKTLDDDSSIKQKYSATLIADYFTKYFYAKDENGNEAKNTLTDQITIEYGDFKNVLDNKRSVDYKLIQDKKHVHQIKIFLDSIMNLLHFVKPLYVDKSASEEKNELFYGEFTPVYEELAKIVPLYNKTRNYLTQKPYSIEKFKLNFENSTLLDGWDANKERDNTAVILIKDDRYYLGIMDKRHNTIFEKIPETNNRNAVFKKINYKLLPGPNKMLPKVFFSEKRMPEFGVPEEIYEKYNAGTHKKGDNFNLSDCHQLIDFFKSSIQKHEDWKRFDFKFSPTKSYKDVSGFYREVEQQGYKITFSDVSEEYINQLVEEGKLYLFQIYNKDFSPNKKDQGKPNLHTLYWKALFAPENLADVVYKLNGQAEMFFRKKSIDAKKTIIHKANEIIENKNPSASKKTSKFKYDIIKDRRYTVDKFQFHVPITMNFKVSGSDYINPKVNAFLRNNPNVKIIGLDRGERHLIYLTVIDLQGRIIRQESLNTIKNKQYNMETLYHELLDKREKERDAARKSWNTIETIKELKEGYISQVVHKITTMMIEHNAIVVLEDLNFGFKRGRFKVEKQVYQKLEKMLIDKLNYLVMKDNKDNEAGGLYKALQLTNKFSSFKDMGKQTGFLFYVPAWNTSKIDPVTGFVNLFNTRYENVEKAKDFFSKFDSIIFNSKEKYFEFEAKDYSKFSDKAEGTRLDWTICTHGERIETFRNSEKNNNWSHRKINITNELLKLFGTENGDFKNLIQEKTDRAFFERLLYLFKMTVQMRNSDNVEDYMISPVADKSGKFYDSRDYAKINEPSLPENADANGAYNIARKGLWILQQINETKTEDDLKKLKLNISNKEWLQFAQRQGLVNK

SEQ ID NO: 926 - protein, 1275 aa, unidentified
  REGION 1..1275: note = Cas Enzyme sequence
MKKENIFENFTHQYSLSKTLRFELIPTEETKRFLEKNEIIKKDAVIDESYHKAKPYFDSLHREFIKESLDPERSLLSFGNFERSWNDFQKDKKSNKKNLLAQKKLLYKDIAKLFDDYVNTWKKQYAPETKNSGTKLLYSADTLSILKKRFPKDSENEKLFIKDEHGNDRYIFDSFDRFTTYLTKFQATRENLYKNDGTSTAVATRIVENLSFFLANKSKFEKFLAYKDILKLTDQEKESSKTEYYMRCMTQPGIEKYNALVGDLNARMKTLRDTAGKDAKKSDYPLLKKLYNQILAEKKIESDKVFDIESNEEVPVRMHEFYEEVERVSTIAKELVTILAQGGFENEYGGIYLHNRAINTIARKWFVSAYEFENCLPQKGKKKEGSVRVAPFVSFAEIKDALGEKLAEDLLKEKLFEEKAYRLVKRTLAYSQFLALFAKDLEILLNEYNEKKNNFSKKDLRIFERGENDENVDALKDALDAGLHIVQFMKYFVLSSKKADDKPTHTSAEFYNHYDELYGDPDQKHDIVRYYDAFRNFLTKKPADQKKIKLNFENGALLTGFDKDKESEKLGIILRKNSIYYLGIINKEHNKIFDDKKHQDAFDVVDATSYEKMEYKLFPDPKRMVPKIAFAKKNRERFGWTQEIQDIKDEYARFQDDRGDRSNWSKQFDKIKLTKLIAYYQHALDRGGYKNTFDFQWNNPVDYSGIGEFNDHLTSQNYKIGFRQVRQRYIDDKVAQGELYLFKIHNKDFGEKSKGTQNTHTLYFLNLFSQHNLTHIKLRLAGNAEVFYRKSSTQRKEEQRKFIRPIVKNKRFTEDKYFFHIPIKIGASVNSISETKFNRTLNEKLRQSACLIIGIDRGEKHLAYYSVINQKGEIVDQASLNKINDVDYCEKLRTREKERLEQRKSWKAISQIKDLKRGYISQVIHKLSELVIKHNAIIVFEDLNMRFKEVRGGIERSAYQQLEKALIEKFGYLVFKDKDPLEAGGVLNGYQLSAPFESFEKMGKQNGVIFYTNPEYTSTTDPVTGWRQHIYIKSDATDNEALKVFTEKIGIGWSDDKQSYTFSYDQKDFWEDSPARKWVLYANAPRLERYRNDAGYWTTRETNSNDLLRKLFEVWDFDQPEGDISEQIAMMYEEGKLKGEKIISEKSQRFFKALRYALNLTQQIRNSDSIRYVYERDAQGDIVEDSQGKMVVKEIGENVDFIASPVVPFFTTPNPYTKENLCGLVIENGDANGAYNIARKGIMMLERIKQTQANPDLYISKSDWDEWLMKDIKQK

SEQ ID NO: 927 - protein, 1275 aa, unidentified
  REGION 1..1275: note = Cas Enzyme sequence
MKKENIFENFTHQYSLSKTLRFELIPTEETKRFLEKNEIIKKDAVIDESYHKAKPYFDSLHREFIKESLDPERSLLSFGNFERSWNDFQKDKKSNKKNLLAQKKLLYKDIAKLFDDYVNTWKKQYAPETKNSGTKLLYSADTLSILKKRFPKDSENEKLFIKDEHGNDRYIFDSFDRFTTYLTKFQATRENLYKNDGTSTAVATRIVENLSFFLANKSKFEKFLAYKDILKLTDQEKESSKTEYYMRCMTQPGIEKYNALVGDLNARMKTLRDTAGKDAKKSDYPLLKKLYNQILAEKKIESDKVFDIESNEEVPVRMHEFYEEVERVSTIAKELVTILAQGGFENEYGGIYLHNRAINTIARKWFVSAYEFENCLPQKGKKKEGSVRVAPFVSFAEIKDALGEKLAEDLLKEKLFEEKAYRLVKRTLAYSQFLALFAKDLEILLNEYNEKKNNFSKKDLRIFERGENDENVDALKDALDAGLHIVQFMKYFVLSSKKADDKPTHTSAEFYNHYDELYGDPDQKHDIVRYYDAFRNFLTKKPADQKKIKLNFENGALLTGFDKDKESEKLGIILRKNSIYYLGIINKEHNKIFDDKKHQDAFDVVDATSYEKMEYKLFPDPKRMVPKIAFAKKNRERFGWTQEIQDIKDEYARFQDDRGDRSNWSKQFDKIKLTKLIAYYQHALDRGGYKNTFDFQWNNPVDYSGIGEFNDHLTSQNYKIGFRQVRQRYIDDKVAQGELYLFKIHNKDFGEKSKGTQNTHTLYFLNLFSQHNLTHIKLRLAGNAEVFYRKSSTQRKEEQRKFIRPIVKNKRFTEDKYFFHIPIKIGASVNSISETKFNRTLNEKLRQSACLIIGIDRGEKHLAYYSVINQKGEIVDQASLNKINDVDYCEKLRTREKERLEQRKSWKAISQIKDLKRGYISQVIHKLSELVIKHNAIIVFEDLNMRFKEVRGGIERSAYQQLEKALIEKFGYLVFKDKGPLEAGGVLNGYQLSAPFESFEKMGKQNGVIFYTNPEYTSTTDPVTGWRQHIYIKSDATDNEALKVFTEKIGIGWSDDKQSYTFSYDQKDFWGDSPARKWVLYANAPRLERYRNDAGYWTTRETNSNDLLRELFEVWDFDQPEGDISEQIAMMYEEGKLKGEKIISEKSQRFFKALRYALNLTQQIRNSDSIRYVYERDAQGDIVEDSQGKMVVKEIGENVDFIASPVVPFFTTPNPYTKENLCGLVIENGDANGAYNIARKGIMMLERIKQTQANPDLYISKSDWDEWLMKDIKQK

SEQ ID NO: 928 - protein, 1275 aa, unidentified
  REGION 1..1275: note = Cas Enzyme sequence
MKKENIFENFTHQYSLSKTLRFELIPTEETKRFLEKNEIIKKDAVIDESYHKAKPYFDSLHREFIKESLDPERSLLSFGNFERSWNDFQKDKKSNKKNLLAQKKLLYKDIAKLFDDYVNTWKKQYAPETKNSGTKLLYSADTLSILKKRFPKDSENEKLFIKDEHGNDRYIFDSFDRFTTYLTKFQATRENLYKNDGTSTAVATRIVENLSFFLANKSKFEKFLAYKDILKLTDQEKESSKTEYYMRCMTQPGIEKYNALVGDLNARMKTLRDTAGKDAKKSDYPLLKKLYNQILAEKKIESDKVFDIESNEEVPVRMHEFYEEVERVSTIAKELVTILAQGGFENEYGGIYLHNRAINTIARKWFVSAYEFENCLPQKGKKKEGSVRVAPFVSFAEIKDALGEKLAEDLLKEKLFEEKAYRLVKRTLAYSQFLALFAKDLEILLNEYNEKKNNFSKKDLRIFERGENDENVDALKDALDAGLHIVQFMKYFVLSSKKADDKPTHTSAEFYNHYDELYGDPDQKHDIVRYYDAFRNFLTKKPADQKKIKLNFENGALLTGFDKDKESEKLGIILRKNSIYYLGIINKEHNKIFDDKKHQDAFDVVDATSYEKMEYKLFPDPKRMVPKIAFAKKNRERFGWTQEIQDIKDEYARFQDDRGDRSNWSKQFDKIKLTKLIAYYQHALDRGGYKNTFDFQWNNPVDYSGIGEFNDHLTSQNYKIGFRQVRQRYIDDKVAQGELYLFKIHNKDFGEKSKGTQNTHTLYFLNLFSQHNLTHIKLRLAGNAEVFYRKSSTQRKEEQRKFIRPIVKNKRFTEDKYFFHIPIKIGASVNSISETKFNRTLNEKLRQSACLIIGIDRGEKHLAYYSVINQKGEIVDQASLNKINDVDYCEKLRTREKERLEQRKSWKAISQIKDLKRGYISQVIHKLSELVIKHNAIIVFEDLNMRFKEVRGGIERSAYQQLEKALIEKFGYLVFKDKDPLEAGGVLNGYQLSAPFESFEKMGKQNGVIFYTNPEYTSTTDPVTGWRQHIYIKSDATDNEALKVFTEKIGIGWSDDKQSYTFSYDQKDFWGDSPARKWVLYANAPRLERYRNDAGYWTTRETNSNDLLRKLFEVWDFDQPEGDISEQIAMMYEEGKLKGEKIISEKSQRFFKALRYALNLTQQIRNSDSIRYVYERDAQGDIVEDSQGKMVVKEIGENVDFIASPVVPFFTTPNPYTKENLCGLVIENGDANGAYNIARKGIMMLERIKQTQANPDLYISKSDWDEWLMKDIKQK

SEQ ID NO: 929 - protein, 1275 aa, unidentified
  REGION 1..1275: note = Cas Enzyme sequence
MALEQFVNLYPATKTLRFELIPQGKTLEHIQTKGLLTQDEQLAENYKKAKKVIDDYHKDFIEKALSGIKLTKLNDFRSQYQSPKDQRDENAFGKIKEALRKEIVAAFNKDELKARFANLFKKELIKEDLVNWVDGENKELIKEFEKFTTYFTGFYENRKNMYSVEEKSTAIAYRIINENLPKFIDNINIYKTIKSNHKDLDFSRVLDELKGVIQIKSLDKIFDLDYFNNLLSQNGIDFLNSIIGGRSGKAGEKKIKGFNEHINLYNQQQDKTKRAPKFKQLYKQILSDRNSISWLPEAFETDKEVLGAINNFYREGLENTEIDGKPINILNAIETIVKSLSNYGQLDKIYLRNDTAITAISQTLFGSYGILGHALNHYYEAFINSNWVADYAKAKETKRKKLETEKNKFTKSTYLSIDVLQTALAEYVKTLDDDSDIKQKYTPTLIVDYFTDHFYTKDENGNETKITLTDQIVDKYNDIENFLDTERPEDDKLIQDKEDVHQLKAFLDSIMNLLHFVKPLYVDKNASEEKNELFYTEFTPLYEELAKIVPLYNKVRNYLTQKPYTVEKFKLNFENSTLLDGWDVNKERDNTAVILLKGAHYYLGIMDKQNNTIFEKIPATDNTNTAFTKVNYKLLPGANKMLPKVFFSKSRMAEFGVSEKMHENYKAGTHTKGDNFNLSDCHKLIDFFKSSIQKHEDWKHFNFKFSPTKSYEDISGFYKEVEQQGYKITFSDVSKEYVDQLVDEGKLYLFQIYNKDFSPYSKGKPNLHTLYWKALFAPENLANVIYKLNGQAEVFFRKKSIPLKKTFVHKAKEKIENKRPSASKKTSVFGYDITKDRRYTIDKFQFHVPITMNFKATGNDYINQKVNKFLRNSPDVKIIGLDRGERHLIYLTLIDQQGGIIRQESLNTIKDEQHKIETPYHELLDRKEKERDEARKSWDTIENIKELKEGYISQVVHKIVTMMIEHNAIVVLEDLNFGFKQGRFKVEKQVYQKLEKMLIDKLNYLVIKDKKDAETGGLYKALQLTNKFSSFKDIGKQTGFLFYVPAWNTSKIDPVTGFVDFLKPKYESIEQARIFLGKFLDIRFNSTEHYFEFSFDYKDFTTKAEETRTEWTICTHGERIETFRNPDKSNKWDNQDINLSKEFELIFNKYHINYRKGENLKESILKQTEKAFFERLMYLLRLTLQIRNSKTGTDTDYLISPVPNKDGNFYNSGKVGKELPQNADANGAYNIARKGLWILQQIKKTKTDDDLKKLKLAISNKEWLQFVQNSGRANK

SEQ ID NO: 930 - protein, 1275 aa, unidentified
  REGION 1..1275: note = Cas Enzyme sequence
MRKSFKDFTNMYPVQKTLRFELKPLGKTEQHIKESFIIEHDEQRSNDYKAAKKIIDDYHRLFIQKTLSQTDLDWKDLKEALEYDGEDKDKRLETVQKDKRSKIICRFTEQPEFKKLFGKELFSELLPEMINAENADNKDEKLHAAAAFDKFSTYFKGFHDNRRNIYSNEEISTSVAYRIVHQNFPKFLANAETFKTICKKAPEIIEQTQKELSKILGKHKLEDIFRIESFNNVMTQDGIDYYNNIIDGVPCEAGKKKLRGVNEFASIYRQQHPDTKIQIKMVPLYKQILSDRATLSFMPAALDNDGDAFEAVAGLEKMLNEPDAETKTSVLQQISALFAKPSDYSQERVWINQKSVPVVSAALFGSWDTLGSALAAYKENELGDTRGKDKKVEKWIKSKAFSFASLDAAADFYKDSLPGEKSARRIKDYFAGCRELVKNTSEKQKEFDKIKDSALFGNETNTSAVKAYLDSLNDILRFMRPFETEDITDIDTEFYSAYSVLLEKIKMVIPVYNTVRNYVTKKPFKTDKFKLNFENPTLAYGWDKSKEQANTAILLMKDDKYYLGIMNAKHKIKPAELADDHNGDGYKKMQYMQMSGPTKDLPNLLVIDGKTVRKTGSKDANGVNRKQEQLKNTYLPPDINEIRLDGSYLETSNNFSKKNSQKYLAYYMKLLKEYKSNFDFNFKKANEYESYYDFTNDIKKQCYSLTFTNLAENKVDKWVDEGRLYLFQIWNKDFAEGVSGRPNLHTLYWKALFSPENLKNVVYKLNGKAELFFRRKSINEPVVHPTGSKKVNRRDIDGSPIDDETFNEIYLYANGKRALGSLGAAARALVESKRVRITDVKHELVKDKRYTQDKFFFHVSLTINFKASGKENINSDVNLFLKNNKDVKIIGIDRGERNLIYISLIDRKGNIIEQKHFNTVGGMDYHAKLDQREKARDEARKSWKTIGNIKELKEGYLSQVIHEITKMAVENDAIIAMEDLNVGFKRGRFKVEKQVYQKFEEMLINKLNYLSFKDTGENKQCGIRNGLQLAGKFTSFKKIGKQCGIIFYVPAGYTSKIDPVTGFVSVFNLSAVTSQEKQKEFIDRLDSIRYDKKLDMFVFSFDYSEFKTYQTLPVTKWDVYTNGKRIINKREGSRWIPQNVVPTEEMKRTLKQLGIEYESGRDILPVIMERDKKLASDVFYIFKNTLQMRNSNAATGEDYIISPVKGKKGVFFSSSAKDKSLPQDADANGAYHIALKGSLVLDAIDEKLKDDGKMSYKDMYISNPDWFKFMQTGKH

SEQ ID NO: 931 - protein, 1275 aa, unidentified
  REGION 1..1275: note = Cas Enzyme sequence
MGKNQNFQEFIGVSPLQKTLRNELIPTETTKKNITQLDLLTEDEIRAQNREKLKEIMDDYYRDVIDSTLHAGIVVDWSYLFSCMRNHLRENSKESKRELERTQDSIRSQIHNKFAERADFKVMFGASIITKLLPTYIKQNPEYSERYDESMEILKLYGKFTTSLTDYFETRKNIFSKEKISSAVGYRIVEENAEIFLQNQNAYDRICKIAGLDLHGLDNEITAYVDGKTLKEVCSDEGFAKVITQEEIDRYNEAIGAVNQYMNLFCQKNKALKSGQFKMKRLHKQILCKGTTSFDIPKKFENDKQVYDAVNSFTEIVTKNNDLKRLLNITQNANDYDMNKIYVVADAYSMISQFISKKWNLIEECLLDYYSDNLPGKGNAKENKVKKAVKEETYRSVSQLNEVIEKYYVEKTGQSVWKVESYISSLAEMIKLELCHEIDNDEKHNLIEDDEKISEIKELLDMYMDVFHIIKVFRVNEVLNFDETFYSEMDEIYQDMQEIVPLYNHVRNYVTQKPYKQEKYRLYFHTPTLANGWSKSKEYDNNAIILVREDKYYLGILNAKKKPSKEIMAGKEDCSEHAYAKMNYYLLPGANKMLPKVFLSKKGIQDYHPSSYIVEGYNEKKHIKGSKNFDIRFCRDLIDYFKECIKKHPDWNKFNFEFSATETYEDISAFYREVEKQGYRVEWTYINSEDIQKLEDDGQLFLFQIYNKDFAVGSTGKPNIHTLYLKNLFSEENLRDIVLKLNGEAEIFFRKSSVQKPVIHKCGSILVNRTYEITENGTTRVQSIPESEYMELYRYYNSEKQIELSDEAKKYLDKVQCNKAKTDIVKDYRYTMDKFFIHLPITINFKVDKGNNVNAIAQQYIAERKDLHVIGIDRGERNLIYVSVIDMYGRILEQKSFNLVEQVSSQGTKRYYDYKEKLQNREEERDKARKSWKTIGKIKELKEGYLSSVIHEIAQMVVKYNAIIAMEDLNYGFKRGRFKVERQVYQKFETMLISKLNYLADKSQAVDEPGGILRGYQMTYVPDNIKNVGRQCGIIFYVPAAYTSKIDPTTGFIDAFKRDVVATNDAKENFLMKFDSIQYDREKGLFKFSFDYKNFATHKLTLAKTKWDVYTNGTRIQKVKVEGHWLSREVELTTKMKELLDDSHILYEEGQNILDDLREMKDITTVVNGILEIFWLTVQLRNSRTDNPDYDRIISPVLNHKGEFFDSDQYKAYVDAQKAPLPSDADANGAFCIALKGMYTANQIKENWVEGEKLPADCLKIEHASWLAFMQGERG

SEQ ID NO: 932 - protein, 1275 aa, unidentified
  REGION 1..1275: note = Cas Enzyme sequence
MGKNQNFQEFIGISPLQKTLRNELIPTETTKKNIAQLDLLTEDEIRAQNREKLKEMMDDYYRDVIDSTLHAGIVVDWSYLFSCMRNHLRENSKESKRELERTQDSIRSQIHNKFAERADFKDMFGASIITKLLPTYIKQNSKYSERYDESMQILKLYGKFTTSLTDYFETRKNIFSKEKISSAVGYRIVEENAEIFLQNQNAYDRICKIAGLDLHGLDNEITAYVDGKTLKEVCSDEGFAKAITQEGIDRYNEAIGAVNQYMNLLCQKNKALKPGQFKMKRLHKQILCKGTTSFDIPKKFENDKQVYDAVNSFTEIVTKNNDLKRLLNITQNANDYDMNKIYVVADAYSMISQFISKKWNLIEECLLDYYSDNLPGKGNAKENKVKKAVKEETYRSVSQLNEVIEKYYVEKTGQSVWKVESYISSLAEMIKLELCHEIDNDEKHNLIEDDEKISEIKELLDMYMDVFHIIKVFRVNEVLNFDETFYSEMDEIYQDMQEIVPLYNHVRNYVTQKPYKQEKYRLYFHTPTLANGWSKSKEYDNNAIILVREDKYYLGILNAKKKPSKEIMAGKEDCSEHAYAKMNYYLLPGANKMLPKVFLSKKGIQDYHPSSYIVEGYNEKKHIKGSKNFDIRFCRDLIDYFKECIKKHPDWNKFNFEFSATETYEDISVFYREVEKQGYRVEWTYINSEDIQKLEEDGQLFLFQIYNKDFAVGSTGKPNLHTLYLKNLFSEENLRDIVLKLNGEAEIFFRKSSVQKPVIHKCGSILVNRTYEITESGTTRVQSIPESEYMELYRYFNSEKQIELSDEAKKYLDKVQCNKAKTDIVKDYRYTMDKFFIHLPITINFKVDKGNNVNAIAQQYIAEQEDLHVIGIDRGERNLIYVSVIDMYGRILEQKSFNLVEQVSSQGTKRYYDYKEKLQNREEERDKARKSWKTIGKIKELKEGYLSSVIHEIAQMVVKYNAIIAMEDLNYGFKRGRFKVERQVYQKFETMLISKLNYLADKSQAVDEPGGILRGYQMTYVPDNIKNVGRQCGIIFYVPAAYTSKIDPTTGFINAFKRDVVSTNDAKENFLMKFDSIQYDIEKGLFKFSFDYKNFATHKLTLAKTKWDVYTNGTRIQNMKVEGHWLSMEVELTTKMKELLDDSHIPYEEGQNILDDLREMKDITTIVNGILEIFWLTVQLRNSRIDNPDYDRIISPVLNNDGEFFDSDEYNSYIDAQKAPLPIDADANGAFCIALKGMYTANQIKENWVEGEKLPADCLKIEHASWLAFMQGERG

SEQ ID NO: 933 - protein, 1275 aa, unidentified
  REGION 1..1275: note = Cas Enzyme sequence
MGKNQNFQEFIGVSPLQKTLRNELIPTETTKKNITQLDLLTEDEIRAQNREKLKEMMDDYYRDVIDSTLHAGIAVDWSYLFSCMRNHLRENSKESKRELERTQDSIRSQIYNKFAERADFKDMFGASIITKLLPTYIKQNPEYSERYDESMEILKLYGKFTTSLTDYFETRKNIFSKEKISSAVGYRIVEENAEIFLQNQNAYDRICKIAGLDLHGLDNEITAYVDGKTLKEVCSDEGFAKAITQEGIDRYNEAIGAVNQYMNLLCQKNKALKPGQFKMKRLHKQILCKGTTSFDIPKKFENDKQVYDAVNSFTEIVMKNNDLKRLLNITQNVNDYDMNKIYVAADAYSTISQFISKKWNLIEECLLDYYSDNLPGKGNAKENKVKKAVKEETYRSVSQLNELIEKYYVEKTGQSVWKVESYISRLAETITLELCHEIENDEKHNLIEDDDKISKIKELLDMYMDAFHIIKVFRVNEVLNFDETFYSEMDEIYQDMQEIVPLYNHVRNYVTQKPYKQEKYRLYFNTPTLANGWSKNKEYDNNAIILMRDDKYYLGILNAKKKPSKQTMAGKEDCLEHAYAKMNYYLLPGANKMLPKVFLSKKGIQDYHPSSYIVEGYNEKKHIKGSKNFDIRFCRDLIDYFKECIKKHPDWNKFNFEFSATETYEDISVFYREVEKQGYRVEWTYINSEDIQKLEEDGQLFLFQIYNKDFAVGSTGKPNLHTLYLKNLFSEENLRDIVLKLNGEAEIFFRKSSVQKPVIHKCGSILVNRTYEITESGTTRVQSIPESEYMELYRYFNSEKQIELSDEAKKYLDKVQCNKAKTDIVKDYRYTMDKFFIHLPITINFKVDKGNNVNAIAQQYIAEQEDLHVIGIDRGERNLIYVSVIDMYGRILEQKSFNLVEQVSSQGTKRYYDYKEKLQNREEERDKARKSWKTIGKIKELKEGYLSSVIHEIAQMVVKYNAIIAMEDLNYGFKRGRFKVERQVYQKFETMLISKLNYLADKSQAVDEPGGILRGYQMTYVPDNIKNVGRQCGIIFYVPAAYTSKIDPTTGFINAFKRDVVSTNDAKENFLMKFDSIQYDIEKGLFKFSFDYKNFATHKLTLAKTKWDVYTNGTRIQNMKVEGHWLSMEVELTTKMKELLDDSHIPYEEGQNILDDLREMKDITTIVNGILEIFWLTVQLRNSRIDNPDYDRIISPVLNNDGEFFDSDEYNSYIDAQKAPLPIDADANGAFCIALKGMYTANQIKENWVEGEKLPADCLKIEHASWLAFMQGERG

SEQ ID NO: 934 - protein, 1275 aa, unidentified
  REGION 1..1275: note = Cas Enzyme sequence
MGKNQNFQEFMGVSPLQKTLRNELIPTETTKKNITQLDLLTEDEIRAQNREKLKEMMDDYYRDVIDSTLHAGIAVDWSYLFSCMRNHLRENSKESRRELERTQDSIRSQIHNKFAERADFKDMFGASIITKLLPTYIKQNPEYSERYDESMEILKLYGKFTTSLTDYFETRKNIFSKEKISSAVGYRIVEENAEIFLQNQNAYDRICKIAGLDLHGLDNEITAYVDGKTLKEVCSDEGFAKAITQEGIDRYNEAIGAVNQYMNLLCQKNKALKPGQFKMKRLHKQILCKGTTSFDIPKKFENDKQVYDAVNSFTEIVTKNNDLKRLLNITQNANDYDMNKIYVVADAYSMISQFISKKWNLIEECLLDYYSDNLPGKGNTKENKVKKAVKEETYRSVSQLNELIEKYYVEKTGQSVWKVESYISSLAETIKLELCHEIDNDEKNNLIEDDEKISEIKELLDMYMDVFHIIKVFRVNEVLNFDETFYSEMDEIYQDMQEIVPLYNRVRNYVTQKPYKQEKYRLYFHTPTLANGWSKSKEYDNNAIILVRDDKYYLGILNAKKKPSKEIMAGKENCSEHAYAKMNYYLLPGANKMLPKVFLSKKGIQDYHPSSYIVEGYNEKKHIKGSKNFDIQFCRDLIDYFKECIKKHPDWNKFNFEFSATETYEDISVFYREVEKQGYRVEWTYINSEDIQKLEEDGQLFLFQIYNKDFAVGSTGKPNLHTLYLKNLFSEENLRDIVLKLNGEAEIFFRKSSVQKPVVHKCGSILVNRTYEITENGTTRVQSIPESEYMELYRYFNSEKQIELSDEAKKYLDKVQCNKAKTDIVKDYRYTMDKFFIHLPITINFKVDKGNNVNAIAQQYIAEQEDLHVIGIDRGERNLIYVSVIDMYGNIVEQKSFNLVEQISSQGVKRYYDYKEKLQNREEERDKARKSWKTIGKIKELKEGYLSSVIHEIAQMVVKYNAIIAMEDLNYGFKRGRFKVERQVYQKFETMLISKLNYLADKSQAVDEPGGILRGYQMTYVPDNIKNVGRQCGIIFYVPAAYTSKIDPTTGFINAFKRDVVSTNDAKENFLMKFDSIQYDIEKGLFKFSFDYKIFATHKLTLTKTKWDVYTNGTRIQKVKVEGHWLSREVELTTKMKELLDDSHIPYEEGQNILDDLREMKDITTVVNGILEIFWLTVQLRNSRTDNPDYDRIISPVLNHKGEFFDSDQYKAYADAQKAPLPIDADANGAYCIALKGMYTANQIKENWVEGEKLPADCLKIEHASWLAFMQGERG

SEQ ID NO: 935 - protein, 1275 aa, unidentified
  REGION 1..1275: note = Cas Enzyme sequence
MNIFEKFTNQYSLSKTLRFELKPIGKTQSLLEKNHIFEIDELIQKKYEATKPYFDRLHREFINEALQNAVLTNLEGYFEIFTNWKKDKKEFQKKELQKKEAELRKEIVALFNEQAKKWNQQYIGLKNDTIEVLSEEGVFEYLLEKRYGGEDGTLLIDESTKKEISIFESWKGFIGYFRKYFETRKNFYKDDGTSTAIATRIIDQNLKRFCDNILIFESVKGKVDFAEVEKNFQKALSDIFSLEFYNSCLLQDGIDFYNKILGGETKENGEKIKGLNECINLYRQNTGEGLPFFKMLDKQILSEKDKQTFGIESEEEFLKTLSDFYQNSKTKIEIFKNLFVDFTENFSNYDLDRIYLSKEAFNTISRKWTNETTAWQEALFEVLKEQKLVNSKKKNEEEFSFPDFISLGNLKKSLESEKITEALFWKDRYYKNEEIKNGLFESEEKLNFSQFMLIFKNEFEALFEREIEKENGKKVKIGFNVSRQEIEKLLAQEKIEIGKEEKVNIKEFADDVLKIYQMAKYFALEKKRTWNEDYQTGDFYDKIDVGYLVFYKDAYEQIVGGYNDLRNYLTKKSYSEEKWKLNFENSTLADGWDKNKESDNFAVILRKDGKYFLGIMAKGHNKIFDDRNKERFLQNIEYGKYEKVVYKFFPDQAKMFPKVCFSKKGLKFFKPSDEILNIYKNAEFKKGDNFLVQSMHKLIDFYKDCLTKYEGWKGYNFTHLKPTKDYQENIEEFFRDVVKDGYKITFQDISEYYINEKNQNGELYLFQIKNKDWNEGSGGVKNLHTLYFESLFSAESIAQNFPIKLNGQAEIFYRPKTEVEKLGTKKDKNEKAVVNHKRYSEDKIFFHVPITLNRTKSDPSQFNAKINNFLANNSGVNIIGVDRGEKHLAYFSVITQKGEILDSGSLNFVKGGNNQEINYAEKLEEKAKNREQARKGWQEVEGIKNLKKGYISQVVRKLADLAIRYNAIIVFEDLNMRFKQIRGGIEKSVYQQLEKALIEKLSFLVQKGETDSQKAGHLLRAYQLTAPFTTFKNMGKQTGIIFYTQASYTSKIDPVTGWRPHLYLKYSNAEQAKKEIEKFSKIEFVNDRFEFTYDVRKFQLNKKEYPKNTIWTVCSNVERFRWNKKLNQNKGDYDHYKNLTENFKKLFEDAGVNISGNIFDQIKGLAIKGNEKFFRDFIFFFNLVCQIRNTNKDRKGNENDFILSPVAPFFDSRKDNGKDLPKNGDDNGAYNIARKGIMILKKISDFAKQNGNCEKMKWGDLYISDTEWDNFSQNL

SEQ ID NO: 936 - protein, 1275 aa, unidentified
  REGION 1..1275: note = Cas Enzyme sequence
MRKFNEFVGLYPISKTLRFELKPIGKTLEHIQRNKLLEYDAVRADDYVKVKKIIDTYHKYLIDEALSGFTFETEADGRRNNSLSEYYWYYNLRKRNEQEQKTFKTIQNNLRKQIVDKLTQSEKYKRIDKKELITTDLPDFLTNESEKELVEKFKNFTTYFTEFHKNRKNMYSKEEKSTAIAFRLINENLPKFVDNIAAFEKVASSPLAEKINALYEDFKEYLNVEKISSVFRLEYYNELLTQKQIDLYNAIVGGRTEEDNRTQIKGLNQYINEYNQQQTDRSNRLPKLKPLYKQILSDRESVSWLPPKFDSDKELLTKIKECYDALSEKEKVFDKLESILKSLSTYDLSKIYISNDSQLSYISQKMFGRWDIIGKAIREDCAKRNPQKNRESLEKFAERIDKKLKAIDSISIGDVDECLAQLGEPYVKRVEDYFAAMGASEIGEEQIGQEFFKKNIEEAYESVKELLNNADNITDNNLMQDKGNVEKIKNLLDAIKDLQRFIKPLLGKGDEADKDGVFYGEFTSLWTKLDTVTPLYNMVRNYLTSKPYSTKKIKLNFENSHFLRGWAKDYNKKAGLIYEKAGLYYLAIVDKKISNDDKKLLHKNVDEDVASRIIFDFQKPDEKNTPRLFIYSKKNPITIAPAVDIYNLPIDSILDVWNKEKYKVEYRQQDQLGYEQALYSLIDYFKEGFSKHESYKHYDFKWKETNKYKDISEFYHDVEISCYEVKYDKVNWKTLLKFVDEGKLYLFQIYNKDFSDHSKGTPNMHTLYWKMLFDEENLKDVVYKLNGEAEVFFRKSSITVQSPTHPANSPIKNKNKDNKKKESKFEYDLIKDRRYTVDKFLLHVPITMNFKSVGGSNINQLVKRYIRSATDLHIIGIDRGERHLLYLTVIDSRGNIKEQFSLNEIVNEYNGNTYRTDYHELLDTREGELTEARRNWQTIQNIRELKEGYLSQVIHKISELAIKYNAVIVLEDLNFGFMRSRQKVEKQVYQKFEKMLIYKLNYLVDKKKPVTETGGLLKAYQLTGEFESFKTLGKQSGILFYVPAWNTSKIDPVTGFVNLFDTHYENIEKAKGFFDKFKSIRYNSDKDWSEFVVDDYTRFSPKAEGTRRDWTICTQGKRIQIYRNPQRNNEWEGREIDLTKAFEEHFEAYGIDISKDLREQINIQNKKEFFEELLRLLRLTLQMRNSMPSSDIDYLISPIADDTGRFFDSRKQAELKGNAVLPMNADANGAYNIARKGLLAIRKMKQEENDSAKISLAISNKEWLKFAQTKPYLED

SEQ ID NO: 937 - protein, 1275 aa, unidentified
  REGION 1..1275: note = Cas Enzyme sequence
MNDLKQFTNLYPVSKTLRFELQPIGKTRENIEKNGILQRDEKRAEDYKIVKGFIDEYHKQFIKDRLWSFKLPLHSEGHLDSLEEYQALYEMSKRNDVQEAEFTEIKDNLRSIIAKRLTESGSAYERIFKKELIREDLIDFLESNEDKDIVRQFADFTTYFSGFHENRRNMYVAEEKSTAIVYRLIHQNLPKFMDNMKAFAKIAETSVAEHFTDIYEGWKEYLNVGSIEEIFRLDYFSETLTQTHIEVYNYIIGKKILEDGTEIKGINEYVNLYNQQQKDKSKRLPFLVPLYKQILSDRDKLSWLAEEFDSDEKMLAAINESYNHLHDLLMGNENESLRSLLLHIKDFNLSQINITNDFSLTDISQHLFGRYDVFINGVKDELRIITPRKKKESDEDFEDRISKIFKTQKSFSIDFLDKLPQPVMEDGKPRCIEDYFMTLGAVNTETTQKENLFAQIENAYEDARTILQLKDTGDSLSQNKSAVAKIKALLDALKDLQHFIKPLLGSGEEHEKDELFYGSFQMMWDELDTVTPLYNKVRNWLTRKPFSTVKIKLNFESPTLLKNMAVPQTSSAAIFRDRQGYYYLGILDSNSRNCLNELLSVSADPSGFDFMQYHQGGDMGKNVQNLMVINGEVCKKNGRKERTGQFVGQNLLLEKLKNEYLPKDVNEIRLKQSYLTSSSTFSKKDLIRFVEYYIPLVKAYYSEYSFVFKTPSEYKSFADFTDHINQQAYQLSFTPISKDSIDNLVEEGRLYLFRIWNKDFSKFSKGTPNLHTLYWQMLFDERNLQNVVYMLNGQGAEVFYRKASIKPENRIIHKANHPIANKNELNTKRTSTFKYDIIKDKRYTVDKFQFHVPITINFKAAGQTNINPIIQEAIKQGEFSHIIGIDRGERHLLYLSLIDLKGNIVKQMTLNEIINEYKGQTYRTNYHSLLAKREGDRTDARRSWEAIETIKELKEGYLSQVVHIISKMMVEYNAIIVLEDLNTGFMRGRQKIERQVYEKFEKMLIDKLNCYIDKQVSPTDEGGLLHPLQLTCDAQKWKRSHQCGCLFYIPAWNTSKIDPVTGFVNLLDTHYDTREKARVFFSKFQRISFNAQKGWFEFAFNYNDFTTKAEGTRTQWTLCTQRERIRTFRNPQKNNQWDDERIVLTDAFKQLFDKYDIDINGNIKEAISEQTDAQFFKDLLGLMKLLLQMRNSITNSEEDYLLSPVADDAGHFFDSREGISSLPIDADANGAYNIARKGLWVIRKIQETPSGEKTSLSITNKEWLQFAQTKPYLND

SEQ ID NO: 938 - protein, 1275 aa, unidentified
  REGION 1..1275: note = Cas Enzyme sequence
NWTNYFSGFNDNRKNIYSEKRIGTSIGYRLVHDNLPKFLENIKRYNKAKTAGVNFSNVEKTYGVKLDEVFSLEHFNKCLTQKGIDEYNLIRGGQSKKGNNKEQGINETINLHVQQLHRRLERATDDDKKELADKIKYIKSCLLEELYKQILSDRSQLSFRLDSIKNDGDLCRQIEHIFHMDNAGNLWGKKENVDRDTGEKTESDFNISEAIKKVLQAFKEADPERLYIRNKSSNAITEISQYLFGNWSLITRSLDYYVKKIIFPNPEKKKETAKQKVDREKKCEGWLKDTTYFSFAEIHTALELFFQQYSDEELLDEKKENNDEEQGITKAMKEIALSKPLFSYFKELKISKKNEETNKFEKKELLKQIKESYPATQKVFEQYRDVEAELLKNKKDGEVQVVKNYLNALMDLHHYLKPLYVMLSPKDEKNQEEIFEKDNGFYDDFDPLFNVLKLIVPLYNQARNYLTKKPFSVEKYKLNFGHHNLLGGFVDSYTNSDNATQYGAYLFRKKHQRYDAYEYFLGISTDAKLFRCHLQNDISENDKSKYERLEYYQPKSTTFFSDEYSSKNKKKIMDCLLKKVEAKIEKTLKGNSDFDEFLEKLREADTPGKQIEIIKKQKEFINILDEKEVEEIFNEAIAEMKNFIIKYVERNPQLIKLQETRYSGHEGFTAIIKDLQKIAKENKVFNYFHVSENEFNEACNRETKPLLFFKITNKDLNYYEKAAQGLRKQEIGTKNLHTLYFEQLLSGKQQVIDIGKGEVFYRRKTPFYKPIIHEENKSILCRTYKEDGKLKTLTDDIYKELSLFYKGNIPEEKLSEASRKLKDLVKVNKFKYKIMKDKRYTEDKYLFHLSINLNFDQPPKLEKFNDSVNDSLKRNDNVKILGIDRGERHLVYYTLIDDKGNIVKDDNGNYLQGSLNNPTGKKDYHDLLDKREDERDKARKAWNTIDRIKDIKEGYLSQIVHNIASLMIKYNAIIALEDLNFGFKKGRMKVEKQVYQKLEEKLIDKLNYLVFKNECPEKPGGLLNAFQLTAPFKSFKAMGKQTGFIFYVPAYHTSKICPATGFADLLYPRYKTVDKSKKYFAKFEAIRFNRQENYFEFEIKNYNAFNPKAEDTKQDWTICTYGLRLDTYRNPKKNNNWDTQEVDLTKELQNLMQSQGIQFIDGKCIKEEICRQNDSQFFKRLMKLLRLTLQIRNSRVNSDEDWIISPVRVQGEIFDSREADESMSQNADANGAYHIALKGLWCLRQIREAKDLKKVNLAISNKEWLQFVQDRPFAK

SEQ ID NO: 939 - protein, 1275 aa, unidentified
  REGION 1..1275: note = Cas Enzyme sequence
MNDLKQFTNLYPVSKTLRFELQPIGKTRENIEKNGILQRDEKRAEDYKIVKGFIDEYHKQFIKDRLWSFKLPLHSEGHLDSLEEYQALYEMSKRNDVQEAEFTEIKDNLRSIIAKRLTESGSAYERIFKKELIREDLIDFLESNEDKDIVRQFADFTTYFSGFHENRRNMYVAEEKSTAIAYRLIHQNLPKFMDNMKAFAKIAETSVAEHFTDIYEGWKEYLNVGSIEEIFRLDYFSETLTQTHIEVYNYIIGKKILEDGTEIKGINEYVNLYNQQQKDKSKRLPFLVPLYKQILSDRDKLSWLAEEFDSDEKMLAAINESYNHLHDLLMGNENESLRSLLLHIKDFNLSQINITNDFSLTDISQHLFGRYDVFTSGIKDELRIITPRKKKESDEDFEDRISKIFKTHKSFSIDFLDKLPQPVMEDGKPRCIEDCFMTLGAVNTETTQKENLFAQIENAYEDARAILQLKDTGDTLSQNKSAVAKIKALLDALKDLQHFIKPLLGSGEENEKDELFYGSFQMMWDELDTVTPLYNKVRNWLTRKPFSTVKIKLNFESPTLLKNMAVPQTSSAAIFRDRQGYYYLGILDSNSRNCLNELLSVSADPSGFDFMQYHQGGDMGKNVQNLMVINGEVCKKNGRKERTGQFVGQNLLLEKLKNEYLPKDVNEIRLKQSYLTSSSTFSKKDLIRFVEYYIPLVKAYYSEYSFVFKTPSEYKSFADFTDHINQQAYQLSFTPISKDSIDNLVEEGRLYLFRIWNKDFSKFSKGTPNLHTLYWQMLFDERNLQDVVFMLNGQGAEVFYRKASIKPENRIIHKANHPIANKNELNTKCTSTFEYDIIKDKRYTVDKFQFHVPITINFKAVGQTNINPIVQEAIKQGKFSHIIGIDRGERHLLYLSLIDLKGNIVKQMTLNEIINEYKGQTYKTNYHSLLAKREGDRTDARRSWETIETIKELKEGYLSQVVHIISKMMVEYNAIIVLEDLNTGFMRGRQKIERQVYEKFEKMLIDKLNCYIDKQLSPTDEGGLLHPLQLTCDAQKWKRSHQCGCLFYIPAWNTSKIDPVTGFVNLLDTHYDTREKARVFFSKFQRISFNVPKGWFEFVFDYNDFTTKAEGTRTQWTLCTQGERIRTFRNPQKNNQWDDERIVLTDAFKQLFDKYDIDINGNIKEAISEQTDAQFFKDLLGLMKLLLQMRNSITNSEEDYLLSPVADDAGHFFDSREGISSLPIDADANGAYNIARKGLWVIRKIQETPSGEKTSLSITNKEWLQFAQTKPYLND

SEQ ID NO: 940 - protein, 1276 aa, unidentified
  REGION 1..1276: note = Cas Enzyme sequence
MNNIYENFTKKYQVNKTLRHALIPEENTEKYIKERELLKNDFERADAYIVVKELLDNYYRCYIEKQLSDVSIEWDKLAEAIMMYRKKACEQADVKKVQSNYRDVLSKQLKSSPEFDRMFNKPMITKLLPEFYQDKNIETNKLEQINLFKKFVGYFDDYFKHRKDIFGADDKSHTIAYRVINDNFPMYVNNMSMFETMKNNYRDIYDAVLANVVENGQYDLNDKSELEVFFSSKGYNRVLTQTGIDTYNNIIGVINKEKNLYQQKNKEKIKLTFFKLYKQILSENENIAFIPEQFISDDEVFAAINSFKTYIQGNRVLERTTKLFKENKSTYEGIFITPEALSAVSNKLYGEWDYLKNIIIEGMLAGINNPTSKKTEEIENKVKKDTFSLEEIQKYIDLSESNNEEVEHIDVHIFFDNIEDIVEKIYEYDKEYEECIKIRKASLLEDKQTTSKIKQYLDSYQRLLHFYKMFNVDNILDKDFSFYEEADNIYNMLLEENVLYNKVRNYVTKKPYKTEKIKLNFETSSFLNGWGTTYDTKAAIILKKDEMYYLGVVNKKLSQEDMKALRMGVTSSNQGIRYVYEFQNVDNKNIPRLFIRSKGTRYAPSVEKYNLPIEEIIDIYDSEKFKTEYRKINETEYKQSLIKIIDYFKLGFARHESFKNYDIQWKASDEYDNINEFYKDVSNCCYRLGEETINFDVLRECEKSGKIYLFKIYNKDFSPDSTGRPNLHTLYWKSIFSRENLEDTVIRLDGNAEIFYRKASISEPVKHRKGEKVVNKWDVDNKPIPDTIYREIYDYSNNRISEISETAKAYIENNKVIIKDVKHDIVKDKRYTKNQYLLHTTISINFKQQEKIYRFNSAVCEVLKNNADVNIIGIDRGERNLIYITVINQKGEILEQKSFNNIQSAKGKVNYHAKLTQKENQRANARKNWETIENIKELKEGYLSLVIHEIAQMMISYNAIVVMEDLNKGFKGERSKVEKQVYQKFEKMLIDKLNYLTFKADKSGELKKYTDIGGVLNGYQLTDKVQSFKSIRRQCGFLFYVPANYTSKIDPMSGFVDVFRKNKKPTLDYIRKFLKLFDFIHWDSSHGFFVFEFDYDNFETVQTSYVKKWKLTSAGTRYVWNRTNGNCTYNPTEEIIRVLEENNIIYKDERNLVTDIDKMGNDIIKGIYYSFRYILQLRNERKLESYDEEELRNSDYIFSPAIVDGIQFDSRKDYGSTKYPVDSDANGAYHIALKGLICLKKISEKASADGYIVEKNFDITVAEWLKFIQNKEYIDK

SEQ ID NO: 941 - protein, 1276 aa, unidentified
  REGION 1..1276: note = Cas Enzyme sequence
MKTALFRVLFIINLNRRKMNQFSQFTNMFSLSKTLRFELKPVFDANQDAFMSLIEKDKEIDRLYREEMKSMMDDMHEVFINEALGGAELSVKLIDELELLLSERRKIKVAKKENKGVSYSKEEVDNNKKVDKVKGRLREEIVKAFNQRAKYWREEKYPHHKLKKDDVGILFEKEILKVLKDMNPSKVGIISNFDNFFTYFTGFNQSKENYYVVEDKDTAIGNRSIDENLMRFLENRSKFYEALKKINSLSKYEAYFQNKEYCKYLNEEGINAFNLIVGEINKEINLTTQQDKNLFVRVPKLKFLFKQIGCRDKECFILEIGEGEEWVYLNRLKDLQFGIVDKIKKGYEDFFRNIEAFDLESIYLNKASINTISSRWFLNWHRLAELLQAKKLIKAGELEKIPEKICLLDIKECLVGETNYEDIFRAGKITEQFSNGEYSQFFNEENAWEVFLRIWEMEITRNILAIEEKSKSLEVMSQESINCITKEERISFIKDFCDAFLSIERMIKYHKVKESEEKDGDFYEWVDYYLVNTGLNSYYNAFRNYLTKKPFKQDKIRLNLNSGNLADGFDLNKESDNLCVILRRSGVYYLAVISKNSNKVFDKVKNVELYEKDDQGWEKLEYKLLPGASKSIPKQSTQLNEVVKHFSSSNDDYVLEGGRYINPLRISREVFDLNNVAYDKEDIKKISLKKEDGVKKFQKSYLTLSNDLGAYRGALEKWIDFCKEYLKCYDSCAYFDYSHLKESSDYESIDMFYRDIDRASYSTKFVDINKDVLYEMCEKGQIYLFQIYNKDFAEKKKGKDNLETMILKNLFSSTLIKLNGGAGLFYREKSIDVEYDKERNKDKGFGIIKNKRYSEDKFFFHFSVTINFGTSSAKIEDFNKAINESLCQGDYHILGIDRGEKHLIYYSLIDSNGMIKKQGSFNIVGGKDYNQLLAERAEEMRQKRESWEEIGKIKDLKEGYLSQVIHEIYQLVVDNDAIIVLEDLNTQFKAKRTAKVEKSVYKKFELALAKKLSHLILKDKEPEEVGGVLHPYQLTPPVDAGMVDRFEKKKQWGVMFYVRPDYTSTTDPLTGWRKTRYISNSANHEEIVRNFDYRNKDYIKIFFDKDKDCFRFDCDGWSLFSFKEIERYYWSNKEKNASGNYGVSKKYLLDECFSDLFSDIDKTLDINGQILSAWEKKDQRWKTLVFYWNLLNQIRNTDRAKEGDENDFIQSPVWSEEIKGFFDSRCCYNKLLPNNGDANGAYNIARKGLLVLERVKENPVKPDLFIRNEDWDDFIR

SEQ ID NO: 942 - protein, 1276 aa, unidentified
  REGION 1..1276: note = Cas Enzyme sequence
MNQNTCFSQFTGLYPVSKTLRFELKPIGKTLEKIKENGIIDHDKNKADNYIEAKKKIDEYHKHFINEALKELKLDWSPLRDAFLDSLTNRSQDSKKKLEKQQEYFRKEIAKKFAEHPHFKDLTASTPNNLFKKILPDYFGMVESIESFKGFSTYFKGFQENRQNIYSAEPISTGVPYRIVHDNFPKFLSNIETYHNIQKFCPSVLADAEVELKKLLKGRKLDEIFDIDFFNSVIVQDGIDFFNQVIGGYTVENNVKIRGVNEFANLYRQQNPEFAKQRIATRMIPLYKQILSDRVTLSFILEPFNDSAQVQSAVKDFFENHILHYDAEGSQINVLDEISDLIIRLNNFDLDKIFIARESLTKISQKLFGSWNSINDAFFEYYEKQFGSAQKAANKKKIEAKLKEDYYSIQEINGIVAQLDSSKCVFDYWKELENLKTSIESGVIYKKYEDFISQKFEPEAKLDKDENIQGLKDFLDSINEFLRYVKPLIINHENGDAAFYNELIPLYDQLSNIIPLYNKTRDFATQKPSDSSKFKLNFENPTLADGWDQNNETANASIILRKDGNYYLGIMNAKTRLKIGKYKLKEGEAHYDKMIYKQIADPTKDIPNLMVVDGKTVSKKGRKSADGVNHQLEEYKNTYLPKEINDIRKKGSYLKTSPNFDIKDSQTYTEYYIQRLIEYKKEEFSFNLRDASEYSSYSEFLDDVAKQKYKISFTPIPDSQINAWIDEGKLFLFQIYNKDFAPGAKGNPNLHTLYWKATFSPENLKDIVFKLNGEAELFYRPSSIRKPYTHRVGEKLVNRMTRDGRPIPDAIFEELFGYFNKLSKTALSEKAKEYLDFVVVKDVKHEITKDKRYTEDKFEFHVPLTINFKADDGSKRLNDQVKDFLKNNSDVNIIGIDRGERNLIYMTLINQKGEILIQKSFNLVDNIDYHEKLSIREQERKVARESWRSIGKIKDLKEGYLSLVIHEIAKTMVENNAIIVLEDLNLGFKRGRFCVEKQVYQKFEKMLIDKLNYLVFKDCMDSECGGVLKGFQLTRKFDSFQELSKLKQSGFLFYVPAAYTSKIDPTTGFANLFNMKNLTSAEKMKSFLLAFDDISYDLKNDAFVFSFDYENKEYKLSQTSFQKKWSAFTVGKRIVYNRGEDKCDVIEPTLIIKEALESKGVKCSDQLDVKSALENIEPSRENAAFFKSICYAFEKTLQMRNSNSNIDYILSPIMNKTGGFFDSRKRDKTLPIDADANGSYHIALKGLYLIENLSKGEKDLKISNEKWFEFVQSRNK

SEQ ID NO: 943 - protein, 1276 aa, unidentified
  REGION 1..1276: note = Cas Enzyme sequence
MSLAAFTNQYQLSKTLRFELIPQGRTLQHIQQKGLLSRDQQRADSYQQMKKTIDAFHKHFIDLAMQQVHLSKLAEYQDLYEASGERKKTDEYKKELEKIQAELRKEIVAGFKAEGVSEIFGKLDKKELITDLLEKWIREQNDKDIYFDAGFKNFTTYFGGFHENRKNMYTDKAQSTAIAYRLIHENLPKFLDNCRIFDSLKARPELAEKLPLLYTEIAEYLNVASIDEAFALDYFNEVLTQKQIDVYNLIIGGRTPEEGKKKVQGLNEYINLYNQQQKDKNNRIPKLKILYKQILSDRESTSFMADAFESDADVLDAINAYYHNELISFFSADSEEAIHVLHEIRSLLKHIASYDTERIHVRNDTQLTHISQKLFGSYAVLGDALSYYHDVVLAPSHQEDYQKAKTESKRGKLEKEKEKFTKQPYISLALLQKALDYYVLSLDDTHEVRKRYSTNCISDYFHIHFTAQKRADSDKEFDLIANIEAKYSCVKGVLEHYPSDRKLHQDKKTIDDIKLFLDSLMELLHFVKPLVLPPDSTLEKDNVFYGQLEPLYTQLELIIPLYNKVRNYATQKPYSTAKFKLNFENAQLLNGWDENKESDYLTSIMRKDGNYYLAIMDKQHNKVLKKAPKAEYGRGAYEKMVYKLLPGVNKMLPKVFFSKKNIDYFAPSTQLLENYKKETHKKGENFSLHDCHTLIDFFKASIEKHEDWRNFGFQFSETATYDDLSDFYREVSHQGYKVTFQPIAENYIHELVDEGKLYLFQIYNKDFSTYSKGRPNLHTLYWKALFDPDNLQDVVYKLNGQAELFYRTASIRAEDRVIHTRGQAIDNKNPLTIKQQSTFEYDLIKDKRYTVDKFQFHVPITMNFKAGGRDNINQEVLAFLKNNPHVNIIGIDRGERHLIYLTLIDQQGNILKQETLNTIVSERYPNETPYHTLLATKEKERDAARKNWGTIENIKELKEGYLSQVVHKIAKMMVEHNAIVVMEDLNFGFKRGRFKVEKQVYQKLEKMLIDKLNYLVFKDKDAHEPGGLYKALQLTSKFISFKDLGKQSGFLFYVPAWNTSKIDPTTGFVNLFDTRYESIGKAQDFFGKFDTIHFNGAKGYFEFVFDYDAFTTRAEGTRTKWTVCTYGSRIMTFRNPDANNQWDNKEIDVTQEMEDLFGTYGITYGDGSDIRGELLRQTDKGFYERLLHLFKLTLQMRNSKTGTDIDYLISPVMNARGEFYDSRRADSTQPKDADANGAYHIAKKGLWLLEQINQADDLKKVKLAVSNKEWLRFVQK

SEQ ID NO: 944 - protein, 1276 aa, unidentified
  REGION 1..1276: note = Cas Enzyme sequence
  VARIANT 169..173: note = X can be any amino acid
MPININKFSDECRKIDFFTDLYNIQKTLRFSLIPIGATADNFDFKDRLSKEKDLLDSAKRIKEYISKYLADESDKCLSQPIKLKHLDEYYELYITKDRDEQKFKSAEEKLRKELADFLKEILKRLNKKILNDYLPEYLEDDEKALEDIANLSSFSTYFNSYYDNCKNMXXXXXTAIPYRCINDNLPKFIDNIKAYEKVLEELKPSDLEELRNNFKGVYDTTVDDMFTLDYFNCVLSQSGIDTYNAIIGNDKVKGINEYINLHNQTAQQGHKVPNLKRLYKQIGSQKKTISFLPGKFESDNELLKAVYDFYNTGNAEKNFTALKDTITELEKIFDNLAEYNLDGVFVRNDISLTNLSQNMFNDWSVFRNLWNDRYDKVNNPEKAKDIDKYNDKRRNVYKKSESFSINQLQDLIATSLEENINSKKITDYFSCDFHRCTAEVENKYQLVKELLSTDYPENKSLKTSEKDVALIKDFLDSVKSLESFVKILTGTGKESGKDELFYGNFTKWFDQLRYIDKLYDKVRNYITEKPYSLDKIKLSFDNPQFLGGWQHSKETDYSAQLFMKDGLYYLGVMDKETKREFKTQYNAPENDSDTMVKIEYNQIPNPGRVIQNLMLVDGKIVKKNGRKNADGVNVVLEELKNQYLPENINRIRKTESYKTTSDNFNKDNLKEYLEYYIARTKEYYCKYNFVFKSADEYGSFNEFVDDVNNQAYQITKVKVSEKQLLSLVEQGKLYLFQIYNKDFSEYSKGKKNLHTMYFQMLFDDRNLENLVYKLQGGAEMFYRPASIKTDSEFQHDANVEIIKRTCEDKVKDKDNPTDDEKAKYYSKFNYEIVKNKRFTKPQFSLHLTLAMNCNQPDHYWLNNSVRELLKKSNKNNIIGIDRGERNLIYVTIINSDGVIVDQINFNIIENSYNGKKYKTDYQKKLNIREKERQEARKTWKTIETIKELKDGYISQVVHQICKLIVQYDAIVVMENLNGGFKRGRTKVEKQVYQKFETMLINKLNYYVDKGTDYKECGGLLKAYQLTNKFETFERIGKQSGIIFYVDPYLTSKIDPVTGFANLLYPKYETIPKTHNFISNIDDIRYNRSEDYFEFDVDYDKFPQGSYNYRKKWTICSYGNRIQYCKDSRNKPASRVVNITEKFKETFNNAGIDFVNDNIKEKLLLVNSKELLKSFMDTLKLTVQLRNSEINSDVDYIISPVKDRNGNFYYSENYKKSNEEVPTQPQDGDANGAYNIARKGLMIINKLKNTDDVTNNELLKISKKEWLEFAQKGDLGE

SEQ ID NO: 945 - protein, 1276 aa, unidentified
  REGION 1..1276: note = Cas Enzyme sequence
MDRFTNLYPVSKTLRFELIPDKRTKAILEKTDLISQDEHRAESYKLVKKIIDRYHKAFIESVLGSFKLPNDDVNLLHELYSKSQKSDADKKAMEKVQDKLRKVIADALTKDDRFKRIDKKELIREDILRVITPDERALIDEFRDFTTYFTGFHENRRNMYSAEAQSTAIAYRLIHENLPKFIDNMATFEKIAASPVADHFPQLYQEMSECLNVRDIQEMFSLDYYTELLTQSQIEVYNAVIGGRTVENGGKKIQGINEYVNLYNQQQPSRDTRLPKLKPLFKQILSDREAVSWLDEEFDSDKSMLEAVRDIYHALDDHVFDPLRELLTNLPSYNLDGIFIPNDLAITDISQAMFKDWSVIKRAIADDVKAHCPLKRKETAENYEERISKLIKREGSFSIGYLNACMPGRDICEHFAGLGAVDDDEEQTENIFLQIRNAYADAQSLIENAYPEGRNLAQDKENVAKLKALLDAVKALQRFVKPLLGNGDEPDKDERFYGELAVMWEELDRVTPLYNKVRNRMTRKPYSIEKFKLNFNIKGNFLGGWVDSKTEKSDNGTQYGGYLFRKKNEIGEYDYYLGVSAKTKLFRRKEGAKGQYERLDYYQPKSQTVYGNSYVGPDGYDHDKRELMDAIVSFVGALGESELYQSLVSMGTPSAMLKALREQPLIYQQLLADRRFASINSKVTKYLHETILSLVRIPRSQDYVNAEFSLFTEPQEVIDNLCKEKVFTYFVVDDAEIEQAMNDENKPFLLFKISNKDLSYADTYSKGLRKSRGTDNLHTMYFKALMSGNQSVIDIGTGEMFYRKSSISVDKPTHKANVPIKKKNPNNQGTLSSFCYDLYKDRRFTVDKFGFHLSFIYNYLAKEQDMNKMAREYIHDHDDLHFIGIDRGERHLLYVTVIDSRGRIKEQFSLNEIVNEYQGNKYKTNYRGLLDKREEERQRERQSWNTIEGIKELKQGYLSQVIHKIVTLMVKYHAVVVLEDLNMGFKRGRQKVESSVYQQFEKALIDKLNLLIDKKADADQPGGLLHAYQLTNKFTSFREIGRQNGFLFYIPAWNTSKIDPVTGFVDLLHPRYESVEKSRSFFCKFKSIRYNQEKGWYEFSLDYNAFTTKAEGTRTCWTLCSHGTRVETYRNPEKNSSWDSREIDLTAELNALFEAYGINRQGNLKEAIAERDEKDFFERLMRLMALTLQMRNSITGTEVDYMISPVADENGNFYDSRSCGRELPENADANGAYNIARKGLWVARQIQASPVDERINMAVSNKEWLNFAQSKPYLDD

SEQ ID NO: 946 - protein, 1277 aa, unidentified
  REGION 1..1277: note = Cas Enzyme sequence
MERFTNLYQVSKTLRFELIPDKRTKEILEHTDLIAQDEHRAESYKTVKKIIDRYHKNYIDSVLGTLKLPESDIDELYELYNKQQKTDAEKNALEKVQGKLRKLIADALSKDSRFKRIDKKELIREDILDIIIPEERSLIDEFRDFTTYFTGFHENRRNMYSAKAQSTAIAYRLIHENLPKFIDNMATFCKIAASPVAERFNDLYQEMAEYLNVREIGEMFKLDYFTEILTQKQIEIYNAVIGGRTLDDGTKIQGLNEYVNLYNQQQTTRETRLPKLKPLFKQILSDREGVSRLPEEFATDQEMLNAVKEYYKVLNDHVLSPLKELLVNLSSYNPNGVYITNDLSLSNISQSLYGDWSLIKKSMTEDIKRQCPRKKKETAENYDERIHQLIKREKSFSIDYLNDCIKSLGKDICTHFAALGATDDGDTQTVNLISQIRNAYTDAQSLLESNYPANRNLAQEKDNVDKLKGLLDAIKALQHFVKPLLGNGDEPKKDERFYGELAVLWEELDRITPLYNKVRNRMTRKPYSTEKFKLNFNIKGNFLGGWVDSKTEKSDNGTQYGGYLFRKKNSLNEYDYYLGVSANKKLFRRKNGAVGQYERLEYYQPKSQTVYGNSYVGPDGYDHDKKELMEAIVSFVGSLGDRELYEELTSKDTPSAMLMILKETPSFYQQLLVDQKFASINSKVTKYLHDTILSLYRIPRSQDYVNAVFTLFTEPQKVIDDLCQEKVFTYFVVDDAEIEQAMKDEVKPFLLFKISNKDLSFADTYCKGLRKSRGTENLHTMYFKALMSGNQATIDIGTGEMFYRKSSISYDKPTHTANVPIKKKNPTNQAAESIFCYDLFKNRRFSVDKFGFHLSIIYNYLCQDKDVNKMMREYIHDHNDLHFIGIDRGERHLLYVTVIDSHGRIKEQFSLNEIKNEYKGNTYSTDYRGLLSKREADRQHERQSWNTIESIKELKQGYLSQVIHKIVTLMVKYNAVVVLEDLNMGFKRGRQKVESSVYQQFEKALIDKLNLLVDKKTDPEQLGGLLHAYQLTNKFTSFRDMRLQNGFLFYIPAWNTSKIDPVTGFVDLLHPRYESVEKAQAFLCKFKSIRYNQDKGWYEFTLNYNDFTTKAEGTRTEWTLCTHGTRVETFRNADKNSSWDSREVDLTKAYHELFEEFAISSNGNLKEAITQQDSKAFFERLMYLLNLTLQMRNSIIGTEVDYMISPVADENGNFYDSRTCGDELPQNADANGAYNIARKGLWVARQIQAAPVDAKVDLAITNKEWLNFAQSKPYLDD

SEQ ID NO: 947 - protein, 1278 aa, unidentified
  REGION 1..1278: note = Cas Enzyme sequence
MPININKFSDECRKIDFFTDLYNIQKTLRFSLIPIGATADNFDFKDRLSKEKDLLDSAKRIKEYISKYLADESDKCLSQPIKLKHLDEYYELYITKDRDEQKFKSAEEKLRKELADFLKEILKRLNKKILNDYLPEYLEDDEKALEDIANLSSFSTYFNSYYDNCKNMYTDKEQSTAIPYRCINDNLPKFIDNIKAYEKVLEELKPSDLEELRNNFKGVYDTTVDDMFTLDYFNCVLSQSGIDTYNAIIGNDKVKGINEYINLHNQTAQQGHKVPNLKRLYKQIGSQKKTISFLPGKFESDNELLKAVYDFYNTGNAEKNFTALKDTITELEKIFDNLAEYNLDGVFVRNDISLTNLSQNMFNDWSVFRNLWNDRYDKVNNPEKAKDIDKYNDKRRNVYKKSESFSINQLQELIATSLEENINSKKITDYFSCDFHRCTAEVENKYQLVKELLSTDYPENKSLKTSEKDVALIKDFLDSVKSLESFVKILTGTGKESGKDELFYGNFTKWFDQLRYIDKLYDKVRNYITEKPYSLDKIKLSFDNPQFLGGWQHSKETDYSAQLFMKDGLYYLVVMDKETKREFKTQYNAPENDSDTMVKIEYNQIPNPGRVIQNLMLVDGKIVKKNGRKNADGVNVVLEELKNQYLPENINRIRKTESYKTTSDNFNKDNLKEYLEYYIARTKEYYCKYNFVFKSADEYGSFNEFVDDVNNQAYQITKVKVSEKQLLSLVEQGKLYLFQIYNKDFSEYSKGKKNLHTMYFQMLFDDRNLENLVYKLQGGAEMFYRPASIKTDSEFQHDANVEIIKRTCEDKVKDKDNPTDDEKAKYYSKFNYEIVKNKRFTKPQFSLHLTLAMNCNQPDHYWLNNSVRELLKKSNKNNIIGIDRGERNLIYVTIINSDGVIVDQINFNIIENSYNGKKYKTDYQKKLNIREKERQEARKTWKTIETIKELKDGYISQVVHQICKLIVQYDAIVVMENLNGGFKRGRTKVEKQVYQKFETMLINKLNYYVDKGTDYKECGGLLKAYQLTNKFETFERIGKQSGIIFYVDPYLTSKIDPVTGFANLLYPKYETIPKTHNFISNIDDIRYNRSEDYFEFDVDYDKFPQGSYNYRKKWTICSYGDRIQYYKDSRNKPASRVVNITEKFKETFNNAGIDFVNDNIKEKLLLVNSKELLKSFMDTLKLTVQLRNSEINSDVDYIISPVKDRNGNFYYSENYKKSNEEVPTQPQDGDANGAYNIARKGLMIINKLKNTDDVTNNELLKISKKEWLEFAQKGDLGE

SEQ ID NO: 948 - protein, 1278 aa, unidentified
  REGION 1..1278: note = Cas Enzyme sequence
MPININKFSDECRKIDFFTELYNIQKTLRFSLIPIGATADNFDFKDRLSKEKDLLDSAKRIKEYISKYLADESDKCLSQPIKLKHLDEYYELYITKDRDEQKFKSAEEKLRKELADFLKEILKRLNKKILNDYLPEYLEDDEKALEDIANLSSFSTYFNSYYDNCKNMYTDKEQSTAIPYRCINDNLPKFIDNIKAYEKVLEELKPSDLEELRNNFKGVYDTTVDDMFTLDYFNCVLSQSGIDTYNAIIGNDKVKGINEYINLHNQTAQQGHKVPNLKRLYKQIGSQKKTISFLPGKFESDNELLKAVYDFYNTGNAEKNFTALKDTITELEKIFDNLAEYNLDGVFVRNDISLTNLSQNMFNDWSVFRNLWNDRYDKVNNPEKAKDIDKYNDKRRNVYKKSESFSINQLQDLIATSLEENINSKKITDYFSCDFHRCTAEVENKYQLVKELLSTDYPENKSLKTSEKDVALIKDFLDSVKSLESFVKILTGTGKESGKDELFYGNFTKWFDQLRYIDKLYDKVRNYITEKPYSLDKIKLSFDNPQFLGGWQHSKETDYSAQLFMKDGLYYLVVMDKETKREFKTQYNAPENDSDTMVKIEYNQIPNPGRVIQNLMLVDGKIVKKNGRKNADGVNVVLEELKNQYLPENINRIRKTESYKTTSDNFNKDNLKEYLEYYIARTKEYYCKYNFVFKSADEYGSFNEFVDDVNNQAYQITKVKVSEKQLLSLVEQGKLYLFQIYNKDFSEYSKGKKNLHTMYFQMLFDDRNLENLVYKLQGGAEMFYRPASIKTDSEFQHDANVEIIKRTCEDKVKDKDNPTDDEKAKYYSKFNYEIVKNKRFTKPQFSLHLTLAMNCNQPDHYWLNNSVRELLKKSNKNNIIGIDRGERNLIYVTIINSDGVIVDQINFNIIENSYNGKKYKTDYQKKLNIREKERQEARKTWKTIETIKELKDGYISQVVHQICKLIVQYDAIVVMENLNGGFKRGRTKVEKQVYQKFETMLINKLNYYVDKGTDYKECGGLLKAYQLTNKFETFERIGKQSGIIFYVDPYLTSKIDPVTGFANLLYPKYETIPKTHNFISNIDDIRYNRSEDYFEFDVDYDKFPQGSYNYRKKWTICSYGDRIQYYKDSRNKPASRVVNITEKFKETFNNAGIDFVNDNIKEKLLLVNSKELLKSFMDTLKLTVQLRNSEINSDVDYIISPVKDRNGNFYYSENYKKSNEEVPTQPQDGDANGAYNIARKGLMIINKLKNTDDVTNNELLKISKKEWLEFAQKGDLGE

SEQ ID NO: 949 - protein, 1278 aa, unidentified
  REGION 1..1278: note = Cas Enzyme sequence
MPININKFSDECRKIDFFTDLYNIQKTLRFSLIPIGATADNFDFKDRLSKEKDLLDSAKRIKEYISKYLADESDKCLSQPIKLKHLDEYYELYITKDRDEQKFKSAEEKLRKELADFLKEILKRLNKKILNDYLPEYLEDDEKALEDIANLSSFSTYFNSYYDNCKNMYTDKEQSTAIPYRCINDNLPKFIDNIKAYEKVLEELKPSDLEELRNNFKGVYDTTVDDMFTLDYFNCVLSQSGIDTYNAIIGNDKVKGINEYINLHNQTAQQGHKVPNLKRLYKQIGSQKKTISFLPGKFESDNELLKAVYDFYNTGNAEKNFTALKDTITELEKIFDNLAEYNLDGVFVRNDISLTNLSQNMFNDWSVFRNLWNDRYDKVNNPEKAKDIDKYNDKRRNVYKKSESFSINQLQDLIATSLEENINSKKITDYFSCDFHRCTAEVENKYQLVKELLSTDYPENKSLKTSEKDVALIKDFLDSVKSLESFVKILTGTGKESGKDELFYGNFTKWFDQLRYIDKLYDKVRNYITEKPYSLDKIKLSFDNPQFLGGWQHSKETDYSAQLFMKDGLYYLVVMDKETKREFKTQYNAPENDSDTMVKIEYNQIPNPGRVIQNLMLVDGKIVKKNGRKNADGVNVVLEELKNQYLPENINRIRKTESYKTTSDNFNKDNLKEYLEYYIARTKEYYCKYNFVFKSADEYGSFNEFVDDVNNQAYQITKVKVSEKQLLSLVEQGKLYLFQIYNKDFSEYSKGKKNLHTMYFQMLFDDRNLENLVYKLQGGAEMFYRPASIKTDSEFQHDANVEIIKRTCEDKVKDKDNPTDDEKAKYYSKFNYEIVKNKRFTKPQFSLHLTLAMNCNQPDHYWLNNSVRELLKKSNKNNIIGIDRGERNLIYVTIINSDGVIVDQINFNIIENSYNGKKYKTDYQKKLNIREKERQEARKTWKTIETIKELKDGYISQVVHQICKLIVQYDAIVVMENLNGGFKRGRTKVEKQVYQKFETMLINKLNYYVDKGTDYKECGGLLKAYQLTNKFETFEKIGKQSGIIFYVDPYLTSKIDPVTGFANLLYPKYETIPKTHNFISNIDDIRYNRSEDYFEFDVDYDKFPQGSYNYRKKWTICSYGNRIQYYKDSRNKPASRVVNITEKFKETFNNAGIDFVNDNIKEKLLLVNSKELLKSFMDTLKLTVQLRNSEINSDVDYIISPVKDRNGNFYYSENYKKSNEEVPTQPQDGDANGAYNIARKGLMIINKLKNTDDVTNNELLKISKKEWLEFAQKGDLGE

SEQ ID NO: 950 - protein, 1278 aa, unidentified
  REGION 1..1278: note = Cas Enzyme sequence
MPININKFSDECRKIDFFTELYNIQKTLRFSLIPIGATADNFDFKDRLSKEKDLLDSAKRIKEYISKYLADESDKCLSQPIKLKHLDEYYELYITKDRDEQKFKSAEEKLRKELADFLKEILKRLNKKILNDYLPEYLEDDEKALEDIAKLSSFSTYFNSYYDNCKNMYTDKEQSTAIPYRCINDNLPKFIDNMKAYEKALEELKPSDLEELRNNFKGVYDTTVDDVFTLDYFNCVLSQSGIDTYNAIIGNDKVKGINEYINLHNQTAQQGHKVPNLKRLYKQIGSQKKTISFLPGKFESDNELLKAVYDFYNTGNAEKNFTALKETITEFQNIFDNLSEYNLDGVFVRNDISLTNLSQNMFNDWSVFRNLWNDRYDKVNNPEKAKDIDKYNDKRCNVYKKSESFSINQLQELIATSLEENINSKKITDYFSCDFHRCTAEVENKYQSVKDLLSTDYPEKKSLKTSEKDVALIKDFLDSVKSLESFVKILTGTGKESDKDELFYGSFTKWFDQLRYIDKLYDKVRNYITEKPYSLDKIKLSFDNPQFLGGWQHSKETDYSAQLFMKDGLYYLGVMDKETKREFKTQYNAPENDSDTMVKIEYNQIPNPGRVIQNLMLVDGKIVKKNGRKNADGVNVVLEELKNQYLPENINRIRKTESYKTTSDNFNKDNLKEYLEYYIERTKEYYCKYNFVFKSADEYGSFNEFVDDVNNQAYQITKVKVSEKQLLSLVEQGKLYLFKIHNKDFSEYSKGKKNLHTMYFQMLFDDRNLENLVYKLQGGAEMFYRPASIKKDSEFQHDANVEIIKRTCEDKVKDKDNPTDDEKAKYYSKFNYEIVKNKRFTKPQFSLHLTLAMNCNQPDHYWLNNSVRELLKKSNKNNIIGIDRGERNLIYVTIINSDGVIVDQINFNIIENSYNGKKYKTDYQKKLNQREEDRQKARKTWKTIETIKELKDGYISQVVHQICKLIVQYDAIVVMENLNGGFKRGRTKVEKQVYQKFETMLINKLNYYVDKGTDYKECGGLLKAYQLTNKFETFERIGKQSGIIFYVDPYLTSKIDPVTGFANLLYPKYETIPKTHNFISNIDDIRYNRSEDYFEFDVDYDKFPQGSYNYRKKWTICSYGNRIKYYKDSRNKPASRVVNITEKFKETFNNAGIDFVNDNIKEKLLLVNSKELLKSFMDTLKLTVQLRNSEINSDVDYIISPVKDRNGNFYYSENYKKSNEEVPTQPQDGDANGAYNIARKGLMIINNLKNTDDVTNNELLKISKKEWLEFAQKGDLGE

SEQ ID NO: 951 - protein, 1278 aa, unidentified
  REGION 1..1278: note = Cas Enzyme sequence
MPININKFSDECRKIDFFTDLYNIQKTLRFSLIPIGATADNFDFKDRLSKEKDLLDSAKRIKEYISKYLADESDKCLSQPIKLKHLDEYYELYITKDRDEQKFKSAEEKLRKELADFLKEILKRLNKKILNDYLPEYLEDDEKALEDIANLSSFSTYFNSYYDNCKNMYTDKEQSTAIPYRCINDNLPKFIDNIKAYEKVLEELKPSDLEELRNNFKGVYDTTVDDMFTLDYFNCVLSQSGIDTYNAIIGNDKVKGINEYINLHNQTAQQGHKVPNLKRLYKQIGSQKKTISFLPGKFESDNELLKAVYDFYNTGNAEKNFTALKDTITELEKIFDNLAEYNLDGVFVRNDISLTNLSQNMFNDWSVFRNLWNDRYDKVNNPEKAKDIDKYNDKRRNVYKKSESFSINQLQDLIATSLEENINSKKITDYFSCDFHRCTAEVENKYQLVKELLSTDYPENKSLKTSEKDVALIKDFLDSVKSLESFVKILTGTGKESGKDELFYGNFTKWFDQLRYIDKLYDKVRNYITEKPYSLDKIKLSFDNPQFLGGWQHSKETDYSAQLFMKDGLYYLGVMDKETKREFKTQYNAPENDSDTMVKIEYNQIPNPGRVIQNLMLVDGKIVKKNGRKNADGVNVVLEELKNQYLPENINRIRKTESYKTTSDNFNKDNLKEYLEYYIARTKEYYCKYNFVFKSADEYGSFNEFVDDVNNQAYQITKVKVSEKQLLSLVEQGKLYLFQIYNKDFSEYSKGKKNLHTMYFQMLFDDRNLENLVYKLQGGAEMFYRPASIKTDSEFQHDANVEIIKRTCEDKVKDKDNPTDDEKAKYYSKFNYEIVKNKRFTKPQFSLHLTLAMNCNQPDHYWLNNSVRELLKKSNKNNIIGIDRGERNLIYVTIINSDGVIVDQINFNIIENSYNGKKYKTDYQKKLNIREKERQEARKTWKTIETIKELKDGYISQVVHQICKLIVQYDAIVVMENLNGGFKRGRTKVEKQVYQKFETMLINKLNYYVDKGTDYKECGGLLKAYQLTNKFETFERIGKQSGIIFYVDPYLTSKIDPVTGFANLLYPKYETIPKTHNFISNIDDIRYNRSEDYFEFDVDYDKFPQGSYNYRKKWTICSYGNRIQYCKDSRNKPASRVVNITEKFKETFNNAGIDFVNDNIKEKLLLVNSKELLKSFMDTLKLTVQLRNSEINSDVDYIISPVKDRNGNFYYSENYKKSNEEVPTQPQDGDANGAYNIARKGLMIINKLKNTDDVTNNELLKISKKEWLEFAQKGDLGE

SEQ ID NO: 952 - protein, 1278 aa, unidentified
  REGION 1..1278: note = Cas Enzyme sequence
MSSVFDSFTNKYSLSKTLRFELIPIGNTQRMLQENKVFQIDESRKDAYEKTKPYLDRLHREFIIEALKEVQLKGIVEYSETLKEFMSDKKDKPLQNQIKEQRKKLREQVVSFFDVEGKRWAREKYSHLKIKKKDLEILFEEQIFGILKDRFGNEKETKLVNKESGEIVSIFDGWKGFTGYFTKFFETRRNFYKSDGTSTALATRIIDQNLDRFLDNIETFRLIKNKIDPTEVENSFKFKSGDVFSTDFYNKCLLQDGIDTYNDFLGGQVLDNGEKIKGINELINKYRQDNKGEKMPFLKKLEKQILSGKEKFIDEIDSPEKFLEVLSSFHESAISKTKVIRTLLSDFLKHSEKYNLSGIFLSKEALNTIAYKWTNDPDSFNENLYLTLKGKRIISSSAKKKDGDYSFPEFISLELVKESLTQKNSEIRFWKDRFYEERSGTTTINVSTELWQQFLNIFELEFEAHFKRIITSNQTGTMHEEGYDFFEPRLRDLLNDLNISQDSKAIIKDFADEVLHIYQMAKYFALEKKRAWVGDNYDLDSEFYHHSDYGFKDNFYENAYEEIVQPYNKIRNYLTKKPYSEEKWKLNFGNPTLANGWDKNKEADNTAIILRKDHKYYLGVMKKGKNQIFVDRNRSQFQSDKNNDYYEKLVYKLFPDPSKMMPKVCFSMKGLEYFKPSEEILRIYQDKEFKKGDTFSVKSMQQLIAFYIECLSSYGGWKNYEFKFLKSPHEYKGNIGEFYADVSKSGYKLWFENVSDEYIHEKNQSGDLFLFQIYNKDFSNKATGKKNLHTLYFEELFSQANIDSNFAFKLNGQAELFYRPKSLESVEEKRNFIRKIVNKKRYTEDKIFFHVPITLNRVPDGEYRFNVELNDFLAKTNNINVIGIDRGEKHLVYYSVIDARGKILESGSLNTINKVDYHQKLESKAEAREQSRRDWQDVEGIKDLKIGYISQVVRKIADLAIKHNAIIVMEDLNMRFKQIRGGIEKSAYQQLEKALIEKLCFLVNKNETQSKKAGHLLNAYQLTAPFETFKDMGKQTGVIFYTQAAYTSKIDPLTGWRPNIYLKYSNASQAKADILKFTDIRFNLEKDRFEFTYDIKDFSTAKEFPDKTVWTICSNVERFRWDRKLNGNKGGYVHYKDMTQELKALVLEFKIDISSDLKEQMKNIDTEKKENIKFFRDLVFYFGLICQIRNTQQELEGNENDFILSPVEPFFDSRKHKDFGEDLPQNGDDNGAYNIARKGIIILQRISEYSKKFGNTDKLSWADLFISNTEWDNFSSPN

SEQ ID NO: 953 - protein, 1278 aa, unidentified
  REGION 1..1278: note = Cas Enzyme sequence
MPININKFSDECRKIDFFTDLYNIQKTLRFSLIPIGATADNFDFKDRLSKEKDLLDSAKRIKEYISKYLADESDKCLSQPIKLKHLDEYYELYITKDRDEQKFKSAEEKLRKELADFLKEILKRLNKKILNDYLPEYLEDDEKALEDIANLSSFSTYFNSYYDNCKNMYTDKEQSTAIPYRCINDNLPKFIDNIKAYEKVLEELKPSDLEELRNNFKGVYDTTVDDMFTLDYFNCVLSQSGIDTYNAIIGNDKVKGINEYINLHNQTAQQGHKVPNLKRLYKQIGSQKKTISFLPGKFESDNELLKAVYDFYNTGNAEKNFTALKDTITELEKIFDNLAEYNLDGVFVRNDISLTNLSQNMFNDWSVFRNLWNDRYDKVNNPEKAKDIDKYNDKRRNVYKKSESFSINQLQDLIATSLEENINSKKITDYFSCDFHRCTAEVENKYQLVKELLSTDYPENKSLKTSEKDVALIKDFLDSVKSLESFVKILTGTGKESGKDELFYGNFTKWFDQLRYIDKLYDKVRNYITEKPYSLDKIKLSFDNPQFLGGWQHSKETDYSAQLFMKDGLYYLVVMDKETKREFKTQYNAPENDSDTMVKIEYNQIPNPGRVIQNLMLVDGKIVKKNGRKNADGVNVVLEELKNQYLPENINRIRKTESYKTTSDNFNKDNLKEYLEYYIARTKEYYCKYNFVFKSADEYGSFNEFVDDVNNQAYQITKVKVSEKQLLSLVEQGKLYLFQIYNKDFSEYSKGKKNLHTMYFQMLFDDRNLENLVYKLQGGAEMFYRPASIKTDSEFQHDANVEIIKRTCEDKVKDKDNPTDDEKAKYYSKFNYEIVKNKRFTKPQFSLHLTLAMNCNQPDHYWLNNSVRELLKKSNKNNIIGIDRGERNLIYVTIINSDGVIVDQINFNIIENSYNGKKYKTDYQKKLNIREKERQEARKTWKTIETIKELKDGYISQVVHQICKLIVQYDAIVVMENLNGGFKRGRTKVEKQVYQKFETMLINKLNYYVDKGTDYKECGGLLKAYQLTNKFETFERIGKQSGIIFYVDPYLTSKIDPVTGFANLLYPKYETIPKTHNFISNIDDIRYNRSEDYFEFDVDYDKFPQGSYNYRKKWTICSYGDRIQYYKDSRNKPASRVVNITEKFKETFNNAGIDFVNDNIKEKLLLVNSKELLKSFIDTLKLTVQLRNSEINSDVDYIISPVKDRNGNFYYSENYKKSNEEVPTQPQDGDANGAYNIARKGLMIINKLKNTDDVTNNELLKISKKEWLEFAQKGDLGE

SEQ ID NO: 954 - protein, 1278 aa, unidentified
  REGION 1..1278: note = Cas Enzyme sequence
MPININKFSDECRKIDFFTDLYNIQKTLRFSLIPIGATADNFDFKDRLSKEKDLLDSAKRIKEYISKYLADESDKCLSQPIKLKHLDEYYELYITKDRDEQKFKSAEEKLRKELADFLKEILKRLNKKILNDYLPEYLEDDEKALEDIANLSSFSTYFNSYYDNCKNMYTDKEQSTAIPYRCINDNLPKFIDNIKAYEKVLEELKPSDLEELRNNFKGVYDTTVDDMFTLDYFNCVLSQSGIDTYNAIIGNDKVKGINEYINLHNQAAQQGHKVPNLKRLYKQIGSQKKTISFLPGKFENDNELLKAVYDFYNTGNAEKNFTALKDTITELEKIFDNLSEYNLDGVFVRNDISLTNLSQNMFNDWSVFRNLWNDRYDKVNNPEKAKDIDKYNDKRHKVYKKSESFSINQLQDLIETSLEEDINSKKITDYFSCDFHRVTTEVENKYQSVKDLLSTDYPENKSLKTSEKDVALIKDFLDSVKSLESFVKILTGTGKESGKDELFYGSFTKWFDQSRYIDKLYDKVRNYITEKPYSLDKIKLSFDNPQFLGGWQHSKETDYSAQLFMKDGLYYLGVMDKETKREFKTQYNAPENDSDTMVKIEYNQIPNPGRVIQNLMLVDGKIEKKNGRKNADGVNVVLEELKNQYLPENINRIRKTESYKTTSDNFNKDNLKEYLEYYIARTKEYYCKYNFVFKSADEYGSFNEFVDDVNNQAYQISKVKVSEKQLLSLVEQGKLYLFKIYNKDFSDYSKGKKNLHTMYFQMLFDDRNLENLVYKLQGGAEMFYRPASIKKDSEFKHDANVEIIKRTCEDKVKDKDNPTDDEKAKYYSKFNYNIVKNKRFTKPQFSLHLTLAMNCNQPDHYWLNNSVRELLKKSNKNNIIGIDRGERNLIYVTIINSDGVIVDQINFNIIENSYNGMKYKTDYQKKLNIREKERQEARKTWKTIETIKELKDGYISQVVHQICKLIVQYDAIVVMENLNGGFKRGRTKVEKQVYQKFETMLINKLNYYVDKGTDYKECGGLLKAYQLTNKFETFEKIGKQSGIIFYVDPYLTSKIDPVTGFANLFYPKYETIPKTHNFISNIDDIRYNQSEDYFEFDVDYDKFPQGSYNYRKKWTICSYGNRIQYYKDSRNKPASRVVNITEKFKETFNNAGIDFVNDNIKEKLILVNSKELLKSFMDTLKLTVQLRNSEINSDVDYIISPVKDRNGNFYYSENYKKSNEEVPTQPQDGDANGAYNIARKGLMIINKLKNTDDVTNNELLKISKKEWLEFAQKGDLGE

SEQ ID NO: 955 - protein, 1278 aa, unidentified
  REGION 1..1278: note = Cas Enzyme sequence
MPININKFSDECRKIDFFTELYNIQKTLRFSLIPIGATADNFDFKDRLSKEKDLLDSAKRIKEYISKYLADESDKCLSQPIKLKHLDEYYELYITKDRDEQKFKSTEEKLRKELADFLKEILKRLNKKILNDYLPEYLEDDEKALEDIANLSSFSTYFNSYYDNCKNMYTDKEQSTAIPYRCINDNLPKFIDNIKAYEKVLEELKPSDLEELRNNFKGVYDTTVDDMFTLDYFNCVLSQSGIDTYNAIIGNDKVKGINEYINLHNQTAQQGHKVPNLKRLYKQIGSQKKTISFLPGKFENDNELLKAVYDFYNTGNAEKNFTALKDTITELEKIFDNLAEYNLDGVFVRNDISLTNLSQNMFNDWSVFRNLWNDRYDKVNNPEKAKDIDKYNDKRRNVYKKSESFSINQLQDLIATSLEENINSKKITDYFSCDFHRCTAEVENKYQLVKELLSTDYPENKSLKTSEKDVALIKDFLDSVKSLESFVKILTGTGKESGKDELFYGNFTKWFDQLRYIDKLYDKVRNYITEKPYSLDKIKLSFDNPQFLGGWQHSKETDYSAQLFMKDGLYYLGVMDKETKREFKTQYNAPENDSDTMVKIEYNQIPNPGRVIQNLMLVDGKIVKKNGRKNADGVNVVLEELKNQYLPENINRIRKTESYKTTSDNFNKDNLKEYLEYYIARTKEYYCKYNFVFKSADEYGSFNEFVDDVNNQAYQITKVKVSEKQLLSLVEQGKLYLFQIYNKDFSEYSKGKKNLHTMYFQMLFDDRNLENLVYKLQGGAEMFYRPASIKTDSEFQHDANVEIIKRTCEDKVKDKDNPTDDEKAKYYSKFNYEIVKNKRFTKPQFSLHLTLAMNCNQPDHYWLNNSVRELLKKSNKNNIIGIDRGERNLIYATIINSDGVIVDQINFNIIENSYNGKKYKTDYQKKLNIREKERQEARKTWKTIETIKELKDGYISQVVHQICKLIVQYDAIVVMENLNGGFKRGRTKVEKQVYQKFETMLINKLNYYVDKGTDYKECGGLLKAYQLTNKFETFERIGKQSGIIFYVDPYLTSKIDPVTGFANLLYPKYETIPKTHNFISNIDDIRYNRSEDYFEFDVDYDKFPQGSYNYHKKWTICSYGNRIQYYKDSRNKPASRVVNITEKFKETFNNAGIDFVNDNIKEKLLLVNSKELLKSFMDTLKLTVQLRNSEINSDVDYIISPVKDRNGNFYYSENYKKSNEEVPTQPQDGDANGAYNIARKGLMIINKLKNTDDVTNNELLKISKKEWLEFAQKGDLGE

SEQ ID NO: 956 - protein, 1278 aa, unidentified
  REGION 1..1278: note = Cas Enzyme sequence
MSININKFSDECRKIDFFTDLYNIQKTLRFSLIPIGATADNFEFKGRLSKEKDLLDSAKRIKEYISKYLADESDICLSQPVKLKHLDEYYELYITKDRDEQKFKSVEEKLRKELADLLKEILKRLNKKILSDYLPEYLEDDEKALEDIANLSSFSTYFNSYYDNCKNMYTDKEQSTAIPYRCINDNLPKFIDNMKAYDKALEELKPSDLEELRNNFKGVYDTTVDDMFTLDYFNCVLSQSGIDSYNAIIGNDKVKGINEYINLHNQTAEQGHKVPNLKRLYKQIGSQKKTISFLPSKFESDNELLKAVYDFYNTGDAEKNFTALKDTITEFEKIFDNLSEYNLDGVFVRNDISLTNLSQSMFNDWSVFRNLWNDQYDKVNNPEKAKDIDKYNDKRHKVYKKSESFSINQLQELIATTLEEDINSKKITDYFSCDFHRVTTEVENKYQLVKDLLSSDYPKNKNLKTSEEDVALIKDFLDSVKSLESFVKILTGTGKESGKDELFYGSFTKWFDQLRYIDKLYDKVRNYITEKPYSLDKIKLSFDNPQFLGGWQHSKETDYSAQLFMKDGLYYLGVMDKETKREFKTQYNTPENDSDTMVKIEYNQIPNPGRVIQNLMLVDGKIVKKNGRKNADGVNAVLEELKNQYLPENINRIRKTESYKTTSNNFNKDDLKAYLEYYIARTKEYYCKYNFVFKSADEYGSFNEFVDDVNNQAYQITKVKVSEKQLLSLVEQGKLYLFKIYNKDFSEYSKGKKNLHTMYFQMLFDDRNLENLVYKLQGGAEMFYRPASIKKDSEFKHDANVEIIKRTCEDKVNDKDNPTDDEKAKYYSKFDYDIVKNKRFTKDQFSLHLTLAMNCNQPDHYWLNNDVRELLKKSNKNHIIGIDRGERNLIYVTIINSDGVIVDQINFNIIENSYNGKKYKTDYQKKLNQREEDRQKARKTWKTIETIKELKDGYISQVVHQICKLIVQYDAIVVMENLNGGFKRGRTKVEKQVYQKFETMLINKLNYYVDKGTDYKECGGLLKAYQLTNKFETFERIGKQSGIIFYVDPYLTSKIDPVTGFANLLYPKYETIPKTHNFISNIDDIRYNQSEDYFEFDIDYDKFPQGSYNYRKKWTICSYGNRIKYYKDSRNKTASVVVDITEKFKETFTNAGIDFVNDNIKEKLLLVNSKELLKSFMDTLKLTVQLRNSEINSDVDYIISPIKDRNGNFYYSENYKKSNNEVPSQPQDGDANGAYNIARKGLMIINKLKKADDVTNNELLKISKKEWLEFAQKGDLGE

SEQ ID NO: 957 - protein, 1279 aa, unidentified
  REGION 1..1279: note = Cas Enzyme sequence
MTFYNVILKKYEILRAKMNQNTSISQFTGLYPVSKTLRFELKPVGKTLEKIKETGIIEKDEKRHNDYFDAKKIIDTYHKYFIDAALSKVSRLDWSPLKEALVGSLDRSETSKKNLEKTQTEFRKKIAKALTSHNHYKELTASTPKDLFLKVFPDHFGKQAVIDTFNGFSSYFTGFQENRQNIYSDDAISTAIPYRLVHDNFPKFLSNIEVYKTLKDNAPSVLSDAENELKDLLDGKSLADIFKLDTYNDVLTQSGIDFFNQVIGGISGEGGEKKTRGVNEFSNLYRQQHPEFAQKHLATKMIPLYKQILSDRETKSFILESYSNDSQVQDSVKGFFESQILNCDIAGRKVNVLNELASLIKRIGEFDLGSIYVKQEELSNISLKLFDSWNSINRLLFKHAENRIGSAEKAANKKKIDAWMKNNEFSIATLNLAIAESDSDEISKVKIESYWNDFEAKVQNILCGEHRKNLDEFLSATFNEKNSLREDSEIVGKLKAFLDALIEIMHSVKPLVSDVENRDLSFYNELTPLYDQLSLVVPLYNKIRNYATQKLTESEKFKLNFDNPTLANGWDQNKEEANTSILLLKNGNYYLGVMNATNKPKIKDFKISDGEDCYDKMVYKLLPGPNKMLPKVFFSEKGLASFKPPKDILDGYNAGKHKKGDLFDIDFCHQLIDFFKDSIAKHPDWKNFGFKFSETSSYEDISGFYKEVTDQGYKITFSKIPTSQIDEWVNEGKLFLFQIYNKDFAPGATGSPNLHTLYWKSVFSPENLKDVVVKLNGEAELFYRPSSIKKPYSHKVGEKLVNRIGKDGLPLPESVFGELFRYFNGKLDAELSDEAKKYLDVAVVKDVKHEIVKDRRYTQDKFEFHVPLTLNFKADSKNEYMNERVRHFLKDNPDVNIIGIDRGERHLLYMTLINQKGEILKQKSFNIVESVNYQAKLVQREKERDAARKSWNSIGKIKDLKEGFLSQVIHEITTTMVENNAIVVLEDLNFGFKRGRFCVERQVYQKFEKMLIDKLNYLVFKNKPEGDVGGVLNGYQLAEKFDSFQKLGKQSGFLFYIPAAYTSKIDPTTGFANLFNMTELTSAEKKKDFLSRFEDITYDGKNDRFLFSFNYKNFKCFQTDYIKKWTVYAQGKRIVFDKESKSAKEISPVEIIKVALAKQNIALTDQLDVLSAINSVEASSKSASFFGDICYAFEKTLQMRNSIPNTDEDYLESPVMNKDGEFYDSRSCNDSLPKNADANGAYHIALKGLYLIKNVFDAGGKDLKIPHEKWFEFVQSRNK

SEQ ID NO: 958 - protein, 1279 aa, unidentified
  REGION 1..1279: note = Cas Enzyme sequence
MKTKPKTISNFTNKFQLSKTLRFELKPIGETLNQIKAKGLLTKDAQRAKSYKSMKETIDEFHKYFIEIAMNSVNLSNLEDFSILYYESNLERKKEDSYKKELAKVQEQLRKEIVKGFKEGEAKEIFSKLFKKEIITELLEIYHNENPDSYYDEEFKTFTTYFTGFHENRKNIYTDKEQSTAIAFRLIHENLPKFLDNVKVFNKLIQIPQFKNNCKELYKNIETYLNITKIDEAFEINYFNNTLTQKDIDVYNLIIGGKSSKENEKKIQGLNEYINLYNQKQEKKNRLPKLKMLYKQILSDRDNISFLPDKFENSQDVLDAIENYFKANLKEFQPKDSAIPINILESLKELVASIPSYQIDKIYIKNDTSLTKISQTLFNDWGVIKAALEFDFLKGLTIGKKGLSKKQETEIDKYLKQNYFSIQTIENALLNYKEQDERLINLKDDDLLVANYFNKHFKATQQKDNEKVFDLIANIDAKYSCIKGLLAGQYPEDKDLKQDQKTIDNIKLFLDSLMELLHFVKPIAIPIDFTQGDKDEAFYTSFNTLYEQLQLLVPLYNKVRNYATQKPYSVEKYKLNFDNAQLLAGWDANKEKDYLTSILVKDGLYYLSIMDKKNNKVLQNLNAPKTGDYYEKVIYKLLPGVNKMLPKVFFSNKNIDFFNPSEELLNKYKAGTHKKGDNFSLQDCHNLIDFFKESLNKHKDWKNFNFQFSSTETYDDLSYFYREVGQQGYKITYDKVAVDDINTLVNEGKLYLFQIYNKDFSPYSKGKPNMHTLYWKALFDENNLKNVVYKLNGQAEMFYRQKSITDNIVVHKANEAIKNKNPLNKKENSTFNYDITKDKRYTEDKFLFHVPITMNFKATGNDYINADVLTYLQNNPEVNIIGLDRGERHLIYLSLMNQKGEVLKDEKGLPIQFTLNDIVNEHNGNTYKTNYQNLLDTKEKERDKARKNWGSIENIKELKEGYISQVVHKIAHLMVKYNAIVVMEDLNFGFKRGRFKVEKQVYQKLEKMLIDKLNYLVFKDKNPNDTAGLYNALQLTNKFKSFKDMGKQSGFLFYVPAWNTSKIDPTTGFVNLFNTKYENLEKAKAFFSNFKSIKFNEKENFFEFDFDYNNFTARAEGTKTNWTVCTYGDRILTFRNSEKNNEWDNQSKNLTTEFIQLFTTNNIDYKANLKEQILNKENAKFFKDLLFWFKLTLQMRNSITNSEVDYLISPVKNNEGYFYDSRTAKNNLPKDADANGAYHIAKKGLWMLQQINNYENNDNWKKLKLAVSNKDWLNFVQNN

SEQ ID NO: 959 - protein, 1279 aa, unidentified
  REGION 1..1279: note = Cas Enzyme sequence
MKNFTNKYSLSKTLRFELIPQGKTSEHIENKGLINQDEKRAENYKRIKSIIDDYHKDFIRQAMSNVQLTKLEIFADLYNAYNEKKKEESFKKEFEKVQSDLRKEIVAGFSSDNVKEIFSEIFGEKLIKELLEDWMRKQDCYSDEHYELLKDFKTFTTYFTGFNDNRKNIYTSEAHSTAIAYRLIHENLPKFIDNIKAYKKVKESRININKLEENLDSLLPGVVLDQVFSLDYFKYVLTQTGIDNYNLVIGELNLVGNLFNQKQEIKNNRIPKLKPLYKQILSDRQSTSFSLEAFEDDSNSTASQQVLDTINTYYRNSLICFYPTENSEPENVLEEIKKLLEDLKTYDLDKIYLRNDAKITAISKKIFGDYSVFGSALNYYYKTVENPKFEEEYKKAKSQKAKENLENKQEKFVDKPYIAISLLQKALDIYIESLDDNHKLKDKYKPNCVADYFHTYFISEQNSNGKKFDFVSNINAKHSCIQGLLNDAYPLDKKLHQEKDDIAKLKLFLDALMEMLHFVKPLALAKDSNLPKNDSFYGQFTTWFEQLDLLIPLYNKVRNYATQKPYSVKKIKLNFENSYFLSGWATEYSSKGGLVIIKENDFYLAIVDKKLSDDDVAFLTENSNLNLAQRVVVDFQKPDNKNIPRLFIRSKGENYSPAVEKYNLPIGEVIDIYDSGKFKTEYRKTNPQDFKQSLVKLIDYFKEGFTKHESYKHYQFLWKDSKEYLDISEFYKDVESSCYQLSFENINFDNLLNLVDQEKFYLFKIYNKDFSKHNKGKPNLHTIYWKALFDEQNLANVFYKLNGQAEIFYRRKSIKEPTIHKAGEAIANKNPNNQKKESIFDYDLIKDRRYTVDKFQFHTPITLNFKAKGGDYINYDVLSYIKNNPDIKIIGIDRGERHLIYISLIDQKGKILKQESFNIISNDGHETSYHNLLATKEKERADARENWGVIENIKELKEGYISQVVHKIAKMMVENNAIVVMEDLNFGFKRGRFKVEKQVYQKLEKKLIDKLNYLVFKDKQPNEIGGLYNALQLTNKFESFQKLGKQSGFLFYVPAWNTSKIDPTTGFVNLFYAKYESVEKAQEFFGKFEDIRFNPSHNYFEFEVKKYSDFNIKAEGTRQDWLICTYGDRISTFRNSQKNNSWDNKEVILTDEFISLFEKYAIDYKSENLKNLIISQTDKSFFESLLRNFKLTLQMRNSITNSEVDYLISPVQNNKGEFYDSRKADETLPKNADANGAYNIAKKGLQWLEQINKFEGENWKKLELDKANNSWLRFAQNKN

SEQ ID NO: 960 - protein, 1279 aa, unidentified
  REGION 1..1279: note = Cas Enzyme sequence
MKNQIKFNDFIGLYKLSKTLRFKLIPQWETSKNIESKGLIKQDEALEKKYKRAKEIIDKKHKFFIEESLKNLTLNGLNEYLECYQSNENPKRKNDLEKKSETLRKQIVKQFAGEGYKRLFSSQLIKEDLPEFVDSEEDRAIIEDFKNFTTYFTGFHENRKNMYTDERKSTAIAYRLINENLPKFIDNMVIYNQIQKTELGKNLKELCGKLISDLKIKSIDKIFTIDYYNKVLVQSRIDIYNTLIGGKTLDDGTRIQGLNEHINLYNQKQKEKSIKLPKFKPLYKQILSEREHYSWRQEEFEEWDDNNVIKSIESFCNEKMPIIDNNEDKEISLKHLLKNISNYDLDRIYIRNDMSLGEISNKIFGNYSIIREAIGKDFESNNPRKKKESFEKYSERKSKYLKSFDSFSIGHINRCLQRLDEPYASVNIAEYFESASEDENLKKDLFSQIEDSYDELKEMFTAEYPQDRRLSQSDTDITKIKNLLDSIKALQLFIKPLLGKGNEANKDEVFYSEISKLWESLNELTPFYNKVRNYITRKPYSTEKFKLNFESPTLLDGWDKDKETANIGVILRKNGLYYLGIIDKMDSKIFEDDNIPQHEELNSFEKMEYKFFKDITTMIPKCSTQLNSVKNHFQTETSDYILNDEKFNKPLVISKDIYDLNNPLDKGGKKKFQIEYFRQTGDEAGYKAAVKKWIMFCMDFLYSYKSTSIHDYSSLNPISKFDRVDKFYNEVNKLIYKVTFRTISEKYIRQLVLEGKLYLFQIYNKDFSSYSTGTPNMHTLYWKMLFDPLNLRDVVYKLDGQAEIFYRKSSIKKKDIIVHPSNNAIANKNKSNNKKKSTFNYDIIKDRRFTVDQYQFHVPITLNFKADAPGNINEMVNSFLKNSQNIYIIGIDRGERHLIYVSLIDEKGNIKKQFSLNDIVNEYKDNKYKTDYRGLLDSRESERDQARKDWKTIKTIKELKEGYLSQVIHKITRLMIEYKAIIVLEDLNTGFKRSRQKVEKQIYQKFEKMLIDKLNYLADKKTDPTKEGGILKAYQLSNKFESFQKMGKQSGFLFYVPAWNTSKIDSVTGFVNFFDTSYKNIDETKKFFEKFKSITFNKKENFFEFEVDDYSKFSGKAEGTRAEWVICTNGTRLESFRNQEKKSQWDSREIDLTEEFKKLFMGRIDIDKDIRTQVLEQEDKDFFERLLYLFRMTVQLRNSITGSDTDYILSPVPDKNGKFFDSRKAGPGLPDNADANGAYNIARKGLFLIEERIKEAEDMKKIDLSISNKDWLRFVQRNG

SEQ ID NO: 961 - protein, 1279 aa, unidentified
  REGION 1..1279: note = Cas Enzyme sequence
NASLTSDEAQQIGFADYFDEYKKGKAKKLSDFEKSLREQIGNTFENVVKSYAVKKISKKKEEEKSKSVFEFKKSVPIAKAEIIDYLLEQNKDDTDLIKHIQEFKGFFGYFDNYNQNRGNYYVYKEEASTAVATRIVHENLPKFCDNAIQFENRKDDYAGALQYLKDNNRTTQIKDAETGAIIEAEAITENWFKIEKFSKCLTQNGVDAYNRVIGHYNLLINLYNQARKDEKDFKKLSQFKILFKQIGSAKRVLFEQIKSDEELKTQLETVSKAGEKYFKESDDINQITIQSFTKWLRENKDWGGVYWSKTAVDKISNKYLSNWHEIKDRIQKVLDSKDKDQKDLKDSLKSVATYKKNREEDLKLNDAVELSGLFEILNQQNGEDWSKAFFKESVLEERQSLIDESKTPSQNLINLICADIEELAKTFCTNSIEILDKEKSTEKEEVKKIIKILEIEDYKNEDHILTIKEWLDTAKSVLWLIKYFEVKESKIKGNSINSELTNMLTTLLRSDDADWLDWYDLVRNYLSKKPQDDAKKNKLKLNFLNPQLLGGWSDGQEKNKGAVLIKNGNKQYVGLLIERNIFDTEKKDNSIYKNASGQNIGRLILRNIAFKIVAGKGFVSKYNKKYSEIDEPIKKLQEFIKSNYVQKYPRLKDVSETTYTDKKVFDKAVQDALTECYECNFKPINWTKVMEYIEEPLKKTENDGLKKLYLFEIYSKDFSENKGEQSKNSNLNLQSIYWKHLFDGDSTIQLNGGGEIFYREKVDLRKEDIAVHPAKEKIKRRSDNLTESIFKHDIIKNKRFTENKFFFHVPIKINYQAPIRSNVNADVNNEFPKSDNIQFLGIDRGEKHLIYYSLVNAKGEIIEQNHFDIINNKNYLEAINEAARKRREKQENWQQKGNIANLKDGYISLVIHEILEKLKDKDDNYKPTFIVLEDLNTGFKRSRQKFEQQVYQKFELALAKKLNYLVDKSARNGEIGSVSQALQLTPPVSNYGDIENRKQVGIMLYTRANYTSVTDPATGWRKTIYLKTGSEEVIKKQILETFTEIKFENNDYYFQYTDIIGKEWKLWSGKNGKPLERYRAKRGKDKNEYVIESYDVKALLDKLFEKFEKAESLKKQLEFGTELTKVNEHTAWEKLRFVIDIIQQIRNSGDTSKNQDDNFLLSPVRNEQGEYFDSRTATKTLPKDADANGAYNIARKGIIMYEHIKKIGNNWNKKVKIGGNETIDLDLFVSDNEWDLWLNDQKQWDEKLNYFASRFAKEESKVKSTKKSKNEENEENENQ

SEQ ID NO: 962 - protein, 1280 aa, unidentified
  REGION 1..1280: note = Cas Enzyme sequence
MTAKNTGIWDEFTNQYALSKTLRFELKPVGYTQNMLEEAKVFEKDETIQKKYEATKPYFDRLHREFVREALENEALSGLNEYLEIFKKWKADKKANEKELQTKEKELRKEVVEFFDAQAKIWAFEYSPLGIKKNSVGILFEEDIFKILKARYGNEKESIIIDESTEKLISVFDSWKGFTGYFGKFFKTRENFYKDDGTSTALATRIIDQNLKRFCDNILIFENVREKMDFSEVEANFGKPLSELFSIDFYNTCFLQDGIDFYNKILGGETKENGEKLKGLNEYINKYRQDHKGDKPLFFKTLDKQILSEKESFIVDEIIEETLLENLQNFYESAERKTKLLKELFKDFIQNQEKYDLSQIYLSKESLNTIAHKWTNETVIFEESLYEVLKKEKIVSTSAKKKEGGYSFPDFIALSVIQEALTKISAANFWKERYYELAGFPEMPHWEQFLEMFYFEFSSLFERKVTNTEKREGSKVGYDFFKKDFKNLLQNLTPDHLSSEDKAVIKNFADCVLTIYQMAKYFAVVKKRAWNMDYELGIFYTDPENGYLLFYENAYEEIVQSYNKLRNYLTRKPYSEEKWKLNFENPTLADGWDKNKESDNSAVILRKDGKYFLGLMSRGNNKIFDDRNKEKFSQNIQQGNYEKVVYKFFPDQAKMFPKVCFSAKGLEFFQPSEEIWNIYKNAEFKKGDTFSVQSMQKMIDFYKVCLNEYEGWKGYDFKHLKSTKDYKENIGEFFRDTAEDGYKITFQNISESYVDKKNENGELYLFQIKNKDWNEGSNGAKNLHTIYFESLFSVDNISQNFPIKLNGQAEIFYRPKTEKEKLGTKKDKSGKEVVNHKRYNENKIFFHVPLTLNRTKPDMSSKQFNAKVNNFLANNPDVNVIGVDRGEKHLAYYSVISQKSEILDSGTLNEINGVDYSQKLEEKAKNREQARKDWQTVEGIKDLKKGYISQVVRKLADLAIEHNAIIVFEDLNMRFKQIRGGIEKSVYQQLEKALIDKLSFLVKKGEKNPEEVGHLLSAYQLSAPFTTFKDMGKQTGIVFYTQAAYTSKIDPITGWRPHLYLKYKSSKKDGPLATKEDILNFSKIEFVNGRFEFNYDIKKFQPNNKEYSEKTVWTVCSSVERFRWNRHLNNQKGGYEHYQDLTDNFKALFEENEIDFESGDILGKIEVLEPKGNEKFFKNFIFFFNLICQIRNTNDQAKNLDQQDFILSPVQPFFDSRIPEKFGDNLPENGDDNGAYNIARKGIVILNKISNHSQTDPKFKKYPELFVSNIEWDNFIKTES

SEQ ID NO: 963 - protein, 1280 aa, unidentified
  REGION 1..1280: note = Cas Enzyme sequence
VVIVPYNRLEFGAKLFEINIPKMADFSEFTNMYSLSKTLRFELKPIGNTQAMLEENQVLQKDEHRQLAYKAIKPYFDQLHREFVQESLAEAVINGIGDYSEVLSSYKKDRTSKTIQKDIDAQKKLLREQVVSHFDAIGKKWAAEDYSHLRLKNKDISILFEEQVFAILKDRYGHEKKTELIDESTGEIKSIFDNWKGFTGYFTKFFETRKNLYKSDGTATAIATRIVDENLVRFIENINTFNTVKDRLNISEVEEFFGLDAATVFATGYYNSCLLQSGIDKYNDFLGGKTLASGEKKKGINELINQYRQTNKGEKLPFLKKLNKQILSEKESDFFVLENEDDARAILKTFQINAAHKLGLLQKLLNKFFAEQDSFSLDNIYISKEALNTISYKWTRDTAFIQDSLYHTLKELKLVKTRGKDDEEYSFPEFIALAHIREALESVRPEDKIWKDSYYRDTNDDGTLNRTESTWNGFMLILKHEFANNFKSFERSNSLIKNALQAENVDLQSIKAQIKDFADSALWTYQLGKYFAVEKKRKWDETYILDDFYTDPTLGYSEQYYPDAYEQIVRPYNDIRNFLTKKPHSEDKWKLNFEKGNLLGGWPDSPEGNTQYGGFIFRRDGKYYLGVTDYPRIFDDRKYPLTHDTAATSTYEKMIYKQVDAKTLYGSTYKGLFGTKYSDDQRLLSDAELLGRMKLILEAKAGNFLELTGILSDLNAGKFEDAKSLARAISDGSFYNINFMSVPSAYVERGRYELGHDKKGKPIIKHLYLFQIYNRDFAKGKTGKKNLHTIYFEELFSKENIEKNFILKLNGQAEIFYRPKTDAGKLGYKKDKRGKEVINSKRYSESKIFFHVPITLNRVSKNVSRFNLEVNNFLANNPEINIIGVDRGEKHLAYYSVINQRGKLLQSGSLNTVNRIDYADKLEAKAHGREQARKDWQQVEAIKDLKKGYISQVIRKLADLAIEHNAIIVLEDLNMRFKQIRGGIEKSIYQQLEKALIEKLSFMVNKGEVDANKAGHLLKAYQLATPVDSFKDMGKQTGIIFYTQAAYTSRIDPLTGWRPNLYLKYTNAEKARSEISKFKWIEYDAQKGRFEFAYDLRDFVVSKEYPLKTEWVLCSGVERFRWDRKLNSNRGGYTHYKSLTPFFKQLLEEFGIDYQKDIVTQIVRLSPSGNEKFFRDFIYFFNLVCQIRNTQQSKSVDENDFILSPVEPFFDSRIADAFGEGLPRNGDENGAYNIARKGLVILEKISNFQRENSNTEKLGWRDLYISHADWDNFATRSDKA

SEQ ID NO: 964 - protein, 1280 aa, unidentified
  REGION 1..1280: note = Cas Enzyme sequence
MLYNGKSINKKIDYFTKQYNLQKSLKFALKPMGDTLKNFDLRNRLQIETNLNKKSKNVKGYINEFLAIKNDEALSKPISLSCLKEYSNEYFSEERNFDKMAKMEETLRKEIAKQISSVEKLLNKPKEFISKTLPESITDTAKLDDINELSSFTSYFTNFIAVKKNMYSSEDKALTIPSRSINDNLPKFLDNVNIFKIVKNNLDKGNLVELQNNFKGIYDTKIEDMFTVDYFNFVLSQSGIETYNNVIGGYSKPSGEKVKGLNEYINLYNQKASREDKLPLMKQLYKQIGSITDSISFIPAEFTSDEELLKAVYDFYNTTDQTLNIYSYVDIIDKFKDIIMNMDRGMYNLKGIFIKNDKNITNLSNGLLGNWSTIQNLWNDEYDKNNHPEKAKNIEKYEDKRKKAYQKNKSFSIFELQNLISTSNNEDINKKNITSYYIKEFIKLTTAVKDRYNVVKSTLTNYVITNKGLKTDNIAIAKIKSFLDSIKEVQHLLKSLFGTGKENSKDQIFYGEYLNWFNQLKAINKLYDKVRNYITAKPYSLEKIKLSFDNSTFLGGWQQSSETNYSAQLFTKDGLYYLGVMDKITKKEFKKAYNTPTDNNDTFLKINYNQIPTPGKQVQNLMIIDGETVKKNGRKNADGINTVLEELKNKYLPANINAIRKKGSFKTTSDTFNKADLTTFIEYYAERTKEYYSQFSFVFKPYSEYKNFAEFIADINRQAYQISYTEISKKQLFDLVSEGKLYLFEIYNKDFSNSSKGKPNLHTMYFKALFDKDNLADVIYKLQGGAEMFYRPASIKMADRVIHPANQEIIKRSKEDFVIQKGGKYNLSEEERKDCYSILPYEVVKNKRFTKPQFSLHFSIALNCQCPDFNNINYDVRELLKKSGKTNIIGINRGERNLIYVTIINSKGKILRQENFNAISSNYKGSTYYTDYRNKLDNKEKDRKIARENWNTIEAIKNLKEGYISQVVHKICNLVTEYDAIIVMEKLNSSFKNSRAKIEKQVYQKFETMLINKLNYYVNKSISFKDYGGLYNAYQLTNKFESFEKIGNQSGFIFYVNPNYITNVDPVTGFANMLYVAYENINKAHSFIDKFDSIRYNQIEDYFEFDIDYEKFLNKKLNFKSKWTVCSYGNRIKFFRNKDKNNKQEYKTVSVTAELKNIFNNSGIDYLTGNIKDQLLNISDKTILKGFMETFKLILQIRNSNSKEDYIISPVKDSNGSFYCSKDYNCGNGNVSELPKDIDSNGSYNIARKGLMLIQRITNATDVKDIKTSISKDEWFNFIQ

SEQ ID NO: 965 - protein, 1280 aa, unidentified
  REGION 1..1280: note = Cas Enzyme sequence
MFLGFINKYQLSKTLRFELKPIGKTLEFIEQKGLIVEDEARAEDYKRVKELIDKYHKEFIHQALSGIRLDGLDRYEELFFIQNRDEKTQKEFEKLQDDLRKQIVAGFKAHEAFKNIDKKELITVELPKFLKDEKDKKDREIVKKFDSFTTYFTGFHENRKNIYSDKAQHSSIGYRVIHENLSIFLSNKRAFESIQQNFPEIAQTAQNSLLEHLEGGVVEDMFGLDYFSLTLTQTYIDIYNTMLGGKVLKDGTKIQGLNEHINLYRQKYNIEKRKLPNLKALHKQILSDRESMSWLHESFANRDELNSTVEKFYKESIISFKQYNDAVDITEELINILSDESDYDLGKVFVKNDISLTAISQEIFKDYRVIKDALWQKHLADNPKATKSKDITVDEEKYFSRKNSYFSISQIEKALNKAELSDEAKKEKENYKGLFDFFKTKVAESSKAVKENFTDWQNNKEDKKLTKSLLDSMLNLQRAIKPLSVKAEDADDRSFYALFSTYFESLSGVIRIYDKVRNFESKKPYSMEKFKLNFENKGNFLGGWVDSSTEKSDNGTQSGGYLFRKRNGIGEFDYYLGISSDPKLFRSHLQDEIEKEDISDFERLDYYQLKSATVFGNSYVGDSYSKDRDLLYQKILEFVENTEPLKADIDKYVSSQKGTNQPTPSGIISIVKEKYPELLQKLKDDQGFSEINKTVTDRLKKTILSLHRIPRSQEYKNHNFSLFTEAIEVIEELSSEKSFAYFKVSKSELENALNRDSKPLFLFKITNKDLSFADSFIAGKRKSRGTDNLHTLYFKALMSGSQNVFDIGTGEVFYRKEDYKGKKIVHKANEPIENKNRLNDKKHSLFEYDIVKNRRYLVDKFQFHLSIVQNYIKPKKYPDFNTEVNQAIKGASDIKVIGVDRGERHLLYLSLIDSSGRIVEQYSLNQIINSHNGKKHIVDYHQKLADKEKERAEARENWGVVENIKELKEGYMSHVIHRIATLMVKHNAIVALEDLNFGFKRGRFKVEKQVYQKFEKMLIDKLNYLVDKQKSPNELGGLLKAFQLTNKFVSFEKLGKQSGFLFYVPAWNTSKIDPVTGFVNLLDTRYQSIEKSKEFFSKFDAIRYNDQKGYFEFEFDYKNFTTKADGTRTKWTLCTYGTRIKTFRNRDKNHQWDNVEVDLTAEFKSLFGLHSGDLKELIISQDRKEFFETLLYLLRLTLQMRNSVTNSEIDYLISPVADKNGNFYDSRVASDDLPRDADANGAYNIARKGLMIIEKIAKSKSGEKLNLTISNKEWLAYAQR

SEQ ID NO: 966 - protein, 1280 aa, unidentified
  REGION 1..1280: note = Cas Enzyme sequence
MFLGFINKYQLSKTLRFELKPIGKTLEFIEQKGLIVEDEARAEDYKRVKELIDKYHKEFIHQALSGIRLDGLDRYEELFFIQNRDEKTQKEFEKLQDDLRKQIVAGFKAHEAFKNIDKKELITVELPKFLKDEKDKKDREIVKKFDSFTTYFTGFHENRKNIYSDKAQHSSIGYRVIHENLSIFLSNKRAFESIQQNFPEIAQTAQNSLLEHLEGGVVEDMFGLDYFSRTLTQTYIDIYNTMLGGKVLKDGTKIQGLNEHINLYRQKYNIEKRKLPNLKALHKQILSDRESMSWLHESFANRDELNSTVEKFYKESIISFKQYNDAVDITEELINILSDESDYDLGKVFVKNDISLTAISQEIFKDYRVIKDALWQKHLADNPKATKSKDITVDEEKYFSRKNSYFSISQIEKALNKAELSDEAKKEKENYKGLFDFFKTKVAESSKAVKENFTDWQNNKEDKKLTKSLLDSMLNLQRAIKPLSVKAEDADDRSFYALFSTYFESLSGVIRIYDKVRNFESKKPYSMEKFKLNFENKGNFLGGWVDSSTEKSDNGTQSGGYLFRKRNGIGEFDYYLGISSDPKLFRSHLQDEIEKEDISDFERLDYYQLKSATVFGNSYVGDSYSKDRDLLYQKILEFVENTEPLKADIDKYVSSQKGTNQPTPSGIISIVKEKYPELLQKLKDDQGFSEINKTVTDRLKKTILSLHRIPRSQEYKNHNFSLFTEAIEVIEELSSEKSFAYFKVSKSELENALNRDSKPLFLFKITNKDLSFADSFIAGKRKSRGTDNLHTLYFKALMSGSQNVFDIGTGEVFYRKEDYKGKKIVHKANEPIENKNRLNDKKHSLFEYDIVKNRRYLVDKFQFHLSIVQNYIKPKKYPDFNTEVNQAIKGASDIKVIGVDRGERHLLYLSLIDSSGRIVEQYSLNQIINSHNGKKHIVDYHQKLADKEKERAEARENWGVVENIKELKEGYMSHVIHRIATLMVKHNAIVALEDLNFGFKRGRFKVEKQVYQKFEKMLIDKLNYLVDKQKSPNELGGLLKAFQLTNKFVSFEKLGKQSGFLFYVPAWNTSKIDPVTGFVNLLDTRYQSIEKSKEFFSKFDAIRYNDQKGYFEFEFDYKNFTTKADGTRTKWTLCTYGTRIKTFRNRDKNHQWDNVEVDLTAEFKSLFGLHSGDLKELIISQDRKEFFETLLYLLRLTLQMRNSVTNSEIDYLISPVADKNGNFYDSRVASDDLPRDADANGAYNIARKGLMIIEKIAKSKSGEKLNLTISNKEWLAYAQR

SEQ ID NO: 967 - protein, 1280 aa, unidentified
  REGION 1..1280: note = Cas Enzyme sequence
MQQYDNFINHYAIQKTLRFELQPIGKTREHIQKNGIIEHDEALEQKYQIVKKIIDRFHRKHIDEALSLADFSKDTAMLKRFEELYWKKNKNENEKNEFVKIQSDLRKRVVSFLEGKVEGDARFAKVQQRYGILFDAKIFKDKEFISTACDDIEKDAIEAFKRFATYFTGFHENRKNMYSADEESTAIAYRVINENLPRFLENKARFEKIQHTVDSKTLNEIATELKPVLEKNKLETIFTLNYFQNTLSQAGITYYNTILGGKTKENGEKVQGLNEIINLFNQKNKDTMLPLLKPLYKQILSEEYSTSFTISAFEKDNDVLQAIGSFCNDCIFYAKNNVNGKAYNLLQTVQAFCNSIDTYNDNRLDGLHIERKNLATLSHQVYGEWNILRDALQIHYEAYEQKDNGNNNNYLESKTFSWKALKDALTTYKSLVEEAQDIDENGFIAYFKDMKFKEEIDGKTTSIDLIENIQTRYKSIETILQEDRNNKNNLHQEKEKVATIKGFLDSVKYLQWFLNLMYIASPVDDKDYDFYNELEMYHDTLLPLTTLYNKVRNYMTRKPYSVEKFKLTFEKSTLLDGWDKNKERANLGVILRKGNNYYLGIMNKKYNDIFDSIPGLTTTDYCEKMNYKLLPGPNKMLPKVFFSKKGVQFYKPSQEIIRLYNNKEFKKGDTFNKNSLHKLINFYKESIAKTEDWSVFQFKFKNTNDYADISQFYKDVERQGYKISFDKIDWEYILLLVDEGKLFLFKIYNKDFSPYSKGKPNLHTIYWKNIFSHDNLNNVVYKLNGEAEVFYRKKSIEYPEEILQKGHHVNELKDKFKYPIIKDKRYAEDKFLFHVPITMNFLSKGEPNINQRVQQYIASTSEDYHIIGIDRGERNLLYLSLIDATGKIIKQLSLNTIKNENFNTTIDYHAKLDEKEKKREEARKNWDVIENIKELKEGYLSQVVHQIAKLMVEYKAILVMEDLNTGFKRGRFKVEKQVYQKFEKMMIDKLNYLVLKDRQATQPGGSLKAYQLASSLESFKKLGKQCGMIFYVPAVYTSKIDPTTGFYNFLRVDVSTLNSAHSFFNRFNAIVYNNEQDYFEFHCTYKNFVSEPSLQKNVKSSKMHEYNNLKDTTWVLCSTHHERYKKFKNKSGYFEYKPVNVTQSLKQLFDEAGIDYQAGADLKEAIVTGKNTKLLKGLGEQLNILLAMRYNNGKHGNEEKDYIVSPVKNNYGKFFCTLDGDASLPVDADANGAYAIALKGLMLVERMKSNKDIKGRIDYFISNNEWFNYLIAKNTLNKSK

SEQ ID NO: 968 - protein, 1280 aa, unidentified
  REGION 1..1280: note = Cas Enzyme sequence
MKAFTNLYQVAKTLRFELIPDERTKEFLEHSKLIDKDEHRAESYVAVKGIIDRYHKAFIERVLSELKLQYAKEDKLNSLEELYSLYMKTQKSDADKKMLEQVQSNLRKQIANALTKDSQYKRMSGKELIREDLFKITTPEERTLVEEFADFTTYFSGFYENRKNMYSAEAQSTAISYRLINENLPKFIDNIATFHKILNSPVAEQLPTLYKEMKEYLNVNSIEEMFMLDYYDVVLTQTQIEVYNGVIGGRTTDDGQKIQGINEYVNLFNQKQSSRETRLPKLKPLFKQILSDRQTVSWLTEEFKTDRDMLDAIKERYDSLSSDVFPLLKELLQNLFSYNLNQIFIPNNLALTDISQSLYGDWGVIKREIMIRLKHDFPQTKKEKAEKYEERIEKTYKSFDSFSIAYLNEVLSEKSLDVCSYFATLGAVNNKDRQTENLFLQIKNAYHNAAELFEKDYPETKNLAQDKQSVDKLKVLMDALKALQHFVKPLMETGEEPEKDERFYGDLSVLMEELNLVTPLYNKVRNRMTRKPYSNEKFKLTFNIKGNFLGGWVDSKTEKSDNGTQYGGYLFRKKNSIGEYDYYLGVSANTKLFRKVEGASGQYERLDYYQPKSQTVYGNSYVGKDGYESDKQTLMHSIISYVGTTNDMNVKQQVESKDTPSSMITVIKDASPLLYQGLLDDPYFSDVNRRVTNNFHQTILSMTRIPRSKDYQGAKFTLFTEPQQVIEDICKEKVFGYFAVDDQEIADAMADTSKPFLLFKISNKDLSFAEKFEKGMRHSRGTDNLHTMYFKALMNGEQSVLDIGSGEVFFRRASIKANITHPARIAIKNKNNANEKKESCFDYDLIKDKRYTVDKFGFHLSIIQNYQSPNRYDVNALTREYIRNNPDVHFIGIDRGERHLLYVSVINSRGQIVEQFSMNKIENEYNQTDYHQLLEQRSDIRQKERQSWRTIEGIKELKQGYLSQVVHRIATLMVKYKAVVVLEDLNMGFKRGRQMVESSVYQQFEKALIDKLNYLVDKQVDANEPGGLLRGLQLTNKFTSFREMGKQNGFLFYIPAWNTSKMDPVTGFVDLLHPRYENVDKARAFFCKFKSIQYNDEKGWYEFRLDYNDFNAKAEGTKTLWSVCSNGTRIETFRNVEKNSSWDNREVCLTEEFDKLFADYHISRTGNLKEQIAQQTEKSFFERLTHLLNLTLQMRNSMTGTTIDYLVSPVADEDGVFYDSRTCSKELPENADANGAYNIARKGLWVACQIREAQDANKVKLNISNKQWLLFAQTKPYLSD

SEQ ID NO: 969 - protein, 1280 aa, unidentified
  REGION 1..1280: note = Cas Enzyme sequence
MNNFTNLYPVDLTLRNSLIPIGETLKNMTMHSYIEHDEQRAEAYKLVKGIIDDYHRAFIDSRLASFEFRIESHGTLDSIEEFTTLYNIKRDEKRDKEFTTVKQNLRKAISQRLTKCDAFARINKRELIREDLPYFIDSLDISEEEKAEKKKLVEQFAKFATYFSNFHTNRANMYVADEKSTSIAYRLINQNLPVFLDNMKVFAMLKALGFEDALSVIYSDMKEKLNVLSLDELFQQDYYSMLLTQRQITVYNEVIGGRSTKDGEKIKGLNEYINQHNQEHPTARIPFLRPLYKQILSDRVSMSWLPDSFINDEEMIRAINIFHQNIHPLLWGPMEDAGEPLKNILSQIDTFDTEHIFITNDSALTNISQRLFGQYNVITDALLSRLSQEMPKKRGRKPESDEAYNERLRKSFKAIKSFSISEINESLKSYMDEGTYIDISSYFRAMDERNDEYIQQANLFIRIENAYTEAKPFLNELRASNSSYNQDDDAIKYIKVLLDAYKSLQRFINPLVGSGEESSKDDMFYGEFMPIVEELKNLTPLYNKVRNWLTRKPYSDEKFKVNFDNSSFLSGWPQDYETKGGYIVEHNGLYYLFINEVKLDEAQVKFLCDHPDADNATRILLDFQKPDNKNIPRLFIRSKGENFAPAVEKYALPIASVLDIYDQGKFKTEYRSVNPDDYYRSLHKLIDYFKLGFTRHESYKHYSFQWKPTNEYKDISQFYHDVEVSCYQLKRVPINWNHLQELVIQGSVYLFQIYNKDFSTRSKGKGTPNLHTLYWRMLFDERNTKDLVYKLNGQAEIFFRRASIKPENQVIHQANQPIENKNPLRKAIKPNSTFSYKLTKNRRFTLDHFEFHAPITMNFKAPGITNINPLVIDKIRKSEITHVIGIDRGERHLLYLSLIDLKGNIIKQMTLNTITNKWAGGEIATDYQALLDQKEGDRLEARRNWKTIENIKELKEGYLSQAIHLIAQLIVENKAILVLEDLNTHFMHGRQKVEKQVYQQFEKQLITKLNYYVDKKKDADTAGGLLHALQLTNKFESFEKLGKQSGFLFYVPAWNTSKIDPVTGFVNLLNLHYETREKASLFFSKFKCISFNTEKNWFEFVMDYNEFTKKADGTRTNWTLCTFGERIETFRNPQANLQWDNRTINLTQAFNDLFQDYGIDIYGNLKNQICSQQKAKFFEQLLHLMKLMLQMRNSKKNSTSAEDDYILSPVADDNGVFYDSRSCSESLPRDADANGAYNIARKGLWIIKKIQASSADERLNLTITNKEWLNFVQTKQYLND

SEQ ID NO: 970 - protein, 1280 aa, unidentified
  REGION 1..1280: note = Cas Enzyme sequence
MKAFTNLYQVAKTLRFELIPDDRTKEFLEHSKLIDKDEHRAESYVAVKGIIDRYHKAFIERVLSELKLQYAKEDKLNSLEELYSLYMKTQKSDADKKMLEQVQSNLRKQIANALTKDNQYKRMSGKELIREDLFKITTPEERTLVEEFADFTTYFSGFYENRKNMYSAEAQSTAISYRLINENLPKFIDNIATFHKILNSPVAEQLPTLYKEMEEYLNVNSIEEMFMLDYYDVVLTQTQIEVYNGVIGGRTTDDGQKIQGINEYVNLFNQKQSSRETRLPKLKPLFKQILSDRQTVSWLTEEFKTDREMLAAIKERYDLLSSDVFPLLKELLQNLSSYDLNQIFIPNNLALTDISQSLYGDWGVIKREIMIRLKHDFPQTKKEKAEKYEERIEKTYKSFDSFSIAYLNEVLSEKSLDVCSYFATLGAVNNKDRQTENLFLQIKNAYHDAAELFEKDYPETKNLAQDKQSVDKLKVLMDAMKALQHFVKPLMETGEEPEKDERFYGDLSVLMEELNLVTPLYNKVRNRMTRKPYSNEKFKLTFNIKGNFLGGWVDSKTEKSDNGTQYGGYLFRKKNSIGEYDYYLGVSANTKLFRKVEGASGQYERLDYYQPKSQTVYGNSYVGKDGYESDKQTLMHSIISYVGTTNDMNVKQQVESKDTPSAMITVIKDASPLLYQGLLDDPYFSDVNRRVTNNLHQTILSMTRIPRSKDYQDAKFTLFTEPQQVIEDICKEKVFGYFAVDNQEIADAMADTSKPFLLFKISNKDLSFAEKFEKGMRHSRGTDNLHTMYFKALMNGEQSVLDIGSGEVFFRRASIKANITHPARIVIKNKNNANEKKESCFDYDLIKDKRYTVDKFGFHLSIIQNYQSPNRYDVNALTREYIRNNPDVHFIGIDRGERHLLYVSVINSRGQIVEQFSMNKIENEYNQTDYHQLLEQRSDIRQKERQSWRTIEGIKELKQGYLSQVVHRIATLMVKYKAVVVLEDLNMGFKRGRQMVESSVYQQFEKALIDKLNYLVDKQVDANEPGGLLRGLQFTNKFTSFREMGKQNGFLFYIPAWNTSKMDPVTGFVDLLHPRYENVDKARAFFCKFKSIQYNDEKGWYEFHLDYNDFNAKAEGTKTLWSVCSNGTRIETFRNVEKNSSWDNREVCLTEEFDKLFADFHISRTGNLKEQIAQQTEKSFFERLTHLLNLTLQMRNSMTGTTIDYLVSPVADEDGVFYDSRTCSKELPENADANGAYNIARKGLWVACQIREAQDANKVKLNISNKQWLLFAQTKPYLSD

SEQ ID NO: 971 - protein, 1281 aa, unidentified
  REGION 1..1281: note = Cas Enzyme sequence
MANSTLQKFTNLYQLSKTLRFELKPQGKTLENIVNNRLLEKDEKRADGYKILKKVIDEFHKYFINESLSNIKLSGLNDFVALYQVQKRDDIQKKEFEEIHKKLRKQIVEKFKNHELFSKLDKSELFKISKEKDLKYKGLLSKWIFNNENIKNRILEITELNNEEELLNVLSDFESFSTYFTGFHENRKNMYSDEDKSTAIAFRVIHQNLPKFIDNQRVFSKIVESPLKEQLPVLLKELEPIIQVNSIEEMFDVEFFSETANQLGIDQYNHLLGGFVADDDKVKIKGLNEYINLYNQKVKDKKDRLGKLKPLFKQILSDRNTASFLPEEFNDDAHLLESVEKLFQELNEEVFSMDNNLMTLPKLLKSLGEFDLNKIYLKNDLGLTDISQKVFGSWGVIQDAIKADFKRIYIGKHQPETEQFEAEQKKFMNKNDSYSIAYLNACILLLENKEYHKKIENYFSFLGNYNDQEQLNYFENIKEKYLAVEDVLKTYPENKDLAQDKNNVEKIKDLLDAIKNLQHFVKPLLGKGDEALKEDKFYGDFTQLWQTLDQITPLYNMVRNYVTKKPYSTEKIKLNFENSTLLDGWDANKEEANTSILFEKNGNYFLGIMDKNHNKIFRKIPKSISDNSYLKVNYKLLPGASKMLPKVFFSQKNISYYQPNDEILRIRNHGSHTKNGKPQEGYEKIAFDLKDCRAIIDFFKDSIFKHPEWKAFGFNFSNTNSYNSIDEFYREVEAQGYGITYTKIDNEYINQLVDEGKLYLFQIYNKDFSPYTKGTPNMHTMYWKMLFDEKNLKDVVYKLNGQAEIFYRKSSIKKEDRIIHKAHESIENKNEFNKKKESLFSYDIIKDKRYTVDKFQFHVPITLNFKASGSNNVNTIVNETIKENGIQHIIGIDRGERHLLYLSVIDMDGNIKEQYSLNEMVNEYNGNTYKTNYKSLLETKEGGRDDARKNWKTIETIKELKEGYLSQVIHKIAQLVVKYNAIVVLEDLNMGFMRGRQKVEKQVYQKFEKMLIDKFNYLVDKKKQPTELGGVLNALQLTNKFESFQKLGKQSGFLFYIPAWNTSKMDPVTGFVNLFYTKYENVEKSKAFFEKFKAIGFNKKENYFEFVVDNYTLFNAKAEDTKQNWTICTNAGRIETFRNKEKNSNWDNRTVVLTDEFIKLFNEFKINYSTIELRGAILSQNDKAFFERFMYLFKLTLQMRNSITNSEVDYLISPVANKNNEFYDSRNLKENLPKDADANGAFNIARKGLWALEQIKKAPDLKKIKLAISNKEWLNFVQTKN

SEQ ID NO: 972 - protein, 1281 aa, unidentified
  REGION 1..1281: note = Cas Enzyme sequence
MAENSIWAEMTNQYSLSKTLRFELKPSDKTEEFIEKNGLINEDEQRNKDFLYSKELLNEYYSHFIEKRLGEIQIDVGVLKDYFETYKEFNKLKQKGKEVDSKELKKAEARLLASQNHLRKALHRVFFMNKNISDKRDEKDIIAAVKYHADNGVVNEKVDRLNRFLIDKCTTYFTGFFNNRDNVFTSEEIPTSVFYRTINENLPFFVKNIQKYEKLKDIIPEKELITRENDLKKELGEFSVKEVFSIKYFNSCLNQKGIDKYNQILGGVKKENIQIKGLNELINELSQNKDKSIRKLKMTPLYKQILSKSESKSFKIDTIKNGKELNYKINEFYELVSTSNKDQKEALISLLEKLFKNERELDFDGIYVNSKGLRELSNKVFGDWYVIESALKQQYKSKILSTGKKEKDDSKKDKETSEWFKKTKQFSINDINSSLEAAQNDLITNKNKNIWAYFKRLENQKELNLITEINESFKDLESVQFGEDKELLNDSNEENVKKIKKALDSVQELLWFISPLMYDKPKEEVFDLNLDPEFYGQFNIIYEGVRQIVPLYNKTRNFIAQKPFNESKFKLNFENSTLLDGWDKNKEPDNWSILFRKDNNYYLGIIASGKGNNRIFEKIPEYKQGDCYEKMNYKLLPDPSKMLPKVFFADKNIEYYSPPKEILSIRNHSSFTKGGTPQEGFEKKEFNLKDCHKMIEFYKECISKHPEWNEFGFKFKKTSEYSDTSEFYKEVSDQGYKLTFQKVSTNYLDEMVNTGKLYLFNIWNKDFSKFSKGKPNLHTLYWKEIFSENNLKDVVYKLNGQAEIFYRKKSLSGKVTHLKNIPIKNKDSINGKETSVFKYDLIKDKRYYQNKYLFHCPITLNFKAKGSSFINNKINEFIIKNCNKINILGIDRGERNLLYCSLLNSNGKIILQKSFNVMQDKFGRNVDYYNKLDAKEKERDKSRKEWKNIENIKELKEGYLSQIIHEIAKIIIEHNAIVVLEDLNFGFKRGRFKFEKQVYQKFELKLIEKLNYLVFKDKNSTLAGGLLHAYQLTNEFDSFKKLGKQSGVLYYVGANYTSKIDPKTGFANLLHPSYENVEQSKEFFGKFDSIKFNKTEGLFEFDFDYSNFNKDSKLKKNQWKVFTNGERIINERTKNNTYESKKINLTDELKKLFEEEKIPFTETNNLKGHIISSNSKNLHKGLTNLLKYTLQLRNSNNKTNEDYILSCVKYDEKNFFDSRNAKESEPKDADANGAYNIGLKGLMLIEKMKEQSKKQRGEKQKYDLKISNEDYFNWVTNRNQS

SEQ ID NO: 973 - protein, 1281 aa, unidentified
  REGION 1..1281: note = Cas Enzyme sequence
MEEFTNLFSLSKTLRFELRPEGKTLEFINKNGLLVQDKHRAESYIKVKDIIDKYHKAFIENALRDFRLNYDDIEAYYSYYIIRKREETQKKQFAQVQSSLRKQIADCFKKNDSSRLFGKELIKEDLIEFVKTEEDRLMVKEFKDFTTYFTGFHENRKNMYSEEEKSTSIAYRLINENLPKFIDNISIFERVKTTEVTNDLKTLYSDMEEYLNVLSIDELFNLKYFTEVLTQTQIDVYNAIIGGKSFDDGRKIKGLNEYINLYNQNQKEKKNRLPKLKPLFKQILSDRNAISYIPDEFKSDNEVLSSIEKVYQDLNQEIFNKERIGEYSLKDLLLNIKSFELDKIYVRNELALTEISQKQLGKWDIVNKGIINYYITNNPKKVKEKQEKYDEKVKKYLKSFDSYSIQFINDCLEDKTKKIEDYFIQCKNKDDKNLFEQIETNYNAIKDLLNTDYPENKKLSQDKESVEKIKIFLDSIKELQWFIKPLLEKGEIAEKDERFYGEFSSMWKLLDDSITPLYNKVRNYITKKPYSQEKIQLFFQNKGQFLGGWVDSKTEHSDNGTQAGGYLFRKKNDIGEYDYYLGVSSDSKLFRNSDINNGKFERLDYYQPKSMSIYGNSYIGGNYNEDKLILIDCIKKYIEQISDSTIKQKINNEFLKIKEETPSLLLNTLKTISYNNYKELFEYEPFKDENKRVTKNLKDTILTLNRIPKSKQYYNIEFNSFVEAQKAIEELCKEKVFNYFLVSDNEMETLQNRLDNPLLLFKITNKDLSFAETYIEGKRKSRGIDNLHTMFFKLLMSGSQNTLDIGTGKVFYRKKSLNYSEEIYQKGHHYNTLKDKFHYPIISNKRYCYDKFQFHLSIFQNYQQPKSIITKDFNQNVNQYIKENKVKHIIGIDRGERHLLYLSLIDLKGNIIKQFSLNEIINEYKGGKYKTNYRDLLNKKEVDRDEARKNWQTIENIKELKEGYLSQVIHKISELMIEYNAIVVLEDLNSAFMRGRQKVEKQVYQKFEKMLIDKLNYLVDKKKDPNEKGGLLNAYQLTSKFESFQKLGKQSGFLFYVPAWNTSKIDPTTGFVNLFDTRYENREKTITFFDKFKRIEFNKAKDYFEFEFDYSKFTTKAEGTKTNWTICTNSTRIETFRNKDKNSQWDNKEIVLSQAFKDLFDKYMIEYKSNLKANILSQDRKEFFEELLHLLKLTLQMRNSKTGTDIDYLISPVANQKGVFYDSRVVNDTLPKNADANGAYNIARKGLWVINQIKETNDLKTLKLAISNKQWLSFVQNLIEK

SEQ ID NO: 974 - protein, 1281 aa, unidentified
  REGION 1..1281: note = Cas Enzyme sequence
MVKKFEDFTKLYSLSKTLRFEARPVGATLRNILESGLIQEDEHRAESYVKVKKLIDEYHKEFIDNALRGGCLPLKKADGKGSLEEYYAVYSAKEKGESEMKKLTAIQEDMRKKIVDAFKVDKDKFDGLFGSGLFVPHKVKDGDDKKEVEADLVTFINDVDESRLGGLSKEEALALVGEFKGFTTYFSGFWQNRENMYSSEEIATGIAYRLINENLPKFIDNMEVFKKIITIPEMQSNMSQLYSDMEECLNVGSIGEMFELGYYNILLTQKQIDVYNAIIGGKTDEDHGVKTKGINEYVNLYNQHHKDEKLPKLKTLFKQILSDRNSISWLPEEFEADQDLLNAVNDCLQGLSENVLGDKALKQMLCSLPEYDLDGVFVSNDLQLTEISQRMFGRWNAIQEAVVNDIKRSMPQKRKEAEEKYEERIADVFKRTGSFSIKYLNECLSKMAAGDDEAHAVDGYFANLGAIDTVAQQCENVFAKIANAYADVKQLLTSDYPEDKSLAQDKASVAKVKELLDSIKALQRFVKPLLGSGLEGNKDERFYGELSSLWDELDTATPLYNKVRNYMTRKPYSQKKIKLNFENSVLLGGWDANKERDYGSIILRRDGRYYLAIMNKENKKLLGKSLPSDGECYEKMVYKLLPGPNKMLPKVFFPKSDPYKYNPSERVLSIYKSGTFKKGGKNEDKFNREDLLCLIDFYKQKLEEHEDWSKFEFKFSDTSEYNDVSGFYREVEQQGYKLSFTNVSKAFIDNLVEEGKMYLFEIYNKDFSKYSKGTPNIHTLYWRALFDERNLADVVYKLNGEAELFYRKKSIDGSRPTHPANKPVANKNECNKKKESVFGYDLIKDRRYTVDKFQFHVPITMNFKSADSGDVNMQVKEYLQGADDVHVIGIDRGERHLLYLVVIDLHGNIKEQFSLNEIVNEHNGNTYRTNYHDLLDAKEKERLLARQSWQTIENIKELKEGYLSQVIHKITQLMVKYHAIVVLEDLNLGFMRGRQKVEKQVYQKFEKMLIDKLNYLVDKKSDAEVPGGLLNAFQLTGKFVSFQRLGKQSGFLFYIPAWNTSKIDPVTGFVNLLDTRYQNVEKAKSFFSKFDAIRFDGANGWFEFLLDYDRFGAKADGCRTKWVVCTHGKRICTYRNPSKNSQWDNEEVDLTAEFKKLFEKYGIDINGNLKDAISSQTEKDFFENMMRLMKLTLQMRNSITGSEIDYLVSPVADEDGNFYDSRSCDATLPKNADANGAYNIARKGLMLISQIKEADDLKQVKFDITNKSWLCFAQQKPYADE

SEQ ID NO: 975 - protein, 1281 aa, unidentified
  REGION 1..1281: note = Cas Enzyme sequence
MYKNFVGLYKLSKTLRFELKPIGATLENLKKSGALERDFVRSEKYRMMKDILDLQHKALLERTLSSVDNYTRCLGEQERKKYASILGDNGVLNWEALANAFEDFRTSAKDKEAREKLESVCSNYRTLIAEIIKSDDRYKCLAASTPKDFIKEFLANKEGGDAAEKLAAETFNGFACYFTGFQENRANIYSDKAQKTSAANRAINENFPRYLKCCSLYDYVEKNYPDVITEAELALGEKVKEFSVSKCLVIGRYSNCLSQYGIEKINTLIGIFNQQINLKKQSDEMARQDKKLGQMPVLYKQILSDRESASFSIEKFEADADVLSSIKIFGKFLEDNNVLTKLRNLIATVRIDDTIFVKRESLSEISNNLYGDWHVLSAAIERVAAEKFSNITAKGQREKAIKQWISRNEYPLTDFVDALRYDEESNDWAKIDICDYWKNEKAKDLFELVVSSWKALLPTLDTDEKIGIRDRENDVKAIKEYLDSVLNVIRLVKPLSVGTELERDTDFYGQFDELYDILDDVVPLYNQVRNYITSKPSEEKKLKLMFDSPTLAEGWSTTKEKDYKCLLFEREGLYYLGIINSSSKESKKIDFSKLSCGEDKCSYKKMVYRQIQSAANYFSIKQIKPQNPPSYILKWLSSGFDKKTLSRQQLTKLISYVIDDFIPNYKMLNDENGSPYYSFSFKEASQYESWKEFTDHIDSMCLYSIGFENIPVQIIDSLVERGVLYLFKLNNKDFSRSSVGRENLHTIYWRMVFAEDNLNDVVFKLNGGAELFYRRASIKNPYIHKLGKKLVNRIDRDGKRIPDVAFGQLVKFADGEIAIDELSGVAKDLYSAGKVVMKDVKHEIIKDRRFAEDKFFFHVPITINAKANKKASRFNDFVNDAVRNFEDVNIIGIDRGERHLLYVTVIDSKGKILEQRSFNTIDIDRYDGKRIDVDYHAKLDQMEKDRDKARKSWSEIGKIKDLKSGYLSMVVHEIAKLMVKYNAIVVLEDLNGGFKRGRSAIEKQVYQKFEKAMIDKLNYLVFKDSEPLSLGGALRGYQLADKFESFEKLGKQTGFIYYVPAAYTSKIDPTTGFTNIFDFKKCTSAEGIKRFFNLFDSIKYSETDKAFIFAFDYNKFDTRFPSWNSKWEVYSASRRLAYSKDQKVDVEINPTNAIIEALTKRCVAIKDGFDLGLYMKELDATRENAGLFKSVFYAFERTLQMRNSSAKTGEDYIESPVKNSSGGFFDSRKCVNELPENADANGAYHIALKGLLMVNELKTNETPKLTIKNEDWLEFVQRRHV

SEQ ID NO: 976 - protein, 1281 aa, unidentified
  REGION 1..1281: note = Cas Enzyme sequence
MNLDSFTRKYKLAKTLRFELRPVGRTLETFKEQFFEGDKRRAEDYPIVKELLDGEHKALLERALSNPPSDLDWTALAQAHEDYRTSDKSKEAKDALAAKQAEFRKKIVALFKKDDAFSNLTAPTPKDIFAAMRQRYEDAGEEVPEALVTFSRFAGFFKGYQENRRNIYSDEAQATSAANRAVNENFPKFLEDVRIFRHIADAYPAILSGAEKELAPLLKGRTLASLFDPAAYGSFLSQSNIDFFNSVLGGFVPEEGEKTRGINEFVNLYRQQHEDARTDRSLSALHSLYKQILSDRETRSLVPRALETDEDVLVSLRAMLEERLLGLATESGRVNVLDDLQALLSKIPAADDIWIDGAEISRVSMNLLGSWNALGSLMESAAEVRFASESTEKKRLSAIDKWMKRSVYALSELADLRQETDTGSVIVDVSKLWKGPAAAQRFDAARAAVAAALPLLSSPIPENGPKLRERKDDVEIIKAALDAVLDVLHFVKPLHAGEGLDRDEAFYSAFDPLYTALDGFVPLYNKVRNYLTKKPGETERIKLMFDNPTLADGWDQNKEKDNTCVLFFRDGLYYLGVMNPEEKTDFSKLSGPKTPGCYRKMVYKLLPGPNKMLPKVFFSKKGLELFHPSANLLERYHAGAYKKGPSFDLAFCRRLIDFYKASIAAHPDWSKFGFRFSPTSSYNGIDEFYREVSEQGYRISFENIPVETVDRLVEEGKLCLFQLWNKDFSRASTGRPNLHTQYWNAVFAPENLQDVVIKLNGEAELFYRPRSIKEHVFRHKVGEKMVNRRGADGSPMPESVHGELFRHFNGSPEPLSDEARAWIESGNLVVKDVTHEIVKDRRYTEDKFSFHVPLTINFKQPDAPARFNEQVRDFLRGNPDVNVIGIDRGERNLIYLTLVDRQGNLLEQRSFNVVSRTRRDGVEMRTDYQSKLAQAEKDRAAARLTWSEIGAIKDLKEGYLSAVVHEIAKMMVERNAIVVLEDLNFGFKRGRFRIERQVYQKFEKALIDKLNYLVFKDRGLAEPGGTLRGYQLTDAFESFERIGKQTGFLFYVPAGYTSKIDPTTGFTNLFNTKRCTNAAGIRDFFAAFDSIRWDAARRAFAFAFDYRNFKTSQESHRTAWTVYSANRRLVFDKDARTEKEIDPTAILLDALKKHGVSVTDGFDLKALLADTEPSKANAGFFRNVFYAFDRTLQMRNSRAGEDYIESPVLNGRGEFFDSRKADATLPKDADANGAYHIALKGVQLLEENIAENRTANGSADLKIEHKDWFRFAQELAARKFK

SEQ ID NO: 977 - protein, 1282 aa, unidentified
  REGION 1..1282: note = Cas Enzyme sequence
MSSIYNKFTNIYSLSKTLRFELKPVGNTEKMLEENHVFSIDKEREEAYIKTKPYLDRLHRTFIKEALEGQKLTGLEEYSVIYSKYQQDKKDKVVQKTLEGKQKELRKQIGFFFNLKAVEWSTKRFVHLELKKPKDVNQLLSEEQVFKILKELYGDEEASLLTNPETGEISSIFDGWKGFTGYFNKFFETRRNFYKDDGTSTAVSTRIIDQNLDQFLSNLSLWEGKIKDVIDITEVQKELELEATEVFSVDFYNNCMLQEGIDRYNEFLGGKVNENGEKIRGINEIINEYRQKNKDKRLPFLRMLDKQILSEKEKFIDEIESDEEFLERLKEFYNAVEVKYDTLKELLTDFFNHQEKYNLSEIYISKPAYNTISRMWTNNTVDWDLKLHDVLKENKELASSSKKEEITENFKDFISLEYIKKSLESLDNPTKFWKERYYEGEVLTANKEVSIWDEFIKIFRYEFESLFNRTEQKEESKTLVEQGYDIFREELKNLFKDFKVNRDSKSVIKNYADEVLKIYQMSKYFAVEKKRTWREEYALDSQFYNHNNYGYKDKYYEGAYEQIVQPYNKIRNFLTKKPYSENKWKLNFENPTLADGWDKNKEQDNTTVILKKGDEYYLGIMAKNHNKLFSEENRSKYSCQGNDDYYEKLVYKQMADPKRDFPKGVFSEKGLQIYNPPQNVYEIKKKETFKTDNPHFAKSDLWTLVDFYKECIPLHPSWKLFDFNFSDTREYENINDFYKEVSDKSYKIWFENIKEDYIDSCNNGGKLYLFQIYNKDFSKYSKGRKNLHTKYFEEIFSKNNIENNFPVKLNGQAEIFFRPSTDIKKLDVKKDKKGKEIVDKKRYAESKVLFHVPITLNRVATNTSSSKEFNTQINTLLADNPNVNIIGLDRGEKHLIYYSVINQSGKILKTDTFNIIGGVDYHAKLTERAEDRKKGRQDWNEIETIKDLKRGYISQVVKEIVNLCIEYNAIIVMEDLNMRFKQIRGGIEKSVYQQLEKALIEKLNYLVDKKETDPKKAGHLLNAYQLTAPFQTFQEMGKQTGIIFYTQAAYTSQVDPLSGWRKNIYLRYSNAKKAKEDILKFSSIKYNEGEKRFEFTYNIEQFSNSKNRKDLPNKREWTVCSNVERFRWNKTKNNNKGDYEHYTDITTNLIELFDKYNINYKGNILEEITGFETNGNEVFFRDLVFYFNLICQIRNTQRDKEGDEHDFILSPVEPFFDSRRASEFGGGPNNGDENGAYNIARKGILILRKISDFYATYKSLEGLQWKDLYISAHDWDNFLVEE

SEQ ID NO: 978 - protein, 1282 aa, unidentified
  REGION 1..1282: note = Cas Enzyme sequence
MKDLNQFIGKYKVEKTLRFELASIGKTEAWMESKGVIANDKRRADNYTIVKSLIDRYHKVCIRESLTGCDLNWTRLCEAVETYRRCQDTESRKALLKCQDEYRTEITKRFLSFEDFAELTAPSPSALIKDTLPHHVTNKVHPEFSDVDDVDNAKQALSLFEGFAMYFESYQKNRSNLYTAKNIASSVAHRIVHDNFSKFLANIKVFENLRVIYPEIIEQCSNELRQHLKGKQLEEVFRVESFNNVLTQEGIDFYNTIIGGVSGQEGEKKIQGINELVNLTLQKENQGRGKRTALTMVPLFKQILSDRNTYSYIPERINDEEELISVLRAFHAHLASFYLNGREVNVMEELLKIVENINHFDPNGIFVEAKKLNGISKKLYDDLFELRAKMTSRLEEQKLAKKSIEKFFQKDAFSITELSLDKKHNLVKYFTGLKGVLKAIDQKWEQFETRNNKDGQKKYKDSHTGIELIKNLLDGYKEFFAVCSLLDVDSENDLDNNFYGIFTPLLTELRGIIPLYNQARNFLSQKPSDEKKYLLKFDNSKCSDGWDAPQTKSVLIFRRQGKFLLGVADSENRSCLNDLSSYTPISPDDQIDFLDYSQGGHMGQNLLTLVVRDGKTVMVKGRKENGENPGLERQLKELLPPDIYRIRKSQSYKNESPNFSKEDLQLFVDYYKQRAKEYYSHFSFTFKNSCDYASFTELVEDIDEKAYQIKFVPTSQKTLQRLVNEGKLYLFDIKNKDYESGAHGKKNLHTLYWEQLFSQENLENLTIKLNAKSTLFCRPQVVANPKTHKKGSMLLNRKDKNGQPIPESIYQQLYKYVNGKMTEAKMSDEAKGYLDKIVAKEALYAITKDKRYTKQKYFIHFSTTLNANAPKTADINKEVLDYIKDNTDVNIIGIDRGERNLLYVTLINQKGEILDQKSLNIINGFDYHAKLEQREKERDEAQRSWQTIGNITDLKEGYLSAAIHEITTMMIENNAIIVLEDLNRGFKRGRFKFEKQVYQMFEKKLIEKLNYLCSKDYSPTADGGVLRGYQLTEKFVSFEKMTKQNGILFYVRPDYTSAIDPVTGFVSHFNFRDITNTKGRKDFFEKMESITYKNGYFEFTFDYRKYKPKVKDFKNIWTVCSSGKRVLWSKETKEYTDYYPTTAISGAFAGRGITLDEGTDVKALLSGIDDSISNADFYRIMFEAFKRIVQLRNTNSNTGEDYIHSPAIQDDKQYCSLDELRKWKDNGESSIPSLPIDADANGAYHIALKGLYLMLNPQAKQIENEKWFRFVVEKPFKEEKVM

SEQ ID NO: 979 - protein, 1282 aa, unidentified
  REGION 1..1282: note = Cas Enzyme sequence
MSLDQFTHQYPVSKTLRFELKPVGETAEYIEDFKSQYLKDIVAQDEKRAADYNVIKEIIDDYHRDYIEEKLTNPCDLDTGELYITEDDFGNAFSFFENFRNNPKDKKAKKSWIDTQASLRKKLVKSFKGNSRLFSKELIKEDLKNWLEEKGEWVEKKEVVENFKNFTTYFTGFHENRKNMYSADDKSTAISFRLMNENLPRFFVNCLQFQKMIQKYPEIDFPIERDIFNKLRIEKVDDVFQPSFFTHFFTQYGIEMFNELLGGKTEEDGRKVQGINEQINLYRQKHSIKPKVLPNLTILYKQILSDVESHSFIPEQFENDKELLNSLKVLLTEIDVKNGTLSKLESAVEKLQECDIHKTYMKGGLNIADISQNLFGNYTILKNAIYHNVSQNIFQTPKSGKVSDALEHKRRNYINNHVAYSLGELENFLITYQNSLDNDHEDKSLIVEVFKDNHPICKWYLNKIESVKMDTKNPLKQAIENVKPLLELDELRKGKKGKEQKQIIQKLLDSILAIVHAVKPLHLVKGRKPLDIPDVDLGFYSDFSQAFESYEKMVVGLYNKVRNHLTKKSFLNDKIKINFNNPTFLFGWDINKARGNNANILRKDGLYYLAIMHPDHYDLFDRTFNDEEGIFERINYKLVSGINKMLPKVFFSKKGMQKFEPPQHILDIYYSGKHKKGNSFDLESCHQLIDWFKGNVGKYKVNPQDEYGWNVFNFKFSPTVSYPDISYFYKEIENQAYKIWFSNIPENYINESIEEGKLFLFQIYNKDFSLFSKGTPNLHTLYWKALFDPENLKNVVAKLNGEAEMFYRKHSIKRKDRTIHPANKSITNKNENNPKSESNFEYDLIKDRRYTVDKFHFHVPITLNFKAQGVTRFNDQINLMLKNTEGTHIIGIDRGERHLLYYTVINQKGEIVEQGSFNTIKTDLNYEVDYRDKLDKKEKERDEARKSWTTVENIKELKAGYLSHIIHQLALLVRKYNAIVCLEDLNFGFKRGRFKVEKQVYQKFEKALIDKLNYLVFKDANFGESGHCLNAYQLTAPFESFNKLGKQTGILYYVQAAYTSKIDPATGFMNFLYTRYESLAKSKTFFETMDSIKFNREKSYFEFSFDYSKMTPQRELKGYKTKWTLCTFGDLRYKNICNSQGHWESVPVNVTKELKALFDDYNIDYRNGDDLRTSIVLVKETKFYKKLYKLLSVTVSLRQSKTGTDEDFILSPVADDNANFFDSRNATDSLPKDADANGAYHIALKGLWNIQKIKEWDGEKSPDLYMTNADWFSFAYQKPFKR

SEQ ID NO: 980 - protein, 1282 aa, unidentified
  REGION 1..1282: note = Cas Enzyme sequence
YRNKKEENLTPLENKLRSIFSDAYIETSKNWKKNENTLKEKGFKILTEKNILNYVEKNIENFSKIEEIEKIKNALNCFKDFFTYFTGFNQNRENYYETKDKKSTAIATRVIHDNLPKFCDNIIEFEKREDDYLNIYNIIKKEGVSLVKKDKTTIYPINKEIFKIKHYNKCLSQDEIEKYNEEVGNANSLINLYNQLNNKNKDFKRLQPLKTLYKQIGCGKKNNSFLVIDCDKKNNNNSLVSLEEILWFINDAGNKVFKERKDEIGIKSVPAFLKYIKSRGNYNGVYWSKAALNTVSNKYFANWYYLTDKLKEAGVFKATKKGSEDSVKIPDAIELEGFFNVINKEEKNLSFKESILENKGKIINESKNTSDALLNLIFNDIEENINLFLNISPDILEHKNFNDKELIKKWLDSSIAIIQMLKYFLVKEDKIREGNPIDSTITEALEFIINGEFNWFGWYDAIRNYLTKKKQDNINKLKLNFLNSGLASGWDINKESDNLCVMLKDQEENLYLGVINKEKKTIFEKTFIDGKGKNKKIIENDLYKINGGEIWQKMEYNFWPQAFKAIPKCSTQKKEVIEHFKNSNNDFIFPIGYKVNSGEKFEEECIITKEIFELNNKGYKKSNTNINTLMCYDSNIKKSEYIKKFQKEYWEILFKKNNPDKKEINKEWINFCKKDYSELKDYEKSYKDALIKWIDFCKYFLSKYPKTKLFTYILKDSKDYNSLNEFYNDIDKCSYGLNFDTKINKYKLDKLIDEGSLYLFQIKNQDYNKNKKPNHKDNLHTIYWKAVFEEIKNRPKLNGGAEIFYRKALSKEKLEKIKNKKNKEIIKNFRFSKDKFIFHISITLNFCQKNITINNKVNDFLKQNQDVYFLGIDRGENHLAYYSLINSKGEIINQDTLNLPFTDKDGKPRVIEVQKRINEHKFETVKCKNYNDLLDTRAGNRNYARKNWQTIETIKDLKNGYISKVIHEIVNIATNKDKFTFIVLENLNIGFKRGRQKIEKSVYQNLELALAKKLNFLVDKNTTLGNLGSVTNAIQLTPPVNNFGDIEGKKQFGNMLYIKADYTSQTDPITGWTKTIYIKKGSEKSIKEEIKKHFTNIFHDGKNYYFEYTDSFNIKWKLYSGLDRYYRKNKEGNWISTKEDTTEMLDKIFKNVDKSKSIYNQIMNENVKLEKINEHPAWESLRFAIHLIQQIRNQDNENNDFILSPVRDKNGKHFDSRKARENEPNCGDANGAFNIARKGIIVSEHIKRGIKELYIKDDEWRAWLAGKQIWEEWLDKEYNESK

SEQ ID NO: 981 - protein, 1282 aa, unidentified
  REGION 1..1282: note = Cas Enzyme sequence
MKDLNQFIGKYKVEKTLRFELAPIGKTEAWMESKGVIANDKRRADNYAIVKSLIDRYHKVCIRESLTSCNLNWTRLSEAVETYRRCQDTESRKALLKCQDEYRTEIAKRFLSFEDFAELTAPSPSVLMKDTLPHHVANKVHPEFSDIDNVDNAKQALSLFEGFAIYFESYQKSRSNLYTAKNIASSVAHRIVNDNFSKFLANIKVFENLRVIYPEIIEQCSNELRQHLKGKQLEEVFRVESFNNMLTQEGIDFYNTIIGGVSGQEGEKKIQGINELVNLTLQKENQGRGKRTALTMVPLFKQILSDRNTYSYIPERINDEEELISVLRAFHAHLASFYLNGREVNVMEELLKIVENINHFDPNGIFVDAKKLNGISKKLYDDIFELRAKMTSRLEEQKLSKKSIEKFFQKDAFSITELSLDKKHSLVKYFTGLKGVLKAIDQKWEQFETRNNKDGQKKYKDSHTGIELIKNLLDGYKEFFAVCSVLDVDSENALDNNFYGIFTPLFTELRGIIPLYNQVRNFLSQKPSDEKKYLLKFDNSKCSDGWDAPQTKSVLIFRRQGKFLLGVVDSENRSCLNDLSSYTPVSSDDQIDFLDYSQGGHMGQNLLTLVVRDGKTVMVKGRKENGENPGLERQLKELLPPNIYRIRKSQSYKNESPNFSKEDLLLFVDYYKQRAKEYYSHFGFTFKNSCDYASFTELVEDIDEKAYQIKFVPTSQKTLQRLVNEGKLYLFDIKNKDYEPGVHGNKNLHTLYWEQLFSQENLENLTIKLNAKSTLFCRPQVVANPKTHKKGSMLLNRKDKNGQPIPESIYQQLYKYVNGKMAEAKMSDEAKGYLDKIVAKEAQYAITKDKRYTKQKYFIHFSTTLNANAPKTADINKDVLDYIKDNPDVNIIGIDRGERNLLYVTLINQKGEILDQKSLNIINGFDYHAKLEQREKERDEAQRSWQSVGNITDLKEGYLSAAIHEITTMMIENNAIIVLEDLNRGFKRGRFKFEKQVYQMFEKKLIEKLNYLCSKDIKPTANGGVLRGYQLTEKFVSFEKMTKQNGILFYVRPDYTSAIDPMTGFVSHFNFKDITNTKGRKDFFENMESITYKNGYFEFTFDYRKYKPKVKDFKNIWTVCSSGKRVLWNKETKEHTDYYPTTAISEAFAGRGITLDEGADVKALLSGIDDSISNADFYRILFEAFKRIVQLRNTNSNTGEDYIHSPAIQDGKQYCSLDELRKWKDTGESSIPSLPIDADANGAYHIALKGLYLMLNPQAKQIENEKWFRFVVEKPFKEEKVM

SEQ ID NO: 982 - protein, 1283 aa, unidentified
  REGION 1..1283: note = Cas Enzyme sequence
MNRFINKYSLSKTLRFELEPIGKTIENIQNKGLLIKDEQLAESYKKMKKTIDGFHKYFIELAMQNVRLTKLEAFADLYFASPERKKDEKFKEELKKVQDELRKEIAHGFKTGAAKEIFSKLDKKELITQLLENWINTQPEKPYFDESFKTFTTYFGGFFENRKNIYSDKEQSTAIAYRMIHENLPKFLDNIRVFGQIKNIPELYENANLLFQEIKNDLNINSIDEAFELKYFNEVLTQKQIDLYNLIIGGRVPEEGKSKIRGLNEYVNLYNQKQKDKSKKVPKFKMLYKQILSDREKTSFVPEKFQSSEEVTSAINSFYHCNVISFQPKDKPDAENILEKIQDLLAALKDYDLNKIYLRNDSQLTFISQKIFGNYAVLGDALNFYYDNVMHPGYEMEYKSANERKKKKLEEEKQAFIQQDYLSIGQLQDALDKYIPEIDDSVDWKRNYTTSCIADYFKNHFNAEKKEGEEKEFTLPANISAKYSCVKGLLENYPKDRELYQDKKAIDNIKLFLDALLELLHFIKPLILRADIALEKDAAFYGQLEPWYDSLKELIPLYNKVRNYATQKPYSIEKFKLNFENSTLLDGWDVNKEKDNSGVLFIKDGHYYLGIMDKKHNKIFRDIPKATSERTYRKINYKLLPGASKMLPKVFFSDKNTSYFSPDEEIQRIRNHGTHTKNGDPQEGYEKLDFNLNDCHKMIDFFKSSIQKHKDWKNFGFRFSPTYTYDSIDAFYREVEAQGYNITFTEIDESIIDRFVEEGKLYLFRIHNKDFSPFSKGRPNLHTLYWKAIFSPENLKNVIYKLNGQAEVFYRRKSIQPEQMVIHKSGEAIDNKNPLTGKKQSTFHYDLIKDKRYTVDKFQFHVPITLNFKASESNIINYEVLQYLRTQPDVHIIGLDRGERNLIYLSLINQKGELLYQEPLNALKSDKFNVVTNYQELLARREKERDMARKSWGTIENIKELKEGYLSGVVNKIATLMVKHNAILVMEDLNTGFKRGRFKIERQVYQKLEKMLIDKLNYLVFKDKSEDEPGGLFKALQLTNKFKSFKEIGKQNGFIFYVPAWNTSKIDPTTGFVNLFYIHYENMEKARAFFGKFQSISYNHDKGYFEFAFDYNDFTTKAEGCRTNWTVCTHGDRIRAFRNPEKNHQWDYKTIHITEEFMALFRKYGIEFSGNKDLREIITGQKDAAFYKSLLDLFRLTLQMRNTNQDWDYLISPVLNENGEFYDSRKADNHLPQDADANGAFHIAKKGLMWLKQIQQFEGDNWKKLDLDKTNKGWLRFAQGYQF

SEQ ID NO: 983 - protein, 1283 aa, unidentified
  REGION 1..1283: note = Cas Enzyme sequence
MSNLNTFISPEFTGKIKMTKSLKVSMIPIGETEHWIAKHKVFEKDRELFDKNLKARPILDEFIKYTVSRALPNLLFDFEAYYLVKKDRTKARAFEKELAKTVTDLILKEMDELKSASLIDSADFVKTTLKKFAGTHDIPGLSRIEAIESLEAASKLTALNGKFNTSRIAIINTLIPKRIIENFDIYLSNMEKIRNVYESGEFGFLFERYPDTLLFMEPANYRTVCSPEAIEDYNRFISGYGDSTESWIKGFNQELSEASNSSKSSNGGVRRYSLIKPLHKQHLFETKKFFTFASISSDDDVRELINSVKGSTEDACLNALAFFSSSDPKTLFVKGSYLHTLSAFLYGSANSYILPERIKEGEKARLTAEYDSVAKKTKAVTTRYNVAMNNISKKINEKIFSLADIDAYCCDISKRRSVREILLGIMQEMYAAVYGENGKWSNIEAEAVLDSKTKIWKAKNGAVAKAVNDYLTAILEIRKFIRPFALRMEELEELGLDTSSALDAGEITNTLFEAVRAQKLVHAYLTRNDADIALSTQVYFGGTQKAAASWWNYETGDIQNRQIALAKKDGMYYFIGTFDERGSYSIEPASPGEDYYEMLDVKKGQDANKQIKKVLFSNKAIREHFADSSNDYVITTKVNSPITVRREIFDKYQAGEFKLTSQKIRKGDLVGEKEMTYYREYMDLLFQMAKGYTEYSRFNMDTLLPIEEYDTENDLLDDVNTNTIDYRWVRISAACIDDGVRNGDIFVFRAQTSSMYGKRENKKGYTGLFLELVSDENLLVTRGMSLNSAMSIYYRAKVHDAITVHKKGDVLVNKFTNARERIPENSYKAICAFYNSGKSIEELTIEDRDWLAKATTRICSGEIIKDRRYTKNQYSISISYNINRSVNNRKRVDLATIVDDTASAGRIISVTRGTKDLVYYTVIDDGGSVIEARSLNVINGINYAKMLAQISEERHDSNANFDIPKRVETIKEAYCAFAVHEIISAALKHNALIVVELISDAIKDKYSLLDNQVFLKFENVLKNCLMSVKVKGARGMEPGSISNPLQLCNADDKSFRNGILYQIPSSYINICPVTGYADIIDYYNIVSAGDIRNFFVRFENIVYNKEKARFEFSFDLKNIPIKLEKCPDRTKWTVLGRGEITTYDPLTKSNHYVFDAAQMLAETVSKEGLDPCANIVEHIDELSAATLKKMFNTFRNIAKGIVSECDEVPVSYYKSPVIDEADIKNKSLDNKSISEIKCYNLDEKARYYLALAKSSSDGENKNRYVSSTAIEWLNYIQEKRTHE

SEQ ID NO: 984 - protein, 1283 aa, unidentified
  REGION 1..1283: note = Cas Enzyme sequence
MSNVFEKFTNQYSLSKTLRFELKPVGKDILKADCNDEDKKFFRENEEKLTSTLFNLRKNAKYDKNLQTFLKDQEIEDSYQILKPVFDKIHEEFITKSLESDEAKKIDFSEYYKLYKQQKEEKDKDEKKKLDKLIQDEEKKLREKFGEFYKIAGDEFKNNAGKDNKKKDILKEKSFNVLTEVGILIYLKNKLKDGQNYFDDLKLPEVKILVENNKTNKEKINKALEKINKFFTYFGGFNQNRENYYSIDEKTTAVASRVIDENLPKFFDNIIEFGKRKDEYLNVFQFLQKMEITLKDKNGNDLLSISEDIFEISYFSKCLSQKEIDEYNKKIGNANFVVNLYNQQKSTEQNFKKMQKFKILYKQIGCGEKKEFLKVIKDNNELNTALLKAKTFGERYFINDRGKDTVKTFIDYLLTLDNFENIYWSDKAINTISGKYFGNWSNLKEKMLKTKVFNKDKNTGEAKIPQAIQLSDLFEVLDEEKDWKEKGVLFRENFKENNEEKQKIIKNVVTPHEALLKMICEDIEVLVNNFVNGIDTIFKIEEKNYLKDENKEKIKAWLDNALFVNQILKYWKVKPRYSSFYDEQELTKISEIIEDYDIIRNYLTKKPQDDIRENRLKLNFENGSLLGGWSDGQEKVKSAVILQKEDKYYLGILKQRNIFDTSNKENNSIYQNTDNIFKRLFLKNLPYKTLAGRGFVSEFGKKYSDMAKENPQKAIESLKKIIANRYVVEYPLLQKILDKEYGNDKKIFDAETQEVLKDSYVCEFSPVNSKVVNENIDNGNMYLFEIKCNPNKIQWNYWKNILSKKSPHQLAGQGEIFYRPAGLENKIKKGYERKSWVIENKRYTEEKFLYHQATKRNYKFPSYSKITSLINENVIDNKNQLFLGIDRGEKHLAYYSLINLKGKILEQGSFNKIFNGNIEFDYADKLEKIAGERDEARKNWTTIGNIKDLKDGYISQVIRKIVDLVIYNEGDRKKGFREAPAFIVLEDLNIGFKRGRQKIEKQVYQKLELALAKKLNFLVDKHAKNNEIGSTENALQLTPLVRDFGDIKGKQFGLMLYTNPSFTSTTDPTTGWHKSISIKKGSEKYIKDQIMKFFDDFGFDGKDYYFKYRDVNTNKPWILYSGYNGNELDRFKDKFSEKEGQKHWNPEKIEIVKNLKNIFNDFDEKKSFKKQIEENKELNKIEKDRTAWESLRFIIEVIQQIRNTGTEEKDNDFILSPVRDEINFKHFDSRMIKENEKLPQNGDANGAYNIAKKGIIMFERIKEKPEKPNLFIKNQEWDKFTQK

SEQ ID NO: 985 - protein, 1283 aa, unidentified
  REGION 1..1283: note = Cas Enzyme sequence
MNNSIWNEMTNKYSLSKTLRFELKPIGKTEEFIEKNGLIIEDEQRNRDFLYGKELLNEYYSYLIEKRLGEIKIDLGILKDYYEKYKNFSKLKQKGKVVDSKELKKSEIELIDIQNHLRKALHKVFFFDKNLSDKRDEKDIIAAVKYHVENGLVKEKSDRLNNFITNRCTTYFTGFFNNRDNVFTSDEIPASVFYRTINENLPFFIKNIEKFEKLKNLIPENEFIALEKNLKNELGEFSVKEVFSIKYFNNCLNQKGIDKYDQIMGGIKKETIQIKGFNGLINEFSQKGDKNIRKLRMTVLYKQILSKSDSKSFKIESIKNGKELKDIINGFYDSICSLNKDLDESIIISLENLLKADKDLDLSGIYINSKKLKDISNKVFGDWYLIESALKQQYKSQIKSKGKKEKTESKKDEETEEWFKKLKQFSISEINSSLSNIENDLVTKENNTIWTYFSTFEDSNGKNLVNEIKNSFKELKTIQFGEDKELLNDDNEENVRKIKKALDSVQELFWFISPLMYDKPKEEVFDLDLDAGFYEKFNVIYEGLRQIIPLYNKTRNFIAQKPFNVSKFKLNFENSTLLNGWDRNKEADNWSILFRKDDNYYLGIIASGKGNNKIFEKIPEYKEGDYYEKMNYILWSNPSRMLPKVFFANTNFDLYNPSEEILNIRKNSSFTKNGEAQKGFDKNEFNLNDCHKMIDFYKNCFNKHPRWSNFGLVFKNTKDYLDISEFYKDVADQIYQLSFQKVSSKFVDELVNEGKLYLFKIWSKDFSEYSTGKPNLHTMYWRELFSDNNLNNVVYKLNGQAEIFFRKKSLPIKITHPKNINIKNKDPIKDKENSVFKYDLIKDKRYTENKYLFHCPITMNFKAKGNSFINNEINEFILKNHNKINILGIDRGERNLLYCSLLDPSGKILFQKSFNVMPDKFGRDVKYYDKLDAKEKERDKARKEWKNIKNIKELKEGYLSQIIHEIAKLVIRYNAIVILEDLNFGFKRGRFKFEKQVYQKFELKLIEKLNYLAFKDKKPTETGGLLHAYQLTNEFESFKKLGKQSGILYYVGASYTSKIDPKTGFVNLLHPNYENLNKSKEFFEKFDSIKFNKNEDMFEFDFKYSNFNKESKLEKDQWEIFTNKERIIHERTSNNNYSPKNINLTEEIKKLFDNERIPFADGINLKEYIISSDSKNLHKGLINLLKYTLQLRNSNSETGEDYILSCVKYDKKNFFDSRNAKENEPKDADANGAYNIGLKGLMLIEKIITQNNNKKQINEKQKYDFKMSNEEYFNWVIRRNLTK

SEQ ID NO: 986 - protein, 1283 aa, unidentified
  REGION 1..1283: note = Cas Enzyme sequence
MEQFTNLYQVSKTLRFELVPDERTKVFLENSDLIAEDEHRAESYKLVKKIIDRYHKAFIENILSSLTLQCESDNRQNSLEEFCELYHIAQKTDADKKSIERVQEQLRKQIVGALTKDARFKRIDKKELIREDLMQIITPDEKALIDEFRDFTTYFTGFHENRKNMYSHEAKSTAIAYRIIHENLPKFIDNIETFNKIASSPVAENLSLLYNDMKECLNVNRIDEMFSLDYFSEVMTQSQIEVYNAIIGGKTLNDGTKIQGINEYVNLYNQKQARENRLPKLKPLFKQILSDREAVSWLPEEFNTDAELLKTVNDFYSNLHDSVFSDLRELLENISNYNLAGIFIPNDKTLTDISQSLYGDWGLINRAITEDVKSSVPQKRNETFENYDDRISKIIKRQDYFSIDYLNRLLAGKDTNICSHFETLGAVNTETKQTENLFAQIFNAFTEAKDLLSTPYPCEKNLAQDKVNVAKLKTLLDAIKDLQHYVKPLVSAAEAPDKDERFYGDIAVIWEELDVITPLYNKVRNRMTRKPYSLEKFKLTFNIKGNFLGGWVDSKTDKSDNGTQYGGYLFRKKNLIGEYDYFIGMSSNKKLFRPNPNASGQYERLDYYQPKSQTIYGNSYAGKEGYEHDKQELITAIVSFLENKHHEELLQQIRTVQTPSAMMNIIQSNSDIFNQLLKDKFFAAINKKVTDNLHKTIIGLNRVSSASDYKNEKFAIFTEPQQIIDEICNEKIFNYFVVDDNEIDNAMNDYSKPFLFFKISNKDLSYSESSAKGHRKSRGIDNLHTLYFKSLMSGNQSVIDIGTAEVFFRRSSIKSKGVTHPANVDIPNKNKIGNKSVSKFPYDIIKNKRYTVDKFGFHLSIIYNYKEPKDININGIVREYIKTVEDLHFIGIDRGERHLLYVTVIDSKGRIKEQFSLNEIINEYNGNSYRTNYRQLLEKRDEERQRERQSWNTIEGIKELKQGYLSQVIHKIVTLMVKYKAIVVLEDLNMGFKRGRQKVESSVYQQFEKALIDKLNLLVDKKLDADSTGGLLHAYQLTNKFTSFREMGHQNGFLFYIPAWNTSKIDPVTGFVDLLHPRYESVDKARAFFCKFKTITYNKAKDWFEFDLDYNDFTTKAEGTRTCWTLCTHGARVETFRNPNANSNWDNREVDLTAELKALFDKYGINPEANLKEEIARQTERNFFERLIHLLKLTLQMRNSITGTEVDYLVSPVADENGAFYDSRTCADGLPLNADANGAYNIARKGLWAARQIHEAPIGEKVKLAISNKEWLQFAQSKPYLDD

SEQ ID NO: 987 - protein, 1283 aa, unidentified
  REGION 1..1283: note = Cas Enzyme sequence
MQRSVKVKLRAHNRSDISDLWFTHLHFHKGVRYYQELLLAMRGEDVHIRDPRTKEPLPLNETSAAVWKAKMVAFIEKARIANGQKGKLTETECTKALNFFRDYYESLVNKDHGDYADEPKGKLNTLVISPSKAGTGNAQPGRAGKALKAMRALFANDKTLAKKYSVADAKNLKKADYDRLIRALKKEPKSGAIADLFAKHEAELKKKEYKKEAFGKTIRPLQESGVLRIVPRYLESLNAGSELAGAAPFEYGMWSVAVATLRSWNTWNEKAKKDREAEEIRLREIDNIFNSEDKFPSVCRKILEKYEAEQHEIYAKAGQLKKRFRITRPMLRNWETLRKKWLNAPNEKKRQEQIAEWQQENRSYGDINLFRYLALDANKAVWFDDEKYLHLWVRRNGILDRIDFRMGYAHLSLADAIYHPIWINNESAKTKRGVGSGSNKPGYLLTWTEKECHLQVRLLRSAENRVSVSSSTLAILPSQQWHQFRPAEKGDGYVFMDHASGEQFRAEPKGGKLMFDRLALEKLGKAGKNLDALATEDIPDCYFNCSWEVEGRAPSSVQRGFQLSGGNEKSYLGWFESLKEAKQSFGSTSKKGGVTENRDKKRQDLFRVMSVDMGLRTFAACSVFTVRAGKSNHGENKFSIPLKSFLTGDEVFHAIHERSFLLPLQGERTSNFIENLRRAYRGKGQAFGIALASVDGLRDGTKLKVFEAWEQAPTTAQMRQKINAMRILRRLNREKSADDREAALSDYIRRYQNAEYGWPFMSLSANELKDRLTKHLNADEKGWGAVIDAEIKSIAANLADQFTAWRKAFRKKRFVRVFDKTGKSRKIGFAGNSLWNIEDLLETRKLMLAWHNRAESAGDQKNLDKYSHFATDLLAHIQKLKDNRIKEGAHALIMSALGYEYVATNKERAVLLADEKAKFRHASEKEIHALLTKKQRPKFWQTGLGNDAIKFGKWLQVHEPCDAIIFEDLSRFRFKSDRPRNENNMLMKWSHRAIPKETQMQGELYGIGIGTVRAEFTSKFHARTMAPGIRGKFFKTGELKQIYESLLGLMKAHSGEEDVFRHADFQLRSLLRFYWGSELEGVLKAALDLNRNVLLPNDGGEYFITLNTKRNPTYLNADINAAQSIARRWLTRYAEPVRVTGAYLEDRGVFIVDLGDKSKGNRVQRALGYGILELSSDKDKVKDYMFEARWQPMKKDAWFKEFAPFLTTRDGALGSDDGEMEENPESTEEIEAIEAIEGKYSFFRDKSGIVLDACKWYSSKKFWSEVRRVIAGKFKNPENLIFR

SEQ ID NO: 988 - protein, 1283 aa, unidentified
  REGION 1..1283: note = Cas Enzyme sequence
MFALAARRISQTQSWTKINERERHEAAAQEDEALRKLQKVDPDGRAREWLKHYEERRFASSGATSAFRVTKRMIGECDAVLKAWEGTATSEERDAKTALVQERTEKFGDASLYADLASESGAEAIWRSSDGAEILKEWVRFRGAQYNQERLKVPRFCHPNPFLHPTWCEFGGATTKGDDTNKPSKPQVWYAWRDDIPPKPEPGGNADGLRRLWVLLPNFDSKEAKPGPMRWRSKQLSKDLGGLRDTVAKQIPRADRLSVAAAGLPHCDAAHRPIRYRPEFPFSSDAKGWNARLQADRDALRNLEKQWDADHDCWRDEGKALRAMRWFVTFSPKLAASEGPGRAVDPKLGWRSSPHTDLNKRQNREGRAKLILPRLAGLRVLSVDLGLRHAAACAVWQTIANKEFEEECEKARTCGAEIRFGPRSVAGEAPDPENALYCHLVWAEKESNSATPTAKAGHREKFHPVTVYRRVGPDKLGGKDHPAPWARLEHQRQFVIKLQGEGRPAREASNEEIWLVHQLEKEMGLAAPLIDRLAQAGWGKTRKQPHRVHALRNPERANARRPPDLQVDALMSATVQVARQALRRHNDRARIAFGLRSDYKPMPGDKKYLFSPRAGDYDGFPDKPEQRLARHTEYLQDMLCLWYELAVSPKWRDDDALSWWNGEILPLVRKAAFTEPPALASADQKDSAKRQRHEAKISRWRNAWDRVLTQELSRPAEEAEDQRDARQRKADREAMHGLLRPVAEALRRDPPLRERLAAKWADRWTRDEGRRRWNDPDPAKSDFHPVPRTDCRGKRASTMAARLDGGGWHARLRKLANWLVPRGLRTRFEETADERITRTGKVGAARNAGGLSLTRIDALVEFRRALVALRTGGTPWGRVEIGADGSVTAGPREAGESYARRLLDVIAQLREQRSKQLASRIIEAALGVGREHLMPTRKRPDKKCWCGEVHHNKKTPKRPGDRQYDACHAIIIERLDNYKPDEVRTRRENRMLAAWRKAELKKRLREGCELHGLHLRDVPAGYTSRQDSRTGAPGIRCEDLAVDEFLRDPSGEPSWIVRQAVARMLDEKASESGSDPFDERFERASKEAALGKGKSLDRYVVKLYGFWRNRPHSAQKTVRLPRRGGALFVSAGSDYPAATGKGLQADINAAANIGLKAIMDPDWPGAWWYVPAALDAAGWRVPAARTCAGAAWVKEWKVAKHGDGYSPAGQPPKPADPGAAPGATAKEKKVVNLWRDCISSDVPHFASGDAWREYAAYKADVECRVVRLLLEQAPAAEELRNGL

SEQ ID NO: 989 - protein, 1284 aa, unidentified
  REGION 1..1284: note = Cas Enzyme sequence
MKTFNELTGLYSLSKTLRFELKPVGKTLANIEAKGVITKDEQRAEEYKKVKDIIDRYHKSFIDMCLSNLVLKTNSDGSNDSLEDYIHLASKQNKNEQEDKNFDNVKTSLRKQIVSAFKKGGSYGDLFKKELIQIHLLDFVTDEQERQMVENFSKFTTYFTGFYENRKNMYSDEEKSTAIAYRLIHENLPIFIDNIKSFAKIAQQEDVDFITDTEHVFKEELKGHALTDLFTLEYFSSALTQSQIELYNTIVGRRVENNGVKKQGLNERINRYNLQHKDSRLPLLKPLYKMILSDRIGLPWLSEEFATDEEMLNSISDTHNNLKPVLDEIRELLINIGNFDIEHIYIANDKGITDISQQLFGQYNVYTNAIKAKIRSKITPSAKERKDSELLDKRINNIFKANKSFSIARLNSYVDSEKTIQEYFSQLGAYDRNSEQRINLLMQIELAYSDALAILSSKATNLNQSEDSIKKIKALLDAYKALQHFIKPLLGNGDEADKDNEFDAKLRGAWVELDVITHLYDKVRNRLTRKPYSTEKIKLNFENAQLLNGWVDSKTEKSDNGTQYGGYLFRKLNEIGEYDYYLGISADKKLFRRNDSIIYKDGMFERLDYYQVKGQTIFGSSYAGSYENDSKNILEAFQKAIVAMHFPNAYIPLHEEKVVSYLKRIKKIKGNGYHLLMNNPIVQIQYKIMKENILKTLSSLKRVSHAIQLSKRKDLDIDELMDEINSMPSKSFTYFPISNDSIKLANERDNAPLFLFKITNKDLSYAETATHGLRQKRGIENLHTMYFKALMSMAQRIFDIGIGTVFFRSKTKGLEKSTARHAAKRPIEKRNNLNKETSIFPYEIIKDKRYTYDKFLFHLSIEINYDKPNKYNLNKDVCNIIRNNGIEHIIGIDRGERHLLYLSLIDMKGNILQQMSLNDIINEYQGNKYITNYKDLLQAREVNRKEARQNWQKIENIKELKEGYLSQVIHIITKMMVEYKAIVVLEDLNMGFMRGRQKIERQVYEKFEKMLIDKLNFLVNKKKDANELGGVLHAYQLASKFDTFKKLGKQSGCLFYIPAWNTSKIDPVTGFVNMLDTRYENPDKARCFFSKFKSIRYNADKNWFEFHIDDYCKFTDKAKGTQSEWVLCTYGTRIQTFSNDEKLNQWDNKEIVLTDEFKKILNEAGIDIYGNLKESICGLTERKYLKPLMHLMKLLVQMRNSETNSEVDYMLSPVADEQGNFYDSRTCGNKLPENADANGAYNIARKGLWAVMKIKASAPEESPKLGISNNEWLQFAQQKPYLKD

SEQ ID NO: 990 - protein, 1284 aa, unidentified
  REGION 1..1284: note = Cas Enzyme sequence
MKDLNKFIGKYKVEKTLRFRLEPIGKTEAWMESKGVIANDKRRADNYAIVKNLIDRYHKVCIRESLTGCNLNWTKLSEAVETYRRCQDTESRKALQKCQDEYRKKIAENFLSFRGFAELTAPSPSVLIKDTLPYNITSKVHPEFSDIGDVDSAKQALLLFEGFAMYFESYQKNRSNLYTAKNIASSVAHRIVHDNFSKFLANIKVFENLRVIYPEILEQCSTELKQHLKGKQLEEVFCVEFFNNVLTQEGIDFYNTVIGGVSGQEGERKCQGINELVNLSLQKENQGRGKRTALTMVPLFKQILSDRNSYSYIPERINDEEELISAIRAFHAHIESFYLNGREVNVMEELLKIVENINCFDPNGIFIDAEKLNGVSKKLYNDLFELRARMTSHLEEQNLTKKNIEKFFQKDAFSITDLCLDKKHSLAKYFSGLKGVNKAIDQKWKQFETRNNKDGQKKYKDSHAGIELVRILLDGYKEFFAVCSILDVDSDNNLDNNFYGVYTPLFTELRGIIPLYNQVRNFLSQKPSDDKKYLLKFDNSKCSNGWDSPQTKSLLIFRRQDRFLLGVVDSENRSCLNDLTTYTPVSPDDRIDFLDYSQGGHMGQNLLTLVVRDGKTVMVKGHKENGENPELERQLKDLLPPDIYRIRKSQSYKNESPNFSKEDLLLFVGYYKQRAKEYYSHFNFTFKDSCDYASFTELVEDIDEKAYQIKFVPTSYKTLQRLINEGKLYLFDIKSKDYEPGAHGKKNLHTLYWEQLFSQENIENLAIKLNAKSTLFCRPQVVTNPMTHKKGSMLLNRKDKNGQPIPEPIYQQLYKYVNGKMAESKLSDEAKGYLGKIVAKEAQYAITKDNRYTKQKYFIHFSTTLNANAPKTADINEDVLNYINDNPDVNIIGIDRGERNLLYVTLINQKGEILDQKSLNVINGFDYHTKLEQREKERDDARKSWQTVGNITDLKEGYLSAAIHEITTMMIENNAIIVLEDLNRKGFMPKRFKFEKQVYQSFEKKLIEKLNYLCSKDIKPTANGGVLRGYQLTEKFVSFEKMTKQNGFLFYVRPDYTSAIDPVTGFVSHFNFKDITNTQGRKDFFEKMESIIVRNGHIEFSFDYRKYKPKDKDFKNIWTVCSSGKRILWNRDSKEYADYNPTAAIIEAFASKGVTLEEGTDIKSLLSEIDGSTANAEFYRIMIEAFKRTVQLRNSNSVTGEDYILSPVIHDGKQYSSLDVLKEWKNAGGHSIPSLPKDADANGAYHIALKGLYLMMNPQTKQIGNEKWFKFVVEKPFKEEKSIG

SEQ ID NO: 991 - protein, 1284 aa, unidentified
  REGION 1..1284: note = Cas Enzyme sequence
VNNSSDSIFSSFTNQYSLSKTLRFELKPIGKTQQMLDEAQVFKKDEIIKKKYEATKPYFDRLHRKFVKESLESAEIPKLEEYFKIFKKWKLDKKNNEKELQRRETELRKFIVSKFNEKAEQWATRYPGLKNKNIEILSEESVFKSLLKPLYGNEEESFLKDEEGNFIVDEQGNKISVFDSWKGFTGYFTRFFETRKNFYKDDGTSATIATRIIEQNLRRFCNNLLIFEEVKNNVNFSEVEENFEIKLCDFFSPNFYISCLLQDGIELYNKILGGETLSSGEKKKGLNECINLHRQKTEKKLPFFKSLDKQILSEKEKFIDEIETDEELLDVLTTFYKSAEEKISVLKNLFDDFVKNWHTHNLSQIYIEEKVFNPNSCKYVDRENLESFQELLFIAMKEAKIVSSSAKKKDGEYSLPDFIPLSFIKGVLEDSPNENFWKDRYYISEENKRGFLSLTSKENIWTQFLKIFDYEFSSLFENELHNTQTGKSEKIGYNIFRQNFKIVLENFKNNTENKVIIKNFADSVLTIYQIAKYFSLEKRRVWNESGLNEGDFYTNPEYGYLNFYENAYEEIVQVYNKIRNYLTRNPYSKERWKLNFENPTLANGWDKNKESDNSTVILRKDGKYFLGIMAKGHNKIFDDRFKQDFSNGLKDGKYEKVIYKFFPDQAKMFPKVCFSKKGLNVFEPSKDIYSLYKNSEFKKGETFSLKSMHKLIDFYKKCLTKYEGWTGYNFRNLKPTEKYKENIGEFFKDVAKDSYKISFQEISESYIHEKNQKGELYLFQIKNKDWNKGTKGRKNLHTLYFESLFSEENISQNFPMKLNGQAEIFYRPKTDINKLGTKKDKRDKTIVDHKRYSENKIFFHIPLTINRTKGDARYFNTQINNFLANNKKVNIIGIDRGEKHLAYYSLINQSGNVIDSGSLNIINNTNYENKLIQKAINREQERKDWLEIEGIKNLKKGYISQVIKKIADLAIKYNAIIVFEDLNMRFKQIRGGIEKSTYQQLEKALIEKLNFLVNKNEMNPQKAGHLLKAYQLTAPFSTFKEMGKQTGIIFYTQASYTSKIDPITGWRPNLYLKYSSAEKAKNEILKFTDIKFHNNRFKFTYDIKNFKQQNEYPQKTIWTICSNVERFRWNKKLNQNKGGYDHYEEMTDYFIDLFETHEIDLNKNILDQIKILQAKGNEEFFKKFIFYLNLVCQIRNTDEKATEINKQDFILSPVEPFFDSRNPEKFGKNLPQNGDDNGAYNIARKGIIILDKISNYAKAKGDCEKLGWNDLYVSQTDWDNFVQT

SEQ ID NO: 992 - protein, 1284 aa, unidentified
  REGION 1..1284: note = Cas Enzyme sequence
MPSRTSPRAYTMKLAPVSSAGADDWQLPLVRTHEKFNAAVRYWADFLLTLCGGFRPADVPAPEGDGQDRMQTRYRRIFLALSWLRVESQDPLNEDYRVRPDQLRDMLAEILTDRGLDAQVIGSWQEECSQIFSSPIRPEACWVNRARMFDERFRGLSDAERAQIFSDVIFRFVGADVYWAPPEEDAGGRARNDYIKPARAWLSERTGTGKGRDFARIAENKERIAGWAATAPAGLGIQQLRQDLAAAMGWETSLEAFRNGITHVQSNGPPPRSVRLLRDLADGMPIDLRELEKACREEADRDRKKVGRKGRTPWAERLWAEYCTRIQAPLQIDFNAPALSEAAIRVFSNWSWIKRSVSEREQASSGRELISQVPLEARTFLDEYCQRRAEETGAIAQFRIRRRAIAGWEDIVRAWSQEACRTLDDRQAAVAAAQADTPESFGDARLFLDLAADQARCVWQPYGTPDHHILVRYVQAREAEAVYMARKVPMFRHPDPWRHPAFVQFGNSRPRVRYVRPADSPDGRGLVELQLVDAGSGKLRYVRFRWRSKRVLKELLGADQGQVSTGAPPVPRIHRLALAAAGIASPEHASVKVFEGKAEWNARLQFPRGRHGRSTPGRSWLLTLSAQLSPLQKAAPAPATDPRGQGARLRFSRQPEGLRILGVDLGQKAAAACAVWETVSRESLERECRLRRVCAPSPEDLHFEIPDECGRQRHYRRIASDFLPDGQTPHPSPWARLERLFLIRLPGEDEAARPLLKHENEEIARFGGQIGFGPLRERRVDKQMRHCLREARLYLRRLGNLAKLSWDLQHSEWGRSAERWLDLARTDTPLGRWSAQMWREATGEPPPVGGAGGRAGSSPPADASRLLEARLAGKGAIWAETVAARFEEERQLARELVRWLRRWVAPQGTRGKANRSVGGVSMLRINNLTDLYRVEKMWATLPQPDLKDSRTVPQEFCAKLLLIRDQLRETRVRLIASRILEAAVGLGMEPERRKGEPLARRLAAPPPDPRHRRCDVIAIENLSGYGTSDSRPRRENRGLMNWSKERIRKRLLEGAELLGLRVEEVLPNYTSRQDFRTGAPGIRGRMVKAGRLAQLKTWERLLQRAADRNDPVAQYVRTLASNLERIPDSAMVFVPEDGGDIFVPDTDASPAGGIHADMNAAANIGLKAVLDPDWAGAWWYVPVRPDTGRPDTAERLRGCRAPGLDRMRVDLPGSGDPIRNAWRHPSSQPLHLSQWQPYAEYWENVKRAALRRQLERLFSSPSFAASPTGPRTWPAAPLTDPSQL

SEQ ID NO: 993 - protein, 1284 aa, unidentified
  REGION 1..1284: note = Cas Enzyme sequence
MNNSSDSIFSSFTNQYSLSKTLRFELKPIGKTQQMLDEAQVFKKDEIIKKKYEATKPYFDRLHRKFVKESLESAEIPKLEEYFKIFKKWKLDKKNNEKELQRRETELRKFIVSKFNEKAEQWATRYPGLKNKNIEILSEESVFKSLLKPLYGNEEESFLKDEEGNFIVDEQGNKISVFDSWKGFTGYFTRFFETRKNFYKDDGTSATIATRIIEQNLRRFCNNLLIFEEVKNNVNFSEVEENFEIKLCDFFSPNFYISCLLQDGIELYNKILGGETLSSGEKKKGLNECINLHRQKTEKKLPFFKSLDKQILSEKEKFIDEIETDEELLDVLTTFYKSAEEKISVLKNLFDDFVKNWHTHNLSQIYIEEKVFNPNSCKYVDRENLESFQELLFIAMKEAKIVSSSAKKKDGEYSLPDFIPLSFIKGVLEDSPNENFWKDRYYISEENKRGFLSLTSKENIWTQFLKIFDYEFSSLFENELHNTQTGKSEKIGYNIFRQNFKIVLENFKNNTENKVIIKNFADSVLTIYQIAKYFSLEKRRVWNESGLNEGDFYTNPEYGYLNFYENAYEEIVQVYNKIRNYLTRNPYSKERWKLNFENPTLANGWDKNKESDNSTVILRKDGKYFLGIMAKGHNKIFDDRFKQDFSNGLKDGKYEKVIYKFFPDQAKMFPKVCFSKKGLNVFEPSKDIYSLYKNSEFKKGETFSLKSMHKLIDFYKKCLTKYEGWTGYNFRNLKPTEKYKENIGEFFKDVAKDSYKISFQEISESYIHEKNQKGELYLFQIKNKDWNKGTKGRKNLHTLYFESLFSEENISQNFPMKLNGQAEIFYRPKTDINKLGTKKDKRDKTIVDHKRYSENKIFFHIPLTINRTKGDARYFNTQINNFLANNKKVNIIGIDRGEKHLAYYSLINQSGNVIDSGSLNIINNTNYENKLIQKAINREQERKDWLEIEGIKNLKKGYISQVIKKIADLAIKYNAIIVFEDLNMRFKQIRGGIEKSTYQQLEKALIEKLNFLVNKNEMNPQKAGHLLKAYQLTAPFSTFKEMGKQTGIIFYTQASYTSKIDPITGWRPNLYLKYSSAEKAKNEILKFTDIKFHNNRFKFTYDIKNFKQQNEYPQKTIWTICSNVERFRWNKKLNQNKGGYDHYEEMTDYFIDLFETHEIDLNKNILDQIKILQAKGNEEFFKKFIFYLNLVCQIRNTDEKATEINKQDFILSPVEPFFDSRNPEKFGKNLPQNGDDNGAYNIARKGIIILDKISNYAKAKGDCEKLGWNDLYVSQTDWDNFVQT

SEQ ID NO: 994 - protein, 1285 aa, unidentified
  REGION 1..1285: note = Cas Enzyme sequence
MIKMMKEKSIWNEFTNMYSISKTLRFKLKPIGKTFDNIKKKGLIEEDKDREKGFNNIKKIMDDYYRYFIEKCLNGIKLEKKDLEAYQKVYEDLKKDNKNQKLKNKYAKNQTILRKEIYNHIKSQKEFSQLFKKELITHILPEWLEKNKRLKDKNLVNQFNNWSTYFTGFFNNRKNVFSEKEIPTSIIYRIVHVNLPKYLDNVSRFEKIKEFNLDLKTLENDFKDVLDNMDLNEFFSVNNFNNFLNQSGIDKFNLVIGGKSLEDNKKIKGLNEYINEFSQKESDKAKRKNIRKLKFAVLFKQILSDSESSSFVIEKFKDKKEIFETIDVFYKEFNKYSSKIKESITKLNNCDSKNVYIKNDTNLTQISKGLFNDWNKIDGGLRRHFENELKIKKLTDKQREKELDKCMKSKYFSLYEIEKGINSLELKDKKSIIDYFLNFSKSKNDSKVDLFENIKSKYSEFNKIDRNKTTKLTEKSSENDVELIKTFLDAIMELYHFIKPLHLNFKKNEDEKGSNALETDSDFYNYFNEIFDKLGEIIPLYNKVRNYVTQKPFSTKKFKLNFENSTLAAGWDINKETANTAIILKKGTDFYLGIIDKNNTKIFLNQQNSNSSVVYEKLCYKLVSGANKMLPKVFLSEKGVKTFKPSKEILKLYKNEEHKKGNTFSIESCHKLIDYFKECMPNYKPNPNDKYGWDVFKFKFSDTKTYKDISDFYREVENQGYKIWFENIDESYLNKLVDEGKLYLFQIWNKDFSKYSKGKPNLHTMYWKELFSEENLKDVIYKLNGEAELFYREASIKRQITHPKNISIDNKNPIKNKEKSTFNYDLIKNKRYSEDSFMFHCPITLNFKAKDQSKSIHKLVNKFIHDTDKKINIVGIDRGERNLAYYTLVNSDGNIIEQESFNIISDDLQRKFDYQEKLDQIEGDRDKARKNWKKIANIKEMKTGYLSQVIHKISKLVIEHDAIIVLEDLNYGFKRGRFKIEKQIYQKFEKMLVDKLNYLVFKGIDKTLSGGNLNAYQLTNKFESFQKLGKQSGIIYYVDAYKTSKICPKTGFVNLLYPKFENILKSQEFIKKFKSIKYHKDEDLFEFNFNYSDFKKDQKEKLEQDNWSIWSNGTKLINFRDKENNNQWTTKEFKVTEKLKELFENHNIDYNSGNDLIEQIVTIENKSFYESLIYILKIILKLRNSYSDFEVKQFKKKLGNKFKECDYDYILSCVKDKEGNFFDSRHAKTNEVKDADANGAFHIALKGLMVIDKIKKFDDVDEKTKIDLKIPRTDFLNYVVKRINR

SEQ ID NO: 995 - protein, 1286 aa, unidentified
  REGION 1..1286: note = Cas Enzyme sequence
MKQKKTQNPFNQFIGLYPLSKTLRFELRPYNEKTKNNIISAGILAEDNHRAESYKKVKKIIDEYHKAFIERVLKDLVLEEKPLQAFYECYKKSSKEEALQEIGNNLRTQISNAFEKDPKYSTLTSKDLINKELPSIVTTEEERTLLEEFHGFSTYFVGFHQNRENMYSDEEKATSIAYRLINENLPKFIDNIRSFQKIADSPIADKLESIYDEYAKEGYMNVNTLNEMFEISFYNRVLTQTQIDLYNAIIGGKTEKDGHKTQGINEYINLYNQRGEVQKKDRLPLLKPLFKQILSDREHISWFEEGFADDQAMLNAIKDFYLELTETGPTTTESILDRTKSLLRTIADYDLTKIYLGYNSLSKISQQIFGEWDRIQRALEAEYDQREKTKTYEEKEKHFKSLKSVSIGFIDDCLKAFETDKQLSLSIKEYIAQLGKKNDDPDLIDRITASYKAVKAILTTEWPKERNIAQEKDIVALIKDLLDRIKDLQSFIKPLLGSGKESDKDNLFYGELASIWETINTVTPLYDKVRNRMTRKPYSTQKFKVNFRNSQLLKGWDLNKEKDYMGIILRKKDLYFLAIMNKKNTKVFSSKVPSQGECFEKMIYKQFDATKQVPKCSTELKRVKEAIEIDDKPYYELFDKQKFSKPLTITREIWQLNNLVWDKKTNSFVRRKKDETRPKKFQQEYLDITEDREGYCEALRKWIDFVKDFLASYKSTSIYNIKYKDSSEYASIKEFYNFLDQELYHIEFSNVSVDYINELIEEGKIYLFQIYNKDFSPHSKGTPNMHTLYWKTLFDERNLANVAYKLNGEAEIFFRKASLERKVTHPAHDPIKTKNPKTSIKEKAFAYDLIKDKRYTEDKFQLHVPITMNFKSPMEKKGINSRVNNYIKTAEDLHFIGIDRGERNLLYVCVIDSQGNIKDQYSLNEIVNQYNRTDYKYLLEKREEERDKERKSWQTIENIKDLKQGYLSQVVHKIAQLMVQYHAIVVLEDLNSGFKRSRQKVEKSVYQQFEKSLIDKLNYLIDKRLPIDEEGGVLRAYQLTNKFESFKTMKMQNGFLFYIPAWNTSKMDPTTGFVNLFDTRYTNIDKSKEFFDKFEAIRYNEGKDWFELEFDYEHFTTKAEGTQTQWTLCTWGERINTFRNKSKNSSWDYKKINLTEEYKTLFEQFSINYRGNLKKEILEQNSKDFFERLLSLLHLTLQMRNSIPNTDTDYLISPVADANGHFYYSEQCGDNLPKNADANGAYNIARKGMWMAEQIRRSNEGEELKLAISNKEWLRFAQEKPYLEDK

SEQ ID NO: 996 - protein, 1286 aa, unidentified
  REGION 1..1286: note = Cas Enzyme sequence
MFKNFTNQYQLSKTLRFELKPIGKTLNNINSKMLLEQDEKRASEYKVVKKIIDEYHKDFMNEAMDGFLFDNDDINSYERLFYIKDKSDEDKKAIESVQQKMRKKIAEKFQKHPLYKNLFAKELIKQDLLSWLDKKDNKFVTKIREITSDNTLMIDNMKTIVSNFSNFTTYFSGFHENRKNIYKADEKHTAVAYRVVHENLPIYLTNKRAFEKLNEKYPKLVSDAKNTVEHHLLGAVVEDMFTNDYFNHTASQTHIDLYNTMIGGTVLDDGTKVQGLNEKINLYRQQNGLTKKDIPNLKPLYKQILSDRELTSWLPESFESDNELLNAINDFYNNEIVNFNCCDGVINILDKLKEHFADTLLFDKERIYIRNDLSMTNISKDIFGDWSVIKGAIEEKYKLDNPREVKAKDGLEKIEKKIEKTKYFSIAHIEEALRSYLRDKDELRAKMSSDVIFDYFNNWDKTTVEHTVSNNIFDRIIDSFIAIKPLLSSEYSLDKKLSNDQDSKSKIKNFMDAITNLQRFVKPLHAKIDSELDIAFYANFDTYFEQLSLGVKLYDMVRNYLTKKPFSTDKFKLNFESGYLLNGWSQDYDTRAGLLFEKDGNYYLGVNVKKLTEDEKQYLLDNPNENLSKRVILDFQKPDNKNIPRLFIRSKGDNFAPAVTIYNLPIQSVIEIYDNGKFKTEYRKKNPKDYLDSLHKLIDYFKQGFLQHESYKHYKFGWKNTKDYLDIAQFYKDVETSCYEVKYEEVNWDRLMNYVESGKLYLFQIYNKDFSPYSKGTPNMHTLYWKMLFDKDNLSNVVYKLNGQAEIFFRKKSITNNIVTHDANEPINNKNSDNPKKSSTFDYDIIKDKRYTVDKFGFHVPITMNFKANGNDNINQQVNQAIKESNDIKVIGIDRGERHLLYLSLIDSSGKIIEQYSLNEIVNEHNCTTYKTNYHKLLDAKEKERGDARVNWGVVENIKELKEGYMSQVIHKVATLMVKHNAIVVLEDLNFGFKQGRFKVEKQVYQKFEKALIDKLNYFVDKKKDVNKLGGVLNALQLTSKFISFEKIGKQSGFLYYVPAWNTSKIDPITGFVNLFDTRYTSVEKAKEFFGKFESIKYNISKNYFEFKLTNYTAFNPKADGTRQNWTVCSYGERILTFRNKDKNSQWDNKEVKPTDGFKKLFDDNEIVYMNGQNIKDFILVKDEKAFFEVLLGCFKLTLQMRNSVTNSDIDYLISPVCDKNGIFYDSRAVEDSLPKDADANGAYNIARKGLWVIEQIKKVDDLRKIKLAISNKEWLSYVQTNDNYK

SEQ ID NO: 997 - protein, 1286 aa, unidentified
  REGION 1..1286: note = Cas Enzyme sequence
MSNFKDFTHLYQLSKTLRFELRPIGETLKHFNESGILVHDETRAESYKKVKKLIDRYHKEFMEEALRNFEFQMDDEKQKNSLSEYVFLYSLGKRTEAQDKDFKEVRENLRKQIADCFKKSPKFKNLFKQELIKSDLCLNMQCSDEEQKLVEEFHNFTTYFTGFHENRKNMYSDEEKSTAIAFRLIHQNLPKFIDNIGVFDRVRNIDEIKAGIENLQKHFETEGLFKQGEKIEDFFTLDYYSRLAVQSRIEIYNAILGGKTTEKGEKIQGLNELINLYNQQYKETHLPKMKALFKQILSDRQAVSWIEESFKSDNEVLSSVNDFYKNLKQNEIFDRTKELLTSIGSYDLSKLSKIYITNDQQLTSISQQLYGSWAVIENAILAEMQNETPRKKKEDAEKYNERLKKAYSNRGSFSIAYIDQCLEAVFGENRIPVEQHFAKLGEAEIETEAECRKIKIPDVFTQIEQTYSAAKSLLCNPYPKDKHLSQSDEDIEKVKNLLDALKRFQHFIKPLTGSGDEAEKDEMFYGDLAELWTEIDQLSSLYNRVRNHLTGKPYSEEKLKLNFENATLLTGWDKNMERANTAVILRKGELYYLAIMNKEHNRIFASDNLPDNGECYEKMVYKQIALPLGFGGFVRKCFGSATKLGWTCPTKFLNKEGKIIIKDEEAKDVLPELIDCYKNFLNIYEKDGFKYSNYNFKFKPSNQYEKLSQFFAEIPQQGYKITFQNISSDYIDQLVTEGKLYLFQIYNKDFSPSSKGTPNIHTLYWRMLFDERNLNDGVYQLNGQAEVFFRKKSLNYTKPTHPANQPIAKKNPHSKNETSQFTYDLIKDKRFTMDKFLFHVPITLNFKSSGTDNIDAKVRQWLQKADDVHIIGIDRGERHLLYLTVIDCKGNIKEQISLNTIENEYNGNTYAFDYHKRLDEKEKERDKAKKSWKTVENIKELKEGYLSQAIHKITQLMLKYNAIIVLEDLNMGFMRGRQKVEKQVYQKFEKMLIDKLNYLVDKKKDPSEVGGVLNAYQLTSKFDSFAKLGRQSGFLFYIPAWNTSKIDPVTGFVNLFDTHKSDDEAKIFFSKFKSINYNKDKDWFEFSFDYNDFTSKAEGTKTQWTVCTNGVRIENFRNGETSNRWGGRTINLSQEFKSLFDEYGIDFTKDLQNSICSQSKKGFFKQLLHLFKLTVQMRNSNTETTETEEEKEKEKEKKDFIISPVCVDGKYYNSDIEAEKGKDEEGNWKSELPVNADANGAYNIARKGLMILNHIKQSSDPSKRQEYDLTNKAWLNFVQKGSVEGK

SEQ ID NO: 998 - protein, 1286 aa, unidentified
  REGION 1..1286: note = Cas Enzyme sequence
MKSMQTSVFEKFTNLYSLSKTLRFELKPTPETFKLLKKTNMHGLTPVHTDEEINELYHKKMKPLFDQIHELFITQTLETINFNLEDLQRLEKLHVELRILTKDRKNNHERINKLQGTNGEISKAQNKLRLFICEQFSIEADKWKAKYSDIKLNDKSYKILTNAKILDVLLILYPGKSECIKKFQGFFTYFSEFNQNRENYYAAEAKATAVANRIINENFVIFADDMHIFDSIKQKIAELSKYECYFKLENYKNCLVQEKIENFNENVVGKINSEKNLWLQQENSKPENKKKKIYLPNLKKLYKQIGCHTKQQKGLKGDGVIIYPKYLEKIGLGFQIIKDDKEKYKIWQTLHYINDTHEEKLEKLKRNYQDFFTNWGSYNLNEVWFRKESFNTISARWFGGDNWNILADALKKTGIGKIEKGEYKISPFVSLWELKQAMDNLPLYKAENLFKEEYKEFFKSNLFETFLAIWRHEIESKFDEIRKYKLVFEEKSKEEFNKSKKDENGKSIHTEVVKNLIEDGYLGLYRLTKYHSLLKKGEKDSRPTQGRFYDALDEFWDNNEITTYHKAFQATLTKKPYSENKIKLNFGCGTLLEGWSSDYESYGVLLFKKNNKYYLGIVKGTKFNNTEVRSLYGNIDSNNYVNRLVYITQKIDNKNPPRWFIRSKGNTFSPMVRDGLINPKDILEIYDNKLYSKTDNKNNYKEYLPKLIDYFKEGFRKHKDFKSFSFDWFNSKEYETIVDFYNHTADMCYKLNWEEINFEALNDLVKQGRIYLFQIYNKDFELDENIGKEKYGDSFKVHKITGQLNSHTLLFLELLKPENVLKIKLLGGGEVFFRKPSKEKKYKNDKNSKKILDAKRYYEEKYFLHFPIELKGKNLKGSFNQKVNQMIKDNSNNVKIIGIDRGEKHLLYYSVIDASGKMIDKGSLNIINKVNYNTKLQERQNKRNQARLDWEEIGNIKNFKEGYLSQAVRKIYELIIKHNAVVVMENLNTEFKAKRMAKVEKSVYKKFELALARKLNHLILKDKKAKELGGVLNAYQLTPAISADDVNKFENAHQWGIMLYVRANYTSTTDPLTGWRKHKYISNSETDKKIKDFFNHDTGIRIDFDTDKDCFKFSYEHEGKTWRLFAFASIQRFYWNNKERKMEMYSLFKEFDKLFAGLDRSKNINLQIHSKDHGWWRKLIFFWNLLNQIRNTDRDKTGNENDFILSPVWSEKFKQFFDSRKVTSMDLPDNGDANGAYNIARKGLIVLKRIKNCSDTSKFGNDNNGKNPENSDYVSDGNWDNFAYAG

SEQ ID NO: 999 - protein, 1286 aa, unidentified
  REGION 1..1286: note = Cas Enzyme sequence
MATINEFCGQENGYSRSITLRNKLIPIGKTADNLKQFLEKDQERADSYPEIKKLIDEIHRGFIEDTLSKFSFLWEPLFDDFELYQNEKDKSKKAKKKKDLEKFQSGARKKIVEAFKKHPDYDKLFKDGLFKELLPALIENSSDSEISNKEEALKVFDRFSTYFVGFHENRKNMYSEEEKSTAISYRIVNENFPKFYANVKLYNYLKQNFPQIISDTEESLKNHLKGKKLDEIFNVEAFNDVLAQSGIDFYNTVIGGISTETEKVQGLNEKINLARQQLPTEEKNKLRGKMVVLFKQILSDRGTSSFIPVGFNNNDEVYSSIKSFNDEFVNLSVCETKELFKQVAEFNLSEIYVPAKSLTNFSQNIFGSWSILTEGLFLLEKDKVKKALSENQEEKINKEIAKKDYSLDELQVAYERYCNEHNFSVEKNCKDYFDVVDYRTENEKSDKKKVSILSAITESYSKIDFENIHDLQQEKEAATPIKTYLDEVQNLYHHLKLVDYRGEEQKDSNFYSKLDEIITQLSEIIPLYNKVRNFVTKKPGEMKKVKLNFDCPTLANGWDENKESSNDAIILRKDGKYYLGIFNPNNKPKFYKNENDSESCYEKMVYKLLPGPNKMLPKVFFSTKGQETFLPPKDLLLGYDAGKHKKGDSFDKEFMYKLIDWFKDAINRHEDWKKFNFVFSPTKSYEDMSVFYREVELQGYKVSFQKITDTEIDSFVNEGKLFLFQIYNKDFASKASGKKNLHTLYWENLFSEENLKDVCLKLNGEAELFWRKPSLNKNKVTVHEKGSTLVNRTTNDGKSIPEDIYQEIYQLKNKMIDNLSENAKSLLDSGVVVCKEATHDITKDNRFTEDTYLFHCPITMNFKAPDKSNKEFNNQVLEVLSDNPDVKIIGLDRGERHLIYLSLINQKGEIELQKTLNLVDQVRNDKTVKVNYQEKLVHKEGDRDKARKNWQTIGNIKELKEGYLSNVIHEIAKMMVEHNAIVVMEDLNFGFKRGRFAVERQIYQKFENMLIEKLNYLVFKDKKVTEPGGVLNAYQLTNKSANVSDVYRQCGWLFYIPAAYTSKIDPKTGFANLFITKGLTNVEKKKEFFDKFDSIRYDSKEDCFVFGFDYGKICDNADFKKKWEVYTKGERLVYNKTERKNISINPTEELKSIFDDFGINWNNEDNFIDSVHTIQAEKSNAKFFDTLLRMFNATLQMRNSIPNTEIDYLISPVKSEDGTFFDSREELKKGENAKLPIDADANGAYHIALKGLYLLENDFNRNDKGVIQNISNADWFKFVQEKNYEK

SEQ ID NO: 1000 - protein, 1286 aa, unidentified
  REGION 1..1286: note = Cas Enzyme sequence
MTNFDNFTKKYVNSKTIRLEAIPVGKTLKNIEKMGFIAADRQRDEDYQKAKSVIDHIYKAFMDDCLKDLFLDWDPLYEAVVACWRERSPEGRQALQIMQADYRKKIADRFRNHELYGSLFTKKIFDGSVAQRLPDLEQSAEEKSLLSNFNKFTSYFRDFFDKRKRLFSDDEKHSAIAYRLINENFLKFVANCEAFRRMTERVPELREKLQNTGSLQVYNGLALDEVFSADFYNQLIVQKQIDLYNQLIGGIAGEPGTPNIQGLNATINLALQGDSSLHEKLAGIPHRFNPLYKQILSDVSTLSFVPSAFQSDGEMLAAVRGFKVQLESGRVLQNVRRLFNGLETEADLSRVYVNNSKLAAFSSMFFGRWNLCSDALFAWKKGKQKKITNKKLTEIKKWLKNSDIAIAEIQEAFGEDFPRGKINEKIQAQADALHSQLALPIPENLKALCAKDGLKSMLDTVLGLYRMLQWFIVGDDNEKDSDFYFGLGKILGSLDPVLVLYNRVRNYITKKPYSLTKFRLNFDNSQLLNGWDENNLDTNCASIFIKDGKYYLGISNKNNRPQFDTVATSGKSGYQRMVYKQFANWGRDLPHSTTQMKKVKKHFSASDADYVLDGDKFIRPLIITKEIFDLNNVKFNGKKKLQVDYLRNTGDREGYTHALHTWINFAKDFCACYKSTSIYDISCLRPTDQYDNLMDFYADLGNLSHRIVWQTIPEEAIDNYVEQGQLFLFQLYNKDFAPGADGKPNLHTLYWKAVFNPENLEDVVVKLNGKAELFYRPRSNMDVVRHKVGEKLVNRKLKNGLTLPSRLHEEIYRYVNGTLNKDLSADARSVLPLAVVRDVQHEIIKDRRFTADKFFFHASLTFNFKSSDKPVGFNEDVREYLREHPDTYVVGVDRGERNLIYIVVIDPQGNIVEQRSFNMINGIDYWSLLDQKEKERVEAKQAWETVGKIKDLKCGYLSFLIHEITKIIIKYHAVVILENLSLGFKRVRTGIAEKAVYQQFERMLVTKLGYVVFKDRAGKAPGGVLNAYQLTDNTRTAENTGIQNGFLFYVPAAFTSRVDPATGFFDFYDWGKIKTATDKKNFIAGFNSVRYERSTGDFIVHVGAKNLAVRRVAEDVRTEWDIVIEANVRKMGIDGNSYISGKRIRYRSGEQGHGQYENHLPCQELIRALQQYGIQYETGKDILPAILQQDDAKLTDTVFDVFRLALQMRNTSAETGEDYFNSVVRDRSGRCFDTRRAEAAMPKEADANDAYHIALKGLFVLEKLRKGESIGIKNTEWLRYVQQRHS

SEQ ID NO: 1001 - protein, 1286 aa, unidentified
  REGION 1..1286: note = Cas Enzyme sequence
MDNKKEFKSFSDFTNLYEVSKTLRFELKPIGRTKELLDKHKVFDEDKQVLENYKKVKKYFDLYHQEFIYNALKLSNIDFSDFQKAYIDYKGTTKIDKKNAEKVFKKIEDKYRKEIVKLFNDNARIEIEKYNSVIDIKKEDLGFLFEKEIFEILKERFKDDEGIYYYVDNTKKDIFSVFTGFTTYFVNFYHSRENFYDDDGKASAVATRIINENLIKFLNNVELFNQIKNKVDLQEDQKNIFNINYYNKCLVQEDINKYNIIIGDINKKINEYSQQSGEKFGLFKILYNQILGKDLGENNNTFIEINNDNEVFDTLNKFDVYNNKNIIKFKDSMLGVINQELNSKEPSFNIDEIYLAKRFINTISGKWFLDWRVFEDLISDYFNNGNTDSKKRREIRKEIPEFIKLGEIKNILLQDSVNEINNEDLFKEKYINIINPDSNKYINFLTIFKKEIEESLESYYDKREILKDTITKDGSYDPSKEAIENIDENTQVKYKVHKRIIKDFLDSSLVMYQIAKYFLIEKNGEIIEDDFQDREPLFYNDLEDILKDCEFFDYYAIFRDYLTKKIYSEDKIKLNFGNGQLLNGWDRNKEKQYNGIMFRKDNKYYLGILIDKKIFDDDRIKLANEKYNGPYYEKLFYKFLPDPKKMLPKVCFCKKGLTTFKPTDHILNIYNNGLFKIDNPNFKVEYMQDLIDFYKQCLSSYPDWQIFDFTSLKDTKDYKNNIGEFYNDIVKNSYRMWFENIPEAYIEENVANDKLYLFQIYNKDFSPESKSDKYKNMHTLYWNNLFSNENMENPILKLNGEAEIFFREKSSRVEYKQDKSGKKVIDHKRYYEDKIFFHCPITLNFGHSEYNDRIKEFNVRVNELLVNDDSDIHIMGIDRGEKNLIYYSILDRDGNIIESQSLNVIENKNKKVDYLSILSSKEIDRDRARKSWQEIENIKEIKSGYLSNVVKILYDKIIQYNAIIILEDLNSGFKTSRQKIERQVYQNFELALINKLSYLVKKDETDIYKAGSVLKAYQLTPFIQNYKDVYKQTGILFFTIAGYTSRTCPNCGFRRDASMRFDYKTIDSSISLLNNRNFNIEYNGHYFDITFENNIKYKYQSKNEEEHNQKLVKLNTKDAQRYKWHKTDSEYGKFINVGESIVPDTKTTNGVLKKYDITECLIDLFNKYNITLDQGLTDSILSNTFDSNFYKRLFYLLELLMEIRNSIPNTEHDYIKCPCCNFDSEKNKFNGFDWNGDANGAYNIARKGIIMLDKIEKFALKDDLIKIKYDDFVADMEDWDSFVSKQ

SEQ ID NO: 1002 - protein, 1286 aa, unidentified
  REGION 1..1286: note = Cas Enzyme sequence
  VARIANT 275: note = X can be any amino acid
MNHNNFTQLYPLSKTLRFELKPVGETSDYIEDFKSQYLKDIVAKDETRAEEYEIIKEIIDDYHRYYIEEKLSEPVDKKTGELFISAEDFENAFSYFQRFRENPKDEKIKKDWIDMQTSLRKKLVKVFIDTPSKPSNRSTLIKKDIPQWLIKTDSAEEKKSVVDHFKRFTTYFTGFHENRENMYSSEEQNTAISYRLMNENLPKFFNNCLQFKRLDKKYNDLKLSTEPTLLLKMSVLGLSEIFQPGYFIQLFTQTGIDNFLELIGGRTKENGEKVXGLNETINLYRQKKSIKAKTLPNFSSLYKQILSDRETSSFIPDQFENDKELLESLGKFINEMAKKGGILENLQNSVRSLKDADMRKTFVKGGVEITRISEKIFGNYSILKSAIYHHAETVVYPTPKSGKVSETLEDKRKKYVNKQDVFSITELESMLSIYANHLDDDSPDKETIIKYTNVKNIISNHFLSTIDDLINDEDIGFRTAVEEVLSLLSLDRLNKGKQGQEQTHKIQKMLDAFLAMSHSVKPLHLVSGRKPIDVPDMDMGFYNNFSKTFEAFDQMVIALYNKTRNHLTKKPYSKDKIKVNFENPTLLDGWDINKAKANNSTILRKDGLYYLAIMHSNYNSIFDEIPDVKNHERVYEKVNYKLISGINKMLPKVFFSKKGIETFNPPRSILDLYKNSEHKNGDTFNLDSCHRLIDFFKENVGKYKVNPTDEFGWDVFNFKFSPTKSYQDISYFYREIEMQAYKIWFADISETYINQCIEEGKLFLFQIYNKDFSPYSTGTPNLHTLYWKALFESENLKDVVAKLNGQAEIFYRKHSIKKDERTIHNANQVIQNKNENNPKKTSSFEYDIIKDKRYTVDKFHFHVPITLNFKAPGVTRFNNKINDTLAKSDDTYIIGIDRGERHLLYYTVLSSKCEIVEQGTLNTVSTNHGYKVDYQKKLDKKEKERDKARKAWTSIENIKELKAGYLSHVIHKLSQLIIKYNAIVCLEDLNFGFKRGRFKVEKQVYQKFEKALIDKLNYLVFKDVKFGKPGHYLNAYQLTAPFDSFKKLGKQTGILYYVQASYTSKIDPVTGFINFLYPRYESFLKSKMFFENMNGIRYNAEKDYFEFMIDYSIMTPSRDLSGYKNKWTICTFGDKRFKNFRNANENWESVVVNVTAELKQLLEQAGITFQLGQDLRESITQIKDTKFYRKLFKLLQVTLSLRHSKTGTDEDFILSPVADENGKFFDSRKATEKQPKDADANGAFHIALKGLWNIQKIKEWDGTSNLNLAMKNVEWFSFAYNKPFLD

SEQ ID NO: 1003 - protein, 1287 aa, unidentified
  REGION 1..1287: note = Cas Enzyme sequence
MPSNNSIFSEFTNLYSLTKTLRFELRPTEETKVLLQKTNNLGLTPVQTDQKIDDLYNKEMKPMYDKLHEKFITESLQKVEFDLETLSELEKNYLEFKKLSKNKKENQKQLEILQKNDKGKIVGRIPDLQSKLRNSIVVNYEKTAENWKKEYVIKNKDSQEQSISKEKSYKILTESSSLKLLQLIYPEKADLIKDNFIGFHTYFTGFNQNRTNYYTNDGKVTEVAFRCINVNLTKFIENKAIFESAKIKISSLSEFDEYFKLEKFQNCLTQTGIEDFNDILATIKSKINLEYNQKANKNEQIRGFNKLHKQIGCKTRQQNELEKSGTSQYPDYLEKVGLGFKISKNGKDYQIWEAVESLSKQLEKKVEELQKGYMDFFQNWESGDYKLNEIWFRKEALNTISGRWFGGSNWSVLGRVLSYNGVGKTEDGEYKIPVFVNLLDIKEALEKLENGIEFDLFGKIKKQKENKENSELTKYTAENLFLDRYKENFKVSLFETFLAIWKYEIETKFKEIEKFKEAFNKVKSTKFDKNIKDENGLSLHTKVVKNLVEDGYLNLLRLTKYHTTDKKGELVADCHQDGNFYEELNNFWGDDTEPNNIVMYHKALQSSLTEKPFETDKIKLNFENGMLLGGWSDGQEKNKGGVILQNQDKFYLGILINRGFFRTDKLNELYQTEEQNWQRLILTNLKFQTLAGKGFLGKYGQSYGELGKIEPLKAVKLLQEFIKENYLAKYPQLKNVAEKEYQEKKVFDAEIKVALEECFTMNFVPIKAEILQQGLQTEQLYLFEITNKDFARKNPESKENLETIYWKNLFSLENLKSPKIALNGGGEIFFRKGQKEKLVSKKDKKDKEILDAKRYADDKYFFHVPITINYGKPKLMKFKDLLSEKIEQNRDQITYLGLDRGEKHLVYYALVDSKGKMLEQGSFNKITVAGREVDFHDKLTTKAGNRDKARKDWETIGNIKNFKEGYLSQVIHEIYQIVIKHNSLIILENLNTEFKAKRTAKVEKSVYKKFELALAKKLNHLVLKDKLPNEEGGVLQAYQLTPQIGSGNITDYEKSDNWGIIKKVKAAYTSAIDPLTHWRKHIYLSNSATEDQIKTLFGVDGKVQINWDDEFKCFRFDYREEITQDKKVVGTKNWSLYAHKNLERFRWNSAYINDDSSRGKILAYDDREEKSLYTAFKDLFNDLNQNENINHQLSGLPNFNWKSLVFYWNLLNQIRNTDTSVETDETDFIQSPVFSQALNDFFDSRKVARGEYSEYEKTNGQLPKNGDANGAYHIAKSHPNLNLTTNS

SEQ ID NO: 1004 - protein, 1287 aa, unidentified
  REGION 1..1287: note = Cas Enzyme sequence
MENEKTFKSFEDFTNLYEVQKTLRFELKPEPETDVLFKKMGVWYAEDKKRAEESTIVKFYMDLVFREFTEESLKIISLNPEKFLNLFYELKQIEKRGTKNKEDKNYKKEEIRGKKKEINDELANLRSVFVERGFDVIDQDWKIKYGDDGNKVKNKNSEKYLILSENILSYLKRRFDSQEVEKLRINDKKYSDDYRDVVNENGENVFDNFVGFFGYFDKFIKNRENFYQKDGKAGRVATRSINENLLFFANNKQIYNTEFPEDLKNDISKEEKDIFEADYCKHFLLQRGISEYNYLIGGINKKINKYNQQNKKKIPFLVNLYRQILSMEERNDYKHIEIKNNDDLLTVLNEFIALNAEKVKEGKLIFKSFIKYCEIGENLEQIYLPKDSMNTISRTIFQSAEDIMALFNKRYFVSLEELKNLMVSNDWLLMDKENKIFKDSVSSIAAGGGDVFLRFISILEAEYEKQFNGFEANTRKGKITNIGYTKNLANLNEKIIWFKGRQGEGKKLVEEEKMGWIEAIKNYSDSVLRIYQITKYLWLPITGDNDDKSYQKIKIEIEGLNKNNDFYNPVNEYIIGYEPFVYRSSFQEYLTKRPFSEDKFKINFNNGRLLNGWDRDKISERLGVIIRDGEKYLLGIINKKDSHCLDDLDSIADKNGIYELMQFKQLTGLYRQLPRMGFPNKKKSVIEISPLVFSVKEEFDNFQKLKKENKIAKTESFDTKKLNILIDYYRRFIREYYKKETIYDFSLLDDKKNYEQISDFYADVDKITYSLCFTKINKEKVKKLSSAGKIFLFEIYCKDFSDKSWGEKNLHTLYFSSLFDANINPNGHIRLGANAEIFYRPASLLEKEQKNELIATKKYQKIDDKFQNPYHLKRYAQNKIFLHFPIILNADVYEKNNINRVVFEFIKNKKDLKIIGIDRGEKNLAYFSVINIGKDGSIRLLKSKDLNLGYLEPLNDLAKKRQDQRKAWQSISEIKGKRNGYISKAIHEIADLIINENAIVVFEDLSGDFKRMRIKFEKAVYQQLELALIKKLNYLTIKKRPIGRAGNYFFAYQLANQIGSYKDVRKQTGIIFYTQASYTSRTCPVCGWRKRIKGLKYKNRDKAKKIFDSKDGVKISFDGKIFKFEYRPEYDKKIADRIDWVDSDVTRIKWNGKIRKNTIYKKGELTNELKGLFRDMDIKKDINLQIKDVESAEFWEKLLYIFHFILEIRNTDSELGIDYIECPHCHFHSDNGFKGFEWNGDANGAYNIARKGLMILERIREGNDNPDLVITQEKWDEFTEKNYQKEK

SEQ ID NO: 1005 - protein, 1287 aa, unidentified
  REGION 1..1287: note = Cas Enzyme sequence
MTVFDKFTNLYSLSKTLRFELKPLPETLNLLKKTNLHGQTPIQVDEEIDNLYHKEMKPLFDELHELFITLTLEKINFNNEDLQTLEKLLIELQTLTKDRKTNQKRLDKLQGDNGEIAKIQNKLREIIGEQFVIQGERWKKKYTKTKLNDKGYKILTNAKILDVLIDLHHEKSKHIKKFQGFFTYFNGFNLNRENYYTTEAKATGVANRSINENLVIFIENRQIFNSLAQLLPKLNNYKNNFELSAYKNYLIQEGTESFNEIAGKINKEKNLFLQQENSRPENKGKKIYLPNFKKLFKQIGCRTKQQKDLVNKGVSIFPKYLEKIGLGFQIIKDSQEKYKIWQALQHVNDMYNEKLEKLKQNYQKFFMHWNEYDLNKIWFKKEAINTISARWFGGDNWSILADVLRKKGTGKIEKGEYKVTHFVSLLELKQAMDDLPLYKAENLFKDEYKKYFRATLFETILSVWQHEVESKFEEIREYQQLFREKSREAFDKNKKDKKGKSHTEVVKKLIEDGYLRLYQLTKYHNLEKKGYKDPRLTEGRFYDVLDEFWDNNEIVTYHKAFQSTITKKPYSEDKIKLNFECGTLLGGWSPDFESYAALIFNKNDKYYLGIIKGTKFNDLEAGSLYKNINSNNCIKRLIYITQKVDNKNTPRWFIRSKKNTFSPMVREGLINPKDILDIYDNKLYSKNSKNDNKNRYKKYLPKIIDYFKEGFKKHRDFKNFLFDWYDSKKYETIADFYNHTADMCYKLDWENLNFDSLRNLVKQGRLYLFQIYSKDFRLDESIGRNIYGDNFQTQKTTGQMNSHTKLFFELLKPENVKKLKLLGGGEIFFRNSGKEKRYKKDKKGKQVVDAKRYYEQKYFLHFPIKIKGKNKDLKNSFMNQKLKDNLKDIKIIGIDRGEKNLLYYSVVGSNGKMIDKGSLNIINDVNYNEKLQEKQNKRKQARLNWEEIGNIKNFKEGYLSQAVYGIYKLIIKHNAIVVLEYLNTEFKAKRLAKVEKSIYKKFELALARKLNHLILKDKEASEKGGVLNAYQLTPAIPAGDVSKFEKAHQWGTIFYVRPNYTSTTDPLTGWRKHINISNSETDKKIKEFFNPDTGIQVNYDNDKKYFKFSYENEGKVWQLFAFDGLQRFCWSRKKRKMETYNLYEEFNKLFEGLDKSKNINKQIYGKDFNWKRLVFLWNLLNQIRNTDRDRIGNENDFIQSPVWSEKHRQFFDSRKATSLDLPDNGDANGAYNIARKGIILLRRIKNCPDISKFGNDNSGKSPENGYFISDQDWDEAVSDWDKYISGN

SEQ ID NO: 1006 - protein, 1288 aa, unidentified
  REGION 1..1288: note = Cas Enzyme sequence
MVGNKISNSFDSFTGINALSKTLRNELIPSDYTKRHIAESDFIAADTNKNEDQYVAKEMMDDYYRDFISKVLDNLHDIEWKNLFELMHKAKIDKSDATSKELIKIQDMLRKKIGKKFSQDPEYKVMLSAGMITKILPKYILEKYETDREDRLEAIKRFYGFTVYFKEFWASRQNVFSDKAIASSISYRIIHENAKIYMDNLDAYNRIKQIACEEIEKIEEEAYVFLQGDQLDVVYTEEAYGRFISQSGIDLYNNICGVINAHMNLYCQSKKCSRSKFKMQKLHKQILCKAETGFEIPLGFQDDAQVINAINSFNALIKEKNIISRLRTIGKSISLYDVNKIYISSKAFENVSVYIDHKWDVIASSLYKYFSEIVKGNKDNREEKIQKEIKKVKSCSLGDLQRLVNSYYKIDSTCLEHEVTEFVTKIIDEIDNFQITDFKFNDKISLIQNEQIVMDIKTYLDKYMSIYHWMKSFVIDELVDKDMEFYSELDELNEDMSEIVNLYNKVRNYVTQKPYSQEKIKLNFGSPTLADGWSKSKEFDNNAIILIRDEKIYLAIFNPRNKPAKTVISGHDVCNSETDYKKMNYYLLPGASKTLPHVFIKSRLWNESHGIPDEILRGYELGKHLKSSVNFDVEFCWKLIDYYKECISCYPNYKAYNFKFADTESYNDISEFYREVECQGYKIDWTYISSEDVEQLDRDGQIYLFQIYNKDFAPNSKGMDNLHTKYLKNIFSEDNLKNIVIKLNGEAELFYRKSSVKKKVEHKKGTILVNKTYKVEDNTENSKEKRVIIESVPDDCYMELVDYWRNGGIGILSDKAVQYKDKVSHYEATMDIVKDRRYTVDKFFIHLPITINFKADGRININEKVLKYIAENDELHVIGIDRGERNLLYVSVINKKGKIVEQKSFNMIESYETVTNIVRRYNYKDKLVNKESARTDARKNWKEIGKIKEIKEGYLSQVIHEISKMVLKYNAIIVMEDLNYGFKRGRFRVERQVYQKFENMLISKLAYLVDKSRKADEPGGVLRGYQLTYIPDSLEKLGSQCGIIFYVPAAYTSKIDPLTGFVNVFNFREYSNFETKLDFVRSLDSIRYDTEKRLFSISFDYDNFKTHNTTLAKTKWVIYLRGERIKKEHTSYGWKDDVWNVESRIKDLFDSSHMKYDDGHNLIEDILELESSVQKKLINELIEIIRLTVQLRNSKSERYDRTEAEYDRIVSPVMDENGRFYDSENYIFNEETELPKDADANGAYCIALKGLYNVIAIKNNWKEGEKFNRKLLSLNNYNWFDFIQNRRF

SEQ ID NO: 1007 - protein, 1288 aa, unidentified
  REGION 1..1288: note = Cas Enzyme sequence
MVGNKISNSFDSFTGINALSKTLRNELIPSDYTKRHIAESDFIAADTNKNEDQYVAKEMMDDYYRDFISKVLDNLHDIEWKNLFELMHKAKIDKSDATSKELIKIQDMLRKKIGKKFSQDPEYKVMLSAGMITKILPKYILEKYENDREDRLEAIKRFYGFTVYFKEFWASRQNVFSDKAIASSISYRIIHENAKIYMDNLDAYNRIKQIACEEIEKIEEEAYVFLQGDQLDVVYTEEAYGRFISQSGIDLYNNICGVINAHMNLYCQSKKCSRSKFKMQKLHKQILCKAETGFEIPLGFQDDVQVINAINSFNALIKEKNIISRLRTIGKSISLYDVNKIYISSKAFENVSVYIDHKWDVIASSLYKYFSEIVKGNKDNREEKIQKEIKKVKSCSLGDLQRLVNSYYKIDSTCLEHEVTEFVTKIIDEIDNFQITDFKFNDKISLIQNEQIVMDIKTYLDKYMSIYHWMKSFVIDELVDKDMEFYSELDELNEDMSEIVNLYNKVRNYVTQKPYSQEKIKLNFGSPTLADGWSKSKEFDNNAIILIRDEKIYLAIFNPRNKPAKTVISGHDVCNSETDYKKMNYYLLPGASKTLPHVFIKSRLWNESHGIPDEILRGYELGKHLKSSVNFDVEFCWKLIDYYKECISCYPNYKAYNFKFADTESYNDISEFYREVECQGYKIDWTYISSEDVEQLDRDGQIYLFQIYNKDFAPNSKGMDNLHTKYLKNIFSEDNLKNIVIKLNGEAELFYRKSSVKKKVEHKKGTILVNKTYKVEDNTENSKEKRVIIESVPDDCYMELVDYWRNGGIGILSDKAVQYKDKVSHYEATMDIVKDRRYTVDKFFIHLPITINFKADGRININEKVLKYIAENDELHVIGIDRGERNLLYVSVINKKGKIVEQKSFNMIESYETVTNIVRRYNYKDKLVNKESARTDARKNWKEIGKIKEIKEGYLSQVIHEISKMVLKYNAIIVMEDLNYGFKRGRFRVERQVYQKFENMLISKLAYLVDKSRKADEPGGVLRGYQLTYIPDSLEKLGSQCGIIFYVPAAYTSKIDPLTGFVNVFNFREYSNFETKLDFVRSLDSIRYDTEKRLFSISFDYDNFKTHNTTLAKTKWVIYLRGERIKKEHTSYGWKDDVWNVESRIKDLFDSSHMKYDDGHNLIEDILELESSVQKKLINELIEIIRLTVQLRNSKSERYDRTEAEYDRIVSPVMDENGRFYDSENYIFNEETELPKDADANGAYCIALKGLYNVIAIKNNWKEGEKFNRKLLSLNNYNWFDFIQNRRF

SEQ ID NO: 1008 - protein, 1288 aa, unidentified
  REGION 1..1288: note = Cas Enzyme sequence
MVGNKISNSFDSFTGINALSKTLRNELIPSDYTKRHIAESDFIAADTNKNEDQYVAKEMMDDYYRDFISKVLDNLHDIEWKNLFELMHKAKIDKSDATSKELIKIQDMLRKKIGKKFSQDPEYKVMLSAGMITKILPKYILEKYETDREDRLEAIKRFYGFTVYFKEFWASRQNVFSDKAIASSISYRIIHENAKIYMDNLDAYNRIKQIACEEIEKIEEEAYVFLQGDQLDVVYTEETYGRFISQSGIDLYNNICGVINAHMNLYCQSKKCSRSKFKMQKLHKQILCKAETGFEIPLGFQDDAQVINAINSFNALIKEKNIISRLRTIGKSISLYDVNKIYISSKAFENVSVYIDHKWDVIASSLYKYFSEIVKGNKDNREEKIQKEIKKVKSCSLGDLQRLVNSYYKIDSTCLEHEVTEFVTKIIDEIDNFQITDFKFNDKISLIQNEQIVMDIKTYLDKYMSIYHWMKSFVIDELVDKDMEFYSELDELNEDMSEIVNLYNKVRNYVTQKPYSQEKIKLNFGSPTLADGWSKSKEFDNNAIILIRDEKIYLAIFNTRNKPAKTVISGHDVCNSETDYKKMNYYLLPGASKTLPHVFIKSRLWNESHGIPDEILRGYELGKHLKSSVNFDVEFCWKLIDYYKECISCYPNYKAYNFKFADTESYNDISEFYREVECQGYKIDWTYISSEDVEQLDRDGQIYLFQIYNKDFAPNSKGMDNLHTKYLKNIFSEDNLKNIVIKLNGEAELFYRKSSVKKKVEHKKGTILVNKTYKVEDNTENSKEKRVIIESVPDDCYMELVDYWRNGGIGILSDKAVQYKDKVSHYEATMDIVKDRRYTVDKFFIHLPITINFKADGRININEKVLKYIAENDELHVIGIDRGERNLLYVSVINKKGKIVEQKSFNMIESYETVTNIVRRYNYKDKLVNKESARTDARKNWKEIGKIKEIKEGYLSQVIHEISKMVLKYNAIIVMEDLNYGFKRGRFRVERQVYQKFENMLISKLAYLVDKSRKADEPGGVLRGYQLTYIPDSLEKLGSQCGIIFYVPAAYTSKIDPLTGFVNVFNFREYSNFETKLDFVRSLDSIRYDTEKRLFSISFDYDNFKTHNTTLAKTKWVIYLRGERIKKEHTSYGWKDDVWNVESRIKDLFDSSHMKYDDGHNLIEDILELESSVQKKLINELIEIIRLTVQLRNSKSERYDRTEAEYDRIVSPVMDENGRFYDSENYIFNEETELPKDADANGAYCIALKGLYNVIAIKNNWKEGEKFNRKLLSLNNYNWFDFIQNRRF

SEQ ID NO: 1009 - protein, 1288 aa, unidentified
  REGION 1..1288: note = Cas Enzyme sequence
MVGNKISNSFDSFTGINALSKTLRNELIPSDYTKRHIAESDFIAADTNKNEDQYVAKEMMDDYYRDFISKVLDNLHDIEWKNLFELMHKAKIDKSDATSKELIKIQDMLRKKIGKKFSQDPEYKVMLSAGMITKILPKYILEKYETDREDRLEAIKRFYGFTVYFKEFWASRQNVFSDKAIASSISYRIIHENAKIYMDNLDAYNRIKQIACEEIEKIEEEAYVFLQGDQLDVVYTEEAYGRFISQSGIDLYNNICGVINAHMNLYCQSKKCSRSKFKMQKLHKQILCKAETEFEIPLGFQDDAQVINAINSFNALIKEKNIISRLRTIGKSISLYDVNKIYISSKAFENVSVYIDHKWDVIASSLYKYFSEIVKGNKDNREEKIQKEIKKVKSCSLGDLQRLVNSYYKIDSTCLEHEVTEFVTKIIDEIDNFQITDFKFNDKISLIQNEQIVMDIKTYLDKYMSIYHWMKSFVIDELVDKDMEFYSELDELNEDMSEIVNLYNKVRNYVTQKPYSQEKIKLNFGSPTLADGWSKSKEFDNNAIILIRDEKIYLAIFNPRNKPAKTVISGHDVCNSETDYKKMNYYLLPGASKTLPHVFIKSRLWNESHGIPDEILRGYELGKHLKSSVNFDVEFCWKLIDYYKECISCYPNYKAYNFKFADTESYNDISEFYREVECQGYKIDWTYISSEDVEQLDRDGQIYLFQIYNKDFAPNSKGMDNLHTKYLKNIFSEDNLKNIVIKLNGEAELFYRKSSVKKKVEHKKGTILVNKTYKVEDNTENSKEKRVIIESVPDDCYMELVDYWRNGGIGILSDKAVQYKDKVSHYEATMDIVKDRRYTVDKFFIHLPITINFKADGRININEKVLKYIAENDELHVIGIDRGERNLLYVSVINKKGKIVEQKSFNMIESYETVTNIVRRYNYKDKLVNKESARTDARKNWKEIGKIKEIKEGYLSQVIHEISKMVLKYNAIIVMEDLNYGFKRGRFRVERQVYQKFENMLISKLAYLVDKSRKADEPGGVLRGYQLTYIPDSLEKLGSQCGIIFYVPAAYTSKIDPLTGFVNVFNFREYSNFETKLDFVRSLDSIRYDTEKRLFSISFDYDNFKTHNTTLAKTKWVIYLRGERIKKEHTSYGWKDDVWNVESRIKDLFDSSHMKYDDGHNLIEDILELESSVQKKLINELIEIIRLTVQLRNSKSERYDRTEAEYDRIVSPVMDENGRFYDSENYIFNEETELPKDADANGAYCIALKGLYNVIAIKNNWKEGEKFNRKLLSLNNYNWFDFIQNRRF

SEQ ID NO: 1010 - protein, 1288 aa, unidentified
  REGION 1..1288: note = Cas Enzyme sequence
MVGNKISNSFDSFTGINALSKTLRNELIPSDYTKRHIAESDFIAADTNKNEDQYVAKEMMDDYYRDFISKVLDNLHDIEWKNLFELMHKAKIDKSDATSKELIKIQDMLRKKIGKKFSQDPEYKVMLSAGMITKILPKYILEKYETDREDRLEAIKRFYGFTVYFKEFWASRQNVFSDKAIASSISYRIIHENAKIYMDNLDAYNRIKQIACEEIEKIEEEAYVFLQGDQLDVVYTEEAYGRFISQSGIDLYNNICGVINAHMNLYCQSKKCSRSKFKMQKLHKQILCKAETGFEIPLGFQDDAQVINAINSFNALIKEKNIISRLRTIGKSISLYDVNKIYISSKAFENVSVYIDHKWDVIASSLYKYFSEIVKGNKDNREEKIQKEIKKVKSCSLGDLQRLVNSYYKIDSTCLEHEVTEFVTKIIDEIDNFQITDFKFNDKISLIQNEQIVMDIKTYLDKYMSIYHWMKSFVIDELVDKDMEFYSELDELNEDMSEIVNLYNKVRNYVTQKPYSQEKIKLNFGSPTLADGWSKSKEFDNNAIILIRDEKIYLAIFNPRNKPAKTVISGHDVCNSETDYKKMNYYLLPGASKTLPHVFIKSRLWNESHGIPDEILRGYELGKHLKSSVNFDVEFCWKLIDYYKECISCYPNYKAYNFKFADTESYNDISEFYREVECQGYKIDWTYISSEDVEQLDRDGQIYLFQIYNKDFAPNSKGMDNLHTKYLKNIFSEDNLKNIVIKLNGEAELFYRKSSVKKKVEHKKGTILVNKTYKVEDNTENSKEKKVIIESVPDDCYMELVDYWRNGGIGILSDKAVQYKDKVSHYEATMDIVKDRRYTVDKFFIHLPITINFKADGRININEKVLKYIAENDELHVIGIDRGERNLLYVSVINKKGKIVEQKSFNMIESYETVTNIVRRYNYKDKLVNKESARTDARKNWKEIGKIKEIKEGYLSQVIHEISKMVLKYNAIIVMEDLNYGFKRGRFRVERQVYQKFENMLISKLAYLVDKSRKADEPGGVLRGYQLTYIPDSLEKLGSQCGIIFYVPAAYTSKIDPLTGFVNVFNFREYSNFETKLDFVRSLDSIRYDTEKRLFSISFDYDNFKTHNTTLAKTKWVIYLRGERIKKEHTSYGWKDDVWNVESRIKDLFDSSHMKYDDGHNLIEDILELESSVQKKLINELIEIIRLTVQLRNSKSERYDRTEAEYDRIVSPVMDENGRFYDSENYIFNEETELPKDADANGAYCIALKGLYNVIAIKNNWKEGEKFNRKLLSLNNYNWFDFIQNRRF

SEQ ID NO: 1011 - protein, 1288 aa, unidentified
  REGION 1..1288: note = Cas Enzyme sequence
MVGNKISNSFDSFTGINALSKTLRNELIPSDYTKRHIAESDFIAADTNKNEDQYVAKEMMDDYYRDFISKVLDNLHDIEWKNLFELMHKAKIDKSDATSKELIKIQDMLRKKIGKKFSQDPKYKVMLSAGMITKILPKYILEKYENDREDRLEAIKRFYGFTVYFKEFWASRQNVFSDKAIASSISYRIIHENAKIYMDNLDAYNRIKQIACEEIEKIEEEAYVFLQGDQLDVVYTEEAYGRFISQSGIDLYNNICGVINAHMNLYCQSKKCSRSKFKMQKLHKQILCKAETGFEIPLGFQDDVQVINAINSFNALIKEKNIISRLRTIGKSISLYDVNKIYISSKAFENVSVYIDHKWDVIASSLYKYFSEIVKGNKDNREEKIQKEIKKVKSCSLGDLQRLVNSYYKIDSTCLEHEVTEFVTKIIDEIDNFQITDFKFNDKISLIQNEQIVMDIKTYLDKYMSIYHWMKSFVIDELVDKDMEFYSELDELNEDMSEIVNLYNKVRNYVTQKPYSQEKIKLNFGSPTLADGWSKSKEFDNNAIILIRDEKIYLAIFNPRNKPAKTVISGHDVCNSETDYKKMNYYLLPGASKTLPHVFIKSRLWNESHGIPDEILRGYELGKHLKSSVNFDVEFCWKLIDYYKECISCYPNYKAYNFKFADTESYNDISEFYREVECQGYKIDWTYISSEDVEQLDRDGQIYLFQIYNKDFAPNSKGMDNLHTKYLKNIFSEDNLKNIVIKLNGEAELFYRKSSVKKKVEHKKGTILVNKTYKVEDNTENSKEKRVIIESVPDDCYMELVDYWRNGGIGILSDKAVQYKDKVSHYEATMDIVKDRRYTVDKFFIHLPITINFKADGRININEKVLKYIAENDELHVIGIDRGERNLLYVSVINKKGKIVEQKSFNMIESYETVTNIVRRYNYKDKLVNKESARTDARKNWKEIGKIKEIKEGYLSQVIHEISKMVLKYNAIIVMEDLNYGFKRGRFRVERQVYQKFENMLISKLAYLVDKSRKADEPGGVLRGYQLTYIPDSLEKLGSQCGIIFYVPAAYTSKIDPLTGFVNVFNFREYSNFETKLDFVRSLDSIRYDTEKRLFSISFDYDNFKTHNTTLAKTKWVIYLRGERIKKEHTSYGWKDDVWNVESRIKDLFDSSHMKYDDGHNLIEDILELESSVQKKLINELIEIIRLTVQLRNSKSERYDRTEAEYDRIVSPVMDENGRFYDSENYIFNEETELPKDADANGAYCIALKGLYNVIAIKNNWKEGEKFNRKLLSLNNYNWFDFIQNRRF

SEQ ID NO: 1012 - protein, 1288 aa, unidentified
  REGION 1..1288: note = Cas Enzyme sequence
MDSNITSFSFKYSLSKTLRFELKPVGKTLENIQNKGLIAKDEERSKSYARMKKTIDAFHKYFIELAMKEVELTKLNEYVEHYYESAERKKEDSFIKSFDKVKADLRKEIVKGFNSDKVKEIFSKIDKKELITELLEDWIQNQPNKEEIYFDEGFKTFTTYFGGFHENRKNMYSDKEQSTAIAYRLIHENLPKFLDNIKNFEDAVQKLGEEKIAEIEKTLEPILQGKTLGEVFILEYFNHTLTQTGIELYNTILGGYTQNEGRIKIQGLNEYFNLYNQTQQDKKNKAAKLKPLYKQILSDRGTTSFLIEKFENSQEVLDAINEFYLFNLIEYKPEDKDETENVLSKLKELLAELSQYDLSKIYLKNDRAITDISQTIFGDWNIIKVALEQHWLNANTDKNKALTKKQEEAKSKFLSKSQFSIAEIEAALFAYKNEADVLKDLKESDHPIADYFKTHFKAKKEKETDKDFDLIANIDAKHSCIKGVLNSDYPEDKKLYQQQKDIDNIKIFLESIMELLHFVKPLALTKGNSLEKEDKFYGQFETWFEQLSLLTPLYDKVRNYATQKAYSIEKFKLNFESGYFFSGWGIDYDSKSCLVVIKDENYYLLIVDKKLQKSEIEFLKENVNKNPAQRVIYDFQKPDNKNVPRLFIRSKGDRFAPAVHRYNLPIDSIIDIYDNGYFKTEYRAQNLSHFKECLSKLIDYFKLGFERHESYKHYQFNWKNSTQYNDIAEFYKDVINSCYQLKLEEINFDNLLELINLQKGYLFQIYNKDFSEYSKGKPNMHTMYWRALFDEENLKDVVYKLNGEAELFYRKKSIDDDKKIIHKANEKLANKNPLNPKRESKFEYELIKDKRFTVDKFSFHVPITMNFKADGNDYINQDVLKFLKNNPDVNIIGLDRGERHLIYLTLINQKGEILDGLQFSLNEILNTYKNSKGENVELKTSYHTLLDAKEKERDEARKTWKSIENIKELKEGYISQVVHIIAKMMVEFNAIVVMEDLNFGFKRGRFKVEKQVYQKLEKMLIDKLNYLVFKDVEESKSGGLYNALQLTNKFTSFKEMGKQSGFLFYVPAWNTSKIDPTTGFVNLFDTRYESIEKAQQFFKKFKSIQYNSQKQYFEFAFDYSEFTNRAEGSKTNWKVCTQGDRIITFRNPESNNQWINKKVNLSQEFEDFFGKHNVIYGNGENFQPQIEAQTTKEFFEKLLQLFKLTVQMRNSKSDEDYLISPVINKTGEFYDSREANDTLPKDADANGAYHIAKKGLWVLEQINETEDYKKLKLAISNKEWLQFVQKNN

SEQ ID NO: 1013 - protein, 1288 aa, unidentified
  REGION 1..1288: note = Cas Enzyme sequence
MVGNKISNSFDSFTGINALSKTLRNELIPSDYTKRHIAESDFIAADTNKNEDQYVAKEMMDDYYRDFISKVLDNLHDIEWKNLFELMHKAKIDKSDATSKELIKIQDMLRKKIGKKFSQDPEYKVMLSAGMITKILPKYILEKYETDREDRLEAIKRFYGFTVYFKEFWASRQNVFSDKAIASSISYRIIHENAKIYMDNLDAYNRIKQIACEEIEKIEEEAYDFLQGDQLDVVYTEEAYGRFISQSGIDLYNNICGVINAHMNLYCQSKKCSRSKFKMQKLHKQILCKAETGFEIPLGFQDDAQVINAINSFNALIKEKNIISRLRTIGKSISLYDVNKIYISSKAFENVSVYIDHKWDVIASSLYKYFSEIVKGNKDNREEKIQKEIKKVKSCSLGDLQRLVNSYYKIDSTCLEHEVTEFVTKIIDEIDNFQITDFKFNDKISLIQNEQIVMDIKTYLDKYMSIYHWMKSFVIDELVDKDMEFYSELDELNEDMSEIVNLYNKVRNYVTQKPYSQEKIKLNFGSPTLADGWSKSKEFDNNAIILIRDEKIYLAIFNPRNKPAKTVISGHDVCNSETDYKKMNYYLLPGASKTLPHVFIKSRLWNESHGIPDEILRGYELGKHLKSSVNFDVEFCWKLIDYYKECISCYPNYKAYNFKFADTESYNDISEFYREVECQGYKIDWTYISSEDVEQLDRDGQIYLFQIYNKDFAPNSKGMDNLHTKYLKNIFSEDNLKNIVIKLNGEAELFYRKSSVKKKVEHKKGTILVNKTYKVEDNTENSKEKRVIIESVPDDCYMELVDYWRNGGIGILSDKAVQYKDKVSHYEATMDIVKDRRYTVDKFFIHLPITINFKADGRININEKVLKYIAENDELHVIGIDRGERNLLYVSVINKKGKIVEQKSFNMIESYETVTNIVRRYNYKDKLVNKESARTDARKNWKEIGKIKEIKEGYLSQVIHEISKMVLKYNAIIVMEDLNYGFKRGRFRVERQVYQKFENMLISKLAYLVDKSRKADEPGGVLRGYQLTYIPDSLEKLGSQCGIIFYVPAAYTSKIDPLTGFVNVFNFREYSNFETKLDFVRSLDSIRYDTEKKLFSISFDYDNFKTHNTTLAKTKWVIYLRGERIKKEHTSYGWKDDVWNVESRIKDLFDSSHMKYDDGHNLIEDILELESSVQKKLINELIEIIRLTVQLRNSKSERYDRTEAEYDRIVSPVMDENGRFYDSENYIFNEETELPKDADANGAYCIALKGLYNVIAIKNNWKEGEKFNRKLLSLNNYNWFDFIQNRRF

SEQ ID NO: 1014 - protein, 1288 aa, unidentified
  REGION 1..1288: note = Cas Enzyme sequence
MYKSTQQFTKLYSLSKTLRFELEPIGKTSYFIEKKGIISEDKLRSENYQKMKNTIDGFHKYFIELAMENVHLTQLETFQKLYYASPEEKKNENFKKQFEEIQKKLRKEIADGFKTGKAKEIFSKINKKELITELLEDWVQKQPNKQYYFDPSFKTFTTYFTGFNENRQNMYTDKVQSTAIAYRMIHENLPKFLDNIKIFEQIKGIPELYEKSKTLFKNIEEFLNIKTIDEAFELPYFNEILTQKQIDIYNLIIVGRIAEEGKPKIQGLNEYINLYNQLQKEKNKRVPKLKVLYKQILSDREKTSFTIDKFENSQEVTEAINGFYHHNIISYKPADKPEPENILETLEELLSSLKEYSLDKIYLRNDNQLTQISQKIFGNFSVFLDALSYYYDKVIEPNFENDYQKANEKKKEKLDAEKNKYLKQDYFSIAHLQYALDNYVLVIDDSVEWKEKYSTSCIADYFKTHYKANKKEDSSKEFSFTADIQSKYSCIKGLLENYPMDKKLHQDKQSIDNIKLFLDSIIELLHFVKPLILATDSTLEKDQNFYGQLEPWFESLKEIIRLYNKVRNFATQKAYSTEKFKLNFDNSTLLDGWDINKETDNLGILFIKGHDYYLGIMDKKHNRIFKSIPAPNTDRTYQKVNYKLLPGPSKMLPKVFFSKSNIEYYRPSEEILRIRNHSTHTKNGKPQDGFEKKDFNLEDCHAMIEFFKQSIEKHPEWNNFGFKFSNTKSYKSIDEFYQEVENQGYYLNFTEVDEDYVHQLIDDGKLYLFRIKNKDFSTHSKGKPNLHTLYWKALFSPENLKDVVYKLNGQAEIFYRKSSIKPENKIIHKANQTIGNKNPLAKKKQSIFTYDIIKDKRFTVDKYQFHVPITLNFKSKGSDNINYEVLNYLKQNNKDVNIIGLDRGERHLIYLTLINQKGQIIHQESLNTIKSDNFEIETPYHELLIQKENERDEARKSWGTIENIKELKEGYLSQVVHKIAKMMVEHNAIVVMEDLNMGFKRGRFKVERQVYQKLEKMLIDKLNYLIFKDFHQNEPGGLFHALQLTSKFESFKKMGKQSGFLFYVPASYTSKIDPETGFVNLFQTKYENIEKAKSFFQKFKSIRYNKEQHYFEFEFDYNDFTTKAEGTKNKWTICTYGERILTFRNTAKNNQWDNQTVMLTEQFEDLFGKYNIVYGDGKDLKEKICEQNDKDFFKTMLNLFKLTLQMRNSITGTDEDFLISPVRNTRGEFFDSRKTDHFLPQNADANGAYHIAKKGLWWIKQIKEFNDNDWKKLNLDKTNKGWLKFVQE

SEQ ID NO: 1015 - protein, 1289 aa, unidentified
  REGION 1..1289: note = Cas Enzyme sequence
MSKFKEFIGLYPLSKTLRFELIPQGKTLENFKTSGILERDEHRSDSYKKMKDIIDNYHRFIIDESLNGFKLEIEKNDKYDSLEDYYTYYVIGKKNEAEKKKFIDIQANLRKQIVDQLKSNPNFKNLFKKELIKKDLVEYVGKDSEDISTVKEFANFTTYFSGFNQNRANMYSEAEKSTSIAFRLINQNLPRFIDNMEVYDKMKNTDVAECFNQIYSRYKEYLNVKKIDDLFQLNYYNILLTQRQIDVYNSIIGGLVTKDGVKEQGLNEMINLYNQNHDKTGRLPKFKILYKQILSERENISFLPEMFANDQETLNAVSDFYSSVKTKAIDKIKEILLHLDNYDKSHIFIKNDNLFLSEISKKLYGDWSYIQKSITEYYKSINEQKKNESSEKYQDRISKLIKVRDSYSIVELDNYIGNINSDKEKIESYFSSLGAFNTEKQQNDNLFLQMENNYASVRDMLNDSYPEDKNLASDKKNVELLKDFLDSIKAIQKFIKPLLGNGDEFGKDASFYGEFDAYYKEINEITALYDKVRNRVTRKPYSTDKIKINFDNPYFLSGWDVNKELENMGIILRKDGLYYLGIINGGIEPDTFNIPKHISSGTKFYEKMEYKFFKDVTTMVPKCSTQLKEVKEHFDKFSSDYSLSSNVFAKPLLITKEIFDLNNTLYGGSKKFQKAYLQKTNDIKGYRRAINVWISFCLDFLKSYRSTMCYNLTSLMDSSQYQSLDNFYDDVNKYLYNISFKKLPEKSVNELVENGNVFLFELYNKDFSAYSRGVPNMHTLYWKGLFDESNLKDIVFKLNGNAEIFYRKSSIKGNDMIIHPRGMCIKNKNVANKKKESKFDYDIIKNRRYTVDKFQFHVPITINFKGKEQQINGLVNEYIKENSIDHIIGIDRGERNLLYLSLINMDGIIVKQFSMNEVTSNYAGNKYAVDYHSLLDVKEGDRREARRNWQTIERIKDLKEGYLSQVIHEICKLMVQYNAIVVLENLNIGFMRGRQKVEKQVYEKFEKMLIDKLNYLADKKLNSTLDGGILRGYQLTNKFISFKSMGDQNGFLFYIPAWNTSRMDPVTGFVNLFDTHYENREKTKSFFSKFDFIRYNNKEDYFEFKFDYKQFTDRAEGTKSEWTICTQGERVETFRNMEKNSEWDSQTINLTEHFKNLFVHYKIDYSGNLKEFILSQTDKQFFEDLFHLFRLTVQMRNSVSNSDIDYIISPAKSSNGVFFNSNIERERGKDDKGNWISNLPIDADANGAYNIARKGLWVINQIKQVDSGDKIKLAISNKEWLSFAQHFND

SEQ ID NO: 1016 - protein, 1289 aa, unidentified
  REGION 1..1289: note = Cas Enzyme sequence
MEKNIFEDFTNLYSLSKTLRFELIPQGKTLEHIERNGLLFQDEERAKEYQNAKKIIDKYHQHFIEEVLKSVEIEKSLLEEYETLYFLMKKGEEEKILKELENIKSKIQKNISKQIEKHPRKKNLFSKELIDGGKKEEADIIEWLFSCKENNLTLFEDTEIGNVENAIEIIKQFKGWTTYFGGFHTNRENVYSDKDIPTSIIFRIVHDNLPKFLEDRDKFKQIQMNYPNLLQQKEIEENFMAELIFENKDCSTKLFSIVEVFQLENFNLFLNQSGIDKYNTLIGGKFIEGEVQKRKGINEYINLYSQQQNEKQVIKSIKKLKMVPLFKQILSDRSSNSFVLDKFSNDGQVVSAIDYYFQTLEEELEKHSFSEIIELLFSSDHFMDYDFSKLYIKNGQGLSALSQVVFGNYSVIGAALREFALNSVNPKDRVRLSKSEESKLEKLMKTSYFSLKSIQVALMMYVEGEYKFSKIVEYFCEMPKKYTQLMGQYMENRKLFENYFLSVEKKLLKTESQDVESIKALLDSCQQFLSSIDVLSLAKGNMVMEKDEHFYYFFEPFFLRIKEIIPLYNKVRNYITQKPYSVEKYKLNFENSLLAKGWDRNKEESNTALLFKKENNFYLGIMKKSSNKIFNDTEMIKNQGEGYQKVTYKLLPGANKMLPKVFFSEKSIGYYSPSEEILNIRNHSSHTKNGTPQVGYEKNEFSLTDCKKIIDFFKGSIEKHPDWKEFNFRFSETEKYQSIDEFYREVENQGYKITFNNISENYIHQLVEEGKLFLFQLYNKDFSKFSKGKPNLHTLYWKALFDDENLKDVVYKLNGEAELFYRKASLDKIITHPKNLPIINKNTKTVKKESLFEYDLIKNRRFTENKFFFHCPITMNFKSNGKNKFNDFTNEILKKNIDDIHILSIDRGERHLAYYTLLDGKGNIVKQNTFNIISNEKTTVDYHEKLEGLEVERDKARKEWKKIENIKEMKEGYLSQVIHEIAKMVVEYNAIVVFEDLNAGFKRGRFKVEKQVYQKLEKMLIEKLNYLVLKDKQPSELGGVFNAYQFTDKFTTFKDMRNQTGIIYYVRADFTSKICPVTGFVNLLYPKYETVEKSQEFFGLFDEIRYNKEKKYFEFKFSYKEFGKECPGDWILCTHGTRLENFRNSEKNSSWDTREINITQLFENILKSYGIEYENGTCLKNSIIVQKEKKFFVDLVRVLNLTLQMRNSKTGTQIDYLISPIADSCGNFFDSRNSDCRLPENADANGAYHIGIKGLMIMERIKQLSEEKKLTLGIKNSEYFEFVQRRLSE

SEQ ID NO: 1017 - protein, 1290 aa, unidentified
  REGION 1..1290: note = Cas Enzyme sequence
MTTFEQFTNLYQQTKTLRFELIPQGKTLEHIEQKGLITQDEERATSYKEMKKTIDGFHKYFIEMALSQVCLTHLEDFAKLYNAPNTEKKQEKYKKELEKIQTNLRKEIVKQFKSGEAKPVFLKLFKKELITELLKNWVKEKQNEENYYDEGFEKFTTYFSGFHENRKNMYTDKAQSTAIAYRLIHENLPKFIDNISIFQKIKTIPEIYDKCTILYQEIEEYLNISKIDEAFQLEYFNETLTQTDIAVYNLIIGGRTVEEGGKKIQGLNEFINLYNQKQERKNRVPKLKILYKQILSDRVDTSFLQEKFEDDEESTASQKVLDTIENYYKSNLIDYKPQDKEETENILEGIQQIVADLSSFDLEKIYIRNDSSINEVSKILFGDWSLIKAALSFQYANTTLENGRKPTIKQQEIHEKQKFYSIAEIESSLISFKQETEILKDLNENSQPIVNYFKEHCFAKQKEETDKIYDYVSNIKAKYSCIKGVLGQLYLQDKKLNQDKLTISNIKLFLDSILELMHFVKPLALPNDTILEKDEHFYGQFDIWFEQLQLLIPLYNKVRNFATQKRFSIEKFKLNFDNSHFLSGWASEYSSKGALIIKRNENFYLAIVNKKLKDKDISFLKKEPEGNLAHRVIYDFQKPDYKNIPRIFIRSKGDQFSPAVEKYNLPVQSIIDIYDNCYFKTEYRNRDPEKYKSSLIKLIDYFKEGLTKHESYKHYSFGWKESSEYEDISAFYNDVTNSCYQLLNEEINFNNLLELVAAGKIYLFQIYNKDFSPYSKGKPNLHTMYWKALFSPDNLKNVIYKLNGKAEMFYRRKSIDDNNQVVHRANEPIKNKNPLNPKTSSQFKYDIIKDKRYTVDKFQFHVPITLNFKATGGEYINSKVLEHLKNNPDINIIGIDRGERHLIYLTLINQNGEIKQQFSLNEIINSYKNKSDDEINVKTSYHSLLHNKEMERDKARKDWGTIENIKELKEGYISQVIHIIAEMMVEHNAIVVMEDLNFGFKRGRFKVEKQVYQKLEKRLIDKLNYLVFKDKLPNKVGGLYKALQLTNKFESFQKMGKQSGFLFYVPAWNTSKIDPTTGFVNLFDTRYHNIDKAKQFFESFDSIHYNSAQRYFEFKFDYSNFTDRAGNSQTRWTVCTFGNRIKTFRNKEKNNQWDNLNIDLTNEFKLFFEKYAIDFKAENLQSQVVNQDSKEFFTGLMYLLRLTLQMRNSMTNSDIDYLVSPVMNTSGVFFDSRNADNSQPKDADANGAYHIAMKGLWIIHQINKYEDDNWKKLKLAISNKEWLSFAQSNL

SEQ ID NO: 1018 - protein, 1290 aa, unidentified
  REGION 1..1290: note = Cas Enzyme sequence
MVTFENFTKQYQVSKTLRFELIPQGKTLDNMKRDGIISVDRQRNEDYQKAKGILDKLYKYILDFTMETVVIDWGELATATEEFRKSKDKKAYEKVQSKIRTALLEHVKKQKVGTEDLFKGMFSSKIITGEVLAAFPEIRLSDEENLILEKFKDFTTYFTGFFENRKNVFTDEALSTSFTYRLVNDNFIKFFDNCIVFKNVVNISPHMAKSLETCASDLGIFPGVSLEEVFSISFYNRLLTQTGIDQFNQLLGGISGKEGEYKQQGLNEIINLAMQQNPEVKEVLKNKAHRFTPLFKQILSDRSTMSFIPDAFADDDEVLSAVDAYRKYLSGKNIGDRAFQLISDMEAYSPERMSIGGKYVSVLSQLLFNSWSEIRDGVKAYKESLITGKKTKKELENIDKGIKYGVTLQEIKEALPKKDIYEEVKKYAMSVVKDYRAGLAESLPGKIETDDERASIKHIMDSMLGLYRFLEYFSHDSIEDTDPVFEEYLDAILDDMNETVPLYNKVRNFSTRKVYSTEKFKLNFNNSSLANGWDKNKEQANGAILLRKEGEYFLGIFNSKNKPKLVSDGGAGIGYEKMIYKQFPDFKKMLPKCTISLKDTKAHFQKSDEDFTLQTDKFEKSIVITKQIYDLGTQTINGKKKFQVDYPRLTGDMEGYRAALKEWIDFGKEFIQAYTSTAIYDTSLFRDSSDYPDLPSFYKDVDNICYKLTFEWIPDAVIDDCIDDGSLYLFKLHNKDFSAGSIGKPNLHTLYWKALFEEENLSDVVVKLNGQAELFYRPKSLTRPVVHEEGEVIINKTTSTGLPVPDDVYVELSKFVRNGKKGNLTDKAKNWLDKVTVRKTPHAITKDRRFTVDKFFFHVPITLNYKADSSPYRFNYFVHQYIKDCSDVKIIGIDRGERNLIYAVVIDGKGNIIEQRSFNTVGTYNYQEKLEQKEKERQTARQDWATVTKIKDLKQGYLSAVVHELSKMIVKYKAIVVLENLNVGFKRMRGGIAERSVYQQFEKALIDKLNYLVFKDEEQSGYGGVLNAYQLTDKFESFSKMGQQTGFLFYVPAAYTSKIDPLTGFITPFSWKHVKNREDRRNFMNLFSKLYYDVDTHDFVLAYHHSNKESKYTIKGNWGIADWDILIQENKEVLGKTGTPYCVGKRIVYMDDSTTGHNRMCAYYPHTELKKLLSEYGIEYTLGQDLLKTIQELDDDKLVKGLFYIIKAALQMRNSNSETGEDYISSPIEGRPGICFDSRAEDDTLPHDADANGAFHIAMKGLLLTERIRNDDKLAISNEEWLNYIQEMRG

SEQ ID NO: 1019 - protein, 1290 aa, unidentified
  REGION 1..1290: note = Cas Enzyme sequence
MGYENFINKNSCVKTLVNELRPTEWTRKHIEEDGILSADELRAEESDKLKSIMDDYYRRYIYTKLSGVNSLYWSEFFSIIEMAYKEGKKDKNCKAQLEKAQEEMRGKFYNVLSDDDIFKMMFSGKFVTKVLPEFVLNNKEYSDEEKQQKLDTLKLFKGFTTSLVPFFNNRENIFSKKPIHSSICHRTVDENTAIFYQNIISYKNIEDNAPQEIEKIEHHGRQQLDEWKLPDIYSYSFYNNVLTQQGIEFYNDICGIVNSHMNLYCQQTKEKSGQYRMRKLYKQILSISSTSYEVPYKYEDDAQVYSSINEFVDRIFNSNFSAKVEKMLGKAEEYDFDKIYIASKNYSSISNFISGKWNTLDDCIRRYYEDNTVGNGDKKEKKVEEKVKKDSFRSLDSIDKVVEMYGKGGKSAKEYIYQIREIYSDNKLYKFGQDGSDSVKLIENDAKIEHIKCVLDMLLNTNRFLDTFTVEDGEAIDVGFYSEIDDLKEIIDGIDPLYNRVRNYVTRKPYNKNKIKLNFNSPTLAEGWSKSKEYEDNAIILRRDGKYYLGIFNVKNKPDKKIMEGYSGYVGDGYEKMVYSLLPGAGKMLPKVFLSKKGIGNYKPSSYIIDGYDNDRHIKSSKNFDINFCHDLIDYFKASISANPDWKVFDFKFSDTKSYEDISGFYSEVEKQGYKISWVNISKEDIDRLDETGQIYLFQIYNKDFSESSMGTPNLHTLYFKNLFSEENIRETVLKLSGKGELFFRKASIDKPSGHRKGSILVNKTYKTNIGNEEVRVPVPDKEYMEIYTYLNNGRTTKLSENAQSLLDNKLVEYFEAEKEIIKDRRYTVDKFFIHTSVVINYNAEGASDKQLNEQVLEYISKQDDMHIIGIDRGERNLVYVSVIDMKGRIVEQKSYNVVNSYSYQKKLVERERTRDEARKSWKEVGRIKDLKDGYLSLVVHEIADMVIKYNAIIAMEDLNYGFKRGRFKIERQVYQKFESMLISKLSYLVDKTKKADEPGGVLKGYQLAFVPKDVKKVGRQCGIIFYVPPAYTSKIDPATGFVDLFKFKSGEKEGTARADNDRKEFLSKFDDIRYVEKNDNREEMFAFTFDYDNFAMHNTVIAKKKWTAYTFGSRIQKVYENGRYTSNTREIELSDKMKRLLNENNIEYGDGHNLVDDIRTLDVDSSGAVINEIFKIFRLTVQLRNSKSEAENEKNGEYDRIISPIMNDAGEFFDSFKYKKMNEETEPGKHNATMPIDADANGAYCIAMKCLYEAKNIKSGWEKEGKKNNDLLCVTNADWFDFMQNKRYV

SEQ ID NO: 1020 - protein, 1290 aa, unidentified
  REGION 1..1290: note = Cas Enzyme sequence
MDNFVRKYALSKTLRFELKPIGETADKINDFKNQAIASIVKQDKQRAEDYKDIKRIIDDYHRYFIEKVLGQEILTDNDIQNAFDSYVAFKGSKDDTKKKQYQAIQKILREKIAKVFKDQFDKYSLFGKELLNEKGSGQNKTKPILWQWLKQQLDNNKVSQQDFEKAEMLIKNFDKFSTYFKGFNENRQNIYSAKEQQTAISYRIVHENMVKHFNNILNFQSIQNSENLSGLKEQLKDYKNIFVPATFKACLSQTGINSYNEKIGHKADDINAKGINQLINEYCQKNSTKDKKVKLPKMAIFYKQILSDVEGKFRIDAFENDRQMLETINEFYIDIRDELEGVKICLGQYLTADNLGKIHIKKDSLTDISQKIWGNWGFINEVLEKYADEVLNLGKNKKEKWWKHEAFSIDDIQKALDNYFDGSDEKAERKTVARYFADFRVNNEDKNEDGDLITRIENAYQQAIEILSLDNLDKDRREPVNGKEGGKGFLQIEKIKIFLDSIMAVVQFARPLYLVKSGKMIEIDGEKYSDFYDTFDYLYKNISAVIGIYNKTRNYVTKKPYVTDKFKINFENSTLLDGWDVNKETDNTSVLLFKDGRYYLGVMQKYANNIFNYRIEPDESAAKRKTKDQLRQRVIADVTDAYYEKMVYKLLPEPSKMLPKVIFADTNIEYYNPSDKILEIREKGLHKKNANNPAAMNQWIDFLKESIKKHPEWNEYFYFKFSPTESYRDSSQFYKEVEEQGYHLSFDKIKASYIDEKIKAGELYLFEISSKDFSSYSKGRPNLHTSYWKLLFSKENLDDLVLKLNGQAEIFFRPASLEKSQTAVHKAKHPIDNKNPLNPKKHSTFDYDITKDRRFTADKFFFHCPITLNFRAASIAGRFNDDVNEYLKNNPDINIIGIDRGERHLLYYSIIDQKGNIKEQGSFNAVTNSYTSNGKNIDVKTDYHNLLDEKEKHRDSARKSWSTIENIKELKSGYLSHIVHKIASLMIEKNAIVVLEDLNFGFKRGRFKVEKQVYQKFEKALIDKLNYLVFKNNKSGEAGHYLSAYQFTAPFESFQKLGKQSGFLFYIWPQHTSKIDPVTGFVNLLNTSYASVNKSQELFSKFDSIVFNAQKDYFEFSFDYANFTDKAGKKKNWTICTAGKERYRYNPKTKEYNCYNVTEELKKLFGKYDIDYSNGDNLVNSISNSDKTEFFKGKDDEKGLLFLLGLTLQLRHIYKSGQEEKDFILSPVADKDGNFFDSRKAKDNQPKDADGNGAFNIARKGLIVLKQINENGKPETIKNTDWFDFAQGNK

SEQ ID NO: 1021 - protein, 1290 aa, unidentified
  REGION 1..1290: note = Cas Enzyme sequence
AKKQRKLEAVFENFDKFTTYFTDSFYNNRKNYYKTEGRVGQVATRIIDENLPRFCSNLIAFNEVVSLYSTLLNNFDLGWKEYLNEKKINQTWVEKFELSNYDWKALFNDVNYYNQCLLQEGIDKYNYIIKKLNKDINEYTQNKYKSVEKGNNNNPDINFFQKLHKQIHGERDFKLIEIDIDENNIFTKILPEFILHSDMKLMTKIDEEVGVEEIVGAERIIKIFIKQELKDLEKIYLSRRAIETISAKWFHSWETLKDLILGYLNKDLLESKKRKKVPDFVDFNIIKIVLENNKDDYKDLFKRKYFEADKNEFVDWIDSSGGTKKLEFGGENWINFLNVFEYEFGTLLTEYKKNKNALLYLIDKKIDYDKNNEVGQTAAIKNFADSALGIFRMVSYFALRKKGVMVEPKNGKDEIFYAFVDRYLDGDDNDREEQNKIVQYYNTLRNFVTQKAWSIDKVRLCFDCGEFLKGWDKDKIHERLGIILRNNNKFYLGILNKNHKQIFIKIKSHDNNNFYYVIYDYKQLNNVYRQIPRLAFPSRSVKKGDAYMLRAIQERKKKFFLEDEEFIELQEIKNEYDKIGNDLSKEKLTKLIEYYKKVVISNYSSLYNVSNLNNKKFNSINEFNQYVENLMYSLIPTRISPDFIKEKISKGELYLFQIYNKDFELDESIGKEKFGEDFAPVIMDGKNNLHTEYFKLLFNDSNLKNPNGVVFKLSGGAKMFYRPATENLPIKKDRDGNIIKNKKGENVIVGQRYKEDKYFLHLPIILNFVNKGKNYSINDMVNKAITNASDDQDKFRIIGLDRGEKHLVYYSVINERQEIIEIGSLNNISRKDNKGEIIEEKNWYHDKFGNIEKEPTKEYHKDYHNLLDQREIERLKSRQSWEKIENIKELKEGYISAVINKICNLVIKAIKENKIPIVALENLNSGMKRGRIKIDKQIYQMLELKLAKKLNFLVDKKEKNYLSAWQFTPKIETFSGDIEKKNQVGIIFYVDPAFTSATCPNCGFRKRIKMDPQNAKKKIKDMEITYENGIYKFDYPIENGENDVVYSDVERLKWDNEKKKVIKTKNVSDDFGKLFEDIKDKNNLKKELLSIGEENKEFWKEFSRCFNLLLRIRNSKLIKRKLNDDTGKVEIIADDDLADRDRDFIYCPQCHFHSEGGDVFGEFVKKKYLGKDNFEFNGDANGAYNIARKTIIAVNKIKDYQLGLNHFIEKYRISELPNNGKDKKNIFYNNNSYILSFFEVQDEKFRKVKVYGLKKDGDRQIIQKKEMWYRRYPDIFVNNKEWDKFVQNKS

SEQ ID NO: 1022 - protein, 1290 aa, unidentified
  REGION 1..1290: note = Cas Enzyme sequence
MVTFEDFTKQYQVSKTLRFELIPQGKTLENMKRDGIISVDRQRNEDYQKAKGILDKLYKYILDFTMETVVIDWEALATATEEFRKSKDKKTYEKVQSKIRTALLEHVKKQKVGTEDLFKGMFSSKIITGEVLAAFPEIRLSDEENLILEKFKDFTTYFTGFFENRKNVFTDEALSTSFTYRLVNDNFIKFFDNCIVFKNVVNISPHMAKSLETCASDLGIFPGVSLEEVFSISFYNRLLTQTGIDQFNQLLGGISGKEGEHKQQGLNEIINLAMQQNLEVKEVLKNKAHRFTPLFKQILSDRSTMSFIPDAFADDDEVLSAVDAYRKYLSEKNIGDRAFQLISDMEAYSPELMRIGGKYVSVLSQLLFYSWSEIRDGVKAYKESLITGKKTKKELENIDKEIKYGVTLQEIKEALPKKDIYEEVKKYAMSVVKDYHAGLAEPLPEKIETDDERASIKHIMDSMLGLYRFLEYFSHDSIEDTDPVFGECLDTILDDMNETVPLYNKVRNFSTRKVYSTEKFKLNFNNSSLANGWDKNKEQANGAILLRKEGEYFLGIFNSKNKPKLVSDGGAGIGYEKMIYKQFPDFKKMLPKCTISLKDTKAHFQKSDEDFTLQTDKFEKSIVITKQIYDLGTQTVNGKKKFQVDYPRLTGDMEGYRAALKEWIDFGKEFIQAYTSTAIYDTSLFRDSSDYPDLPSFYKDVDNICYKLTFEWIPDAVIDDCIDDGSLYLFKLHNKDFSSGSIGKPNLHTLYWKALFEEENLSDVVVKLNGQAELFYRPKSLTRPVVHEEGEVIINKTTSTGLPVPDDVYVELSKFVRNGKKGNLTDKAKNWLDKVTVRKTPHAITKDRRFTVDKFFFHVPITLNYKADSSPYRFNDFVRQYIKDCSDVKIIGIDRGERNLIYAVVIDGKGNIIEQRSFNTVGTYNYQEKLEQKEKERQTARQDWATVTKIKDLKKGYLSAVVHELSKMIVKYKAIVALENLNVGFKRMRGGIAERSVYQQFEKALIDKLNYLVFKDEEQSGYGGVLNAYQLTDKFESFSKMGQQTGFLFYVPAAYTSKIDPVTGFINPFSWKHVKNREDRRNFLNLFSKLYYDVNTHDFVLAYHHSNKDSKYTIKGNWEIADWDILIQENKEVFGKTGTPYCVGKRIVYMDDSTTGHNRMCAYYPHTELKKLLSEYGIEYTSGQDLLKIIQEFDDDKLVKGLFYIIKAALQMRNSNSETGEDYISSPIEGRPGICFDSRAEADTLPYDADANGAFHIAMKGLLLTERIRNDDKLAISNEEWLNYIQEMRG

SEQ ID NO: 1023 - protein, 1291 aa, unidentified
  REGION 1..1291: note = Cas Enzyme sequence
MTTETKKFESFEDFTNLYEVQKTLRFELKPEPETDAFFKKIGIWYAKDEKRARERSIVKFYMDLLHREFTEESLKKVSLDFSKFFTLFKDLKKAENKGVQAVDQKKNKKGEIDRKKKEIADEFVNLRVIFVSQGFNAVNSEWKERYNADGNKIKNEKSDKYLILSENVLNLLKNRFTPQEVEKLKSIDKKHKNDYKSVINGEGKNIFNNFVGFFGYFDNLINNRKNFYESDGKSGRIATRSINENLNFFAGNVCIYENEFNKDLISKLIEKEKEIFQLPFYNKCLLQKGIEKYNFVVGDINKKINKYNQQNKKKIPFLKILYKQVLSMEEKEEYEHIEINNDDDLLSTIANFILLNQKKIKTGREIFKSFILRCQTDDNIDQIYLPKDSINTISNRTFKPWDEIMTLYGNKRYFISLKELRDFMLNERWKAMAQEKKLFKESVKDSSNVKKNVFLSFVAILKKEYQNQFDGFEKTTRQGKIKMIGYDKALLLLNEKIIWFKEKNGKLNDNEKMDWIKAIKDYSDAALRIFQMTKYFWLPITGDENDKDYRKIKAEIDDLPKDENFYNKVNEYIVGYEPFVYRSSFQEYLTKRPFSEDKFKINFDSSSLLKGWDKNKINERLGIILRDGDEYLLGIINKDNKHCFDDLSKFYAHGDDSYYELMQFKQLTGLYRQLPRMAFPKKKKAIIEVSQSVLKIKNEFDDFQKLKKEHKISSKEIFDNQKINILISYYRSFVKEYYKKENIYDFSLLDDGKTYERLSDFYADVDKITYNLSFIKVKKSEIKRNVCEGKLFLFSIYNKDFSGNSKGKNNLHTNYFNAVFNKENNPNGHLRLGANAGIYYRPASLKESDQKKEIIKTRSGKEINKKENPYHLKRYAQNKILFHLPVVLNADTYDEENVNQNVFKYIKNNFDNIKVIGIDRGEKNLAYYSVISRAADGKIKIEDCDDLNLGYLEPLNKLAEERQEQRRAWQSISKIKGKRDGYISHVIHKIVELILKHKAIVVFEDLSGGFKRSRMKIEKAPYQQLELALINKLNYLVRKKAKQEEAGHYLSAYQFAERIGSYKKVGKQTGIIFYTQAGYTSRTCPKCGWRKRIQGLYYKDRKSAQKIFTAERGVQISYDVANNYFVFKYHPVYNQKESKEWDKEVYSDVSRIKWDNKEKKYKKGYEGEITKKLKELFTGIDVQKNINIQIKDNDNASFWENLINLFRLILEIRNTDNKTGEDYIECPHCHFHSDKGFQGYKWNGDANGAYNIARKGLIILKKIKDAKEPEKLKFGDLVVNLDEWDKFVQKD

SEQ ID NO: 1024 - protein, 1291 aa, unidentified
  REGION 1..1291: note = Cas Enzyme sequence
MENLKDFTGLYPLSKTLRFELKPIRKTLENIQSSGLLERDQHRAESYKKVKKIIDDYHKSFIDRTLTNFKLKLISDSKKDSLEEYYLFYHLNYKDINRSKSLTEVQDKLRKQIADQLTKNEAYKRIYKKELIKEDLCNFINSENYLYILKHRESNNDELTEEQFLNLRNQDKELVNEFKDFTTYFTGFNQNRQNMYSAENKSTAIAYRLIHQNLPRFIDNMDVFEKVSATNVSEKINSLYDDLKEYLNVQSLAEMFKLSYYSILLTQNQIDVYNAVIGGKTLDDGTKIQGLNEHINLYNQQQKDKKYLLPKLKPLYKQILSDRNAISWLPEEFNDDNEMLQAIDKCYHELNQQVFQQLKDLLLSLKEGDSEYNMDKIYIRNDAQLSEISQRLLGNWNIISRAIENDFSKNNPQKIRESADNYEKRKDKYLKSFGSLSLGYINNCLSLLGDPYNKYKVEDYFFTLGIKKEDSNKCDNLFTKESKAYEVVKDLLCNKYPEDKNLAQQKKDVEHIKNLLDSIKDIQHFIQPLLGTGDEPNKDEKFYGDFLAICDKLDEITPLYNKVRNRMTRKPYSIEKIKINFDNSTLLDGWDLNKEIDNTSVILRKDGLYYLAIMNKKYNKVFNASNLPCDGSCYEKMDYKLLPGPNKMLPKVFIYSSRISEFNPSERILDNYQKGTHKKGDNFNLDDCHALIDYFKRSIAKHEDWRNFDFHFSDTNTYKDISGFYREVEQQGYKISFRNISETYINALVDEGKLYLFQIYNKDFSPYSQGTPNMHTLYWRMLFDAKNLENVVYKLNGQAEVFFRKSSINETDKIVHPAQQPINNKNELNEKRQSVFNYELVKDRRFTVDKFQFHVPITLNFKSIGMNNINSTVNSYLKDSKVTHIIGIDRGERNLLYLSLIDMKGNIVKQISLNEIVNQHKDNLYQTDYHSLLESKEVSRDEARKSWKAIENIKELKEGYLSQVIHKISQLVVEYNAIVVLENLNFVFMRGRQKVERQVYEKFEKMLIDKFNYLVDKKAAKSEPGGLLQALQLTSKFDSFQNLGKQSGILFYIPAWNTSKMDPETGFVNLFDVHYESIEKSKTFFKKFDSIRYNALKGYFEIAFDYTNFTSKAEGTRSNWVVCTYGSRIKTFRNPEQNSNWDSVEIDLTSEFKTFFDKYHIELNDKIKEQVIKQNDKTFFEGFHQLFKLTLQMRNSKTGSDIDYMISPVMGENGKFFDSRLELKQGKNTEGYWISSMPVDADANGAYNIARKGLWVINQIKSTDDLDKLNLAISNKEWLKYAQTKPYLNND

SEQ ID NO: 1025 - protein, 1291 aa, unidentified
  REGION 1..1291: note = Cas Enzyme sequence
MHLTSKFSQFTKQYSLSKTLRFELKPLGNTSAMLEEAQVLQKDQLIQEKYKKTKPFFDQLHREFVKEALQETEIEGIEEYSQILEEWKKDKKNKEITKQYQEATKKLRAEVVKLFQKKAAQWSELTYPHLKFKNNTIELLSEENIFSLLKERYGNEDNSTLVDETTGEIISIFDSWKGFTGYFGKFFETRKNFYKDDGTASAIATRIIDQNLKRFCDNIQTFESSKEKIDFSEVEQYFEKPLSEVFSIQFYNTCFLQEGIDFYNTILGGKTLENGEKKKGLNELINLHKQKTGEKLPFLKALDKQILSEKEKFIDEIENDDALIEILKTFLTSAETKTQIIKKLFEDFINNQQKYDLSQTYLSKEALNTIAHKWTEETGTFEENLFIVLKDAKILSSSAKKKDDGYSFPDFIPLCFVKEALEKITNEKFWKERYLVTQEIAKSKGFLDATTKENSWWQFLSIFSFEFTTLFEREVTDTETGKKTKIGYNVSKEALERLLTDFKLDQSAKIIIKDFADSLLTIYQMAKYFSLEKKRAWNDQYDTADFYENPDYGYKKFYENAYEEIVQPYNKLRNYLTKKPYNEEKWKLNFDNPTLADGWDKNKESANLAVILRKDGKYFLALMKKGNNQLFDDRNAENFSKNIGQGKYEKIVYKFFPDQAKMFPKVCFSTKGLEFFQPSEEIWNIYKNSEFKKGETFSLKNMHKLIDFYKDCLKQYEGWKCYDFTHVKPTEKYHENIGEFYKDVAEDGYKVSFQDISESYINEKNNNGALYLFQIKNKDWNLDKAKDGKKKTTAKNLHTLYFESLFSAENSAENFPVKLNGQAEIFYRPKTETEKLGTKQDNQGKEVINHKRYNENKIFFHVPLTLNRTAPDPIQFNSKINNFLANNPDINIIGIDRGEKHLAYATVISQSGKILDSLSLNQLNGVNYAEKLNEKAKNREKARQDWQDVEGIKNLKKGYISWVVRTLADLAIKHNAIIIFEDLNMRFKQIRGGIEKSIYQQLEKALIEKLNYLVEKGETDPEKAGSLFKAYQLTAPFTTFKDMGKQTGIIFYTQAAYTSRIDPLTGWRPQLHMKYSNAEKAKEAILNFSQIAYTENYFSFTYNLKKCKDMKEYPQKSQWTICSCVERFRWNKTLNNNKGGYEHFPTSGKGSINEKLQEILTKAGISYTNGNILEQINNLDTKGNETFFRDLIFFFNLICQIRNTNDKDTTPDHQDFILSPVAPFFDSRNTTAFGENLPQNGDENGAFNIARKGIMLLHRISAHANNKGSCEKLQWDELFISNTDWDNFATK

SEQ ID NO: 1026 - protein, 1292 aa, unidentified
  REGION 1..1292: note = Cas Enzyme sequence
MVSNNENTPTYNSLTNLYSVSKTLRFELKPQYSTLDHIRDDQIVDKGEDLKNHYKTFKKILDQVFSRIINDSLDKTYLDQKYISTYQDLAFKHRDQLTEKDRAELKTLKETLKKQIDKSLDHKDKKAIFSDPVKFLLDNESEFADLIGDNRPSIEAFNRQKGYLSGYLQNRANIFDRTTNETSVAFRIVEENLAIFLNNRITLQHFLEKVTDKDGLLKSLKEALSQLGFKLKLEDLLSLDYFNRTLSQSGIDQYNLLISGKTLENGTKLQGINEILNQYLQQHQEEKLHKIKLKQLYKQILSESKTESFTLDFVEDNKGLAAMLLQFIDFANQLIEEKMPLLGMIQELKNSSVSVEFLSRLHLNRKNIKRLSNFIYKDYGYIEQSLEENFLSTIEGKITKKVLEEHHKQDTFTFHEILVALQKQQYEKNGTLESADQLLLPGIVNFIYQNLDCECSTLLEKARSEKQPLLDLFKEKQLLEDQNTESHASKYSDRPFNDHEIKTIKTTLDFYKNLQSNLAIFRISDENLKLDSEFYSEFDEFYQGLKNIIPVYNKSRNFLTKKPFSTEKTKLIFNSPQLLDGWSKSKESDCLGTIFIKDGKYYIGIINSVTNVKKTLFEPHNFANIDQSQYFEKMNLFFLSDLKRDFPKKYFSEKWHSQYPIPADLRKKYDYYRIDEHKDERKNDLEYHHQLIAYYQDCLKKDTEWQIYQFKYKSPEEYSDVNEFLSELTPSTYKMEFTKIPAEYIKKLVDDGKLYFFQIYSKDFSEFAKGKPNLHTLYLKAVFDQKNAEEFNYNYKISGSAEIFYRPASIEVRVTHPKNQPIKNKNKNNPKTESVFQYDLYKDRRYMSDKFFLHLPVELNRTPLLPNDSSVNSMVNQVVSSRNQNYFLGIDRGERHLIYLVLIDQNGKIIKQQTLNQITSSYQEKSNNQTVEVVTDYHDLLDDKEKLRKKNLQEWQSVENIKELKAGYLSNVVNEIGKIIAEYQPVIMLENLNTGFKNSRIKIEKQVYQKFEKALIDKFNYFMRKDIDPSTIGGLYHALQLTKEYSKQYNGKQNGIIYYIPASYTSNIDPTTGFISAFVQTRYENVEKAKALIEKFNDITYDADESLFCFTADYKKFGPEAKLWQQNVWQIYTNGDRIYTFRDKEEWQSKSYILVEEFKDLFTKYQINYHNDLKTQILSQTDAGFFKQFLFLLRLTLQMRNSRTTDSNEADIDTKKRENDYIISPVKNQYGKFYDSRQDYMEWPENADANGAYNIARKGLIMLKHLKEGLPEKRICDISTEEWVQFVEELNK

SEQ ID NO: 1027 - protein, 1292 aa, unidentified
  REGION 1..1292: note = Cas Enzyme sequence
MVSDNENTPTFNSLTNLYSVSKTLRFELKPQYSTLDHIKDDQIIDKSEDLKNHYKTFKKILDQVFSRIINDSLDKTYLDQKYISTYQDLAFKHRDQLTEKDRAELKTLKETLKKQIDKSLDHKDKKAIFSDPVKFLIDNESIFADLIGDNRPSIEAFNRQKGYLSGYLQNRANIFDHTTNETSVAFRIVEENLAIFLNNRITLQHFLEKVADKDGLSKSLQETLSQLGFKLKLEDLLSLDYFNRTLSQPGIDQYNLLISGKVLENGTKLQGINEILNQYLQQHQEEKLHKIKLKQLYKQILSESKTESFTLDFVEDNKGLATMLLQFIDFANQLIEEKMPLFGMIQELKNDPVLVESFSRLHLNRKNIKRLSNFIYKDYGYIEQSLEENLLSTVEGKITKKILEEHRKQDTFTFHEILVALQKQQYEKSGKLESADQLLLPGIVDFVYQNLDCEYSTLIEKVKSEKQPLLDLFKEKQLLEDQNTESHASKYSDRPFNDHEIKIIKTTLDFYKNIQNNLALLQISDENLKLDSEFYSEFDEFYQSLKNIIPVYNKSRNFLTKKPFSTEKTKLIFNSPQLLDGWSKSKESDCLGTIFIKDGKYYIGIINSSTNAKKTLFEPHNFASLDQSQYFEKMNLFFLSDLKRDFPKKYFSEKWHNQYPVPADLREKYDYYRIDEHKDERKNDLKYHQQLISYYQDCLKKDAEWQIYQFRYKSPEEYSDVNEFLSELTPSTYKMEFTKIPAEYIRKLVDDGKLYFFQIYSKDFSEFAKGKPNLHTLYLKAVFDQKNAEEFNYNYKISGSAEIFYRPASIEVRVTHPKNQPIKNKNKNNPKTESVFQYDLCKDRRYMSDKFFLHLPVELNRTPLLPNDSSVNSMVNQVVSSRNQNYFLGIDRGERHLIYLVLIDQNGKIIKQQTLNQITSSYQEKANNQIIEVVADYHDLLDDKEKLRKKNLQEWQSVENIKELKAGYLSNVVNEIGKIVIEYQPVIMLENLNTGFKNSRIKIEKQVYQKFEKALIDKFNYFMRKDLDPSAIGGLYHALQLTKEYSKQYNGKQNGIIYYIPASYTSNIDPTTGFISAFIQTRYENVEKAKALIEKFNDITYDADESLFCFTADYKKFSPEAKLWQQNVWQVYTNGDRIYTFRDKEEWQSKSYILVDEFKDLFAKYQINYHNNLKTQILSQTDAGFFKQLLFLLRLTLQMRNSRTADLNEADIDTKKRENDYIISPVKNQYGKFYDSRKDYMDWPENADANGAYNIARKGLIMLKHLKEGLPEKRICDISTEEWVQFIEELNK

SEQ ID NO: 1028 - protein, 1292 aa, unidentified
  REGION 1..1292: note = Cas Enzyme sequence
MVSEKEKTPTFNSLTNLYSVSKTLRFELRPQYSTIDHINEDQIVDKGEDLKNHYKTFKKILDQVFSRIINDSLDKTYLDQKYISTYQDLAFKHRDQLTDKDRAELKTLKETLKKQIDKSLDHKDKKAIFSDPVNFLLDNESEFADLIGDNRPSIEAFNRQKGYLSGYLQNRTNIFDHTTNETSVAFRIVEENLAIFLNNRITLQHFLEKVADKDGLLKSLQETLFQLGFKLKLEDLLSLDYFNRTLSQSGIDQYNLLISGKTLEDGAKLQGINEILNQYLQQHQEEKLHKIKLKQLYKQILSESKTESFTLDFVEDNKGLAAMLLQFIDFANQLIEEKMPLLGMIQKLKNSSASSEFLSQLHLNRKNIKRLSNFIYKDYGYIEQALEENFLSTIEGKITKKVLEEHRKQDTFTIHEILVALQKQQYEKNGKLEPADQFLLPGIVDFVYQNLDCEYSALLEKVRSEKQPLFDLFKERQLLEGQNTESHASKYSDRPFNDHEIKTIKTTLDFYKHLQSNLAIFQISDENLKLDSEFYSEFDEFYQGLKNIIPVYNKSRNFLTKKPFSTEKTKLIFNSPQLLDGWSKSKESDCLGTIFIKDGKYYIGIINSATNAKKTLFEPHNFANIDQSQYFEKMNLFFLSDLKRDFPKKYFSEKWHSQYPIPADLREKYDYYRIDEHKDDRKNDLEYHHQLIAYYQDCLKKDTEWQIYQFKYKSPEKYSDVNEFLSELTPSTYKMEFTKIPAEYIKKLVDDGKLYFFQIYSKDFSEFAKGKPNLHTLYLKAVFDQRNAEEFNYNYKISGSAEIFYRPASIEARVTHPKNQPIKNKNKNNLKTESVFQYDLCKDRRYMSDKFFLHLPVELNRTPLLPNDSSVNSMVNQVVSSRNQNYFLGIDRGERHLIYLVLIDQNGKIIKQQTLNQITSSYQEKSNNQTVEVVTDYHDLLNDKEKLRKKNLQEWQSVENIKELKAGYLSNVVNEIGKIVIEYQPVIMLENLNTGFKNSRIKIEKQVYQKFEKALIDKFNYFMRKDIDPSTIGGLYHALQLTKEYSKQYNGKQNGIIYYIPASYTSNIDPTTGFISAFIQTRYENVEKAKALIEKFNDITYDADEPLFCFTVDYKKFSPEAKLWQQNVWQIYTNGDRIYTFRDKEEWQSKSYILVDEFKDLFAKYQINYHNDLKTQILSQTDAGFFKQLLFLLRLTLQMRNSHTTDSNEADIDTKKRENDYIISPVKNQYGKFYDSRQDYMDWPENADANGAYNIARKGLIMLKHLKEGLPEKRICDISTEEWVQFVEELNK

SEQ ID NO: 1029 - protein, 1292 aa, unidentified
  REGION 1..1292: note = Cas Enzyme sequence
MGNEKTFKSFEDFTNLYEVQKTLRFELKPIGKTQELIEANKVLEKDKLIDDNYHKIKYYLDLLHKKFIKEALSDISFDLKDYYKASQVLDKKDKKTRDTLRIEENKLRDILAVKYDLKANEWKEKYKANFDLKKEGIEILFEKDNLNILKAEFLVKPTNDSSAPDIEYLEPLTAEKVNLFDSFKGFTTYFSGFNQTRRNFYSKDDSTTAVANRVVNENLRRFCENIKLFEDKKSNYREIVITDGERQIFDINSYNQCLTQDGIDRYNEVIGRKAKDESVKGLNQKVNEYRQQTKIKLPFFKELYGQIMGGKELAFQEVVIESDGKLFDVLEEFIKLNDAKINESKELTNSFFEHNEDFDVEKIYLKRLAINSIKKIFGNSAPIFENALPHKETASREEKYKLEDFISIAQIRDVLLGKELDLPKKMKQLGIISQTMVAEELFNGADKKLIAENNYQTFLNAWREEFAARRSDYEIAKDAALEVIGSDKTFSKKENQIIKIKEYCDAALALYQMMKHFALEKGSKPVADIESDNDFYKKIDQYCFNYPIIAYYNAFRNFVTKKDYLGRLLFPGFNGERQEKDLRSKRVLDGAEKIKLNFDIAHDHDWGGLAILFRERSSYFIGIPVKGKKVKIKTNVADYSGDGYEMMEYIQLKFKTLVGKGYVSKFGAKYSEQPDLVAIKNAKELIAEKYLNKYPLLGNVLHRNYDSKKEFGNDIGELLDDSYALKFRAVNKDFVNKLNEGGDLYLFSIESKDFRVGSTGNSNLQTQYFNYLFDGKGEIKLNSAVELYMRPRNINLPVKKDKQNKEVIDHKRYAEDKYFLHISIILNFGKEKIGNNGGAIKSFGKKFNTTSNQWLIKNKDVNIIGIDRGEKNLAYYSIIGQDGKMIDGGSFNEIEVKDRNGNVIRTVDYADLLRKKAGNRDEARKNWKTIENIKELKNGYISQVVRKICDLILEHNAIVVFEDLNVGFKRTRSALDFPIYQKLELALVKKLNYLVNKNEKLDMAGHYLKAYQLAPLVANPKDIGKQTGVIYYTPAGYTSKTCPLCGFRKNNNEFYFESIEKAKKTLSKLESIGYDEVKKRFAVTYCFSDFQSDEEKTKAKKQKPNELYANQERKDKFTVYSDVLRYRWHNLKTERAMQVGCGEEIVADSKTARGLVKKYDINECLVGLFDGKIDYRGSDILNELAKKEFDKDFYKNLLHYLNLILEIRNCISDTKIDYIQCPVCGFHSDHPAEKLRLVTNGDANGAYNIARKGLLILEKIRRFKEDIEKIEWKDLSVGIEEWDKFTQKDSKK

SEQ ID NO: 1030 - protein, 1292 aa, unidentified
  REGION 1..1292: note = Cas Enzyme sequence
MNVFNQFTGLYSLSKTLRFELRPIGKTLEHIEKKRLIAQDEQRAREYEKVKDIIDRYHRKFIHMCLSGLKLKLNSDGGDDSLEDYVKIISLDKRKEKEEKQFSKIKSNLRKQIVEAFKSGATYGDLFKKELIKNHLIHIAESEEEKFMIENFSKFTTYFTGFHENRKNMYLEEEKSTAIAYRLINENLPIFYDNMQSFKKIAGSEVAAHFVEIETVYQEYLKYLNVGHISEIFSLDYFTNVLTQEQIEVYNCIIGGRVEDGVKLKGINEYVNLYNQQQRDRKKRLPLLKPLYKMILSDKVDVSWLPEKFESDEEMIGAINGLINDLQPVLYSDNDKSLKYLLQHIGEYDLSRIYISNDLGLTDISQQMFGQYDVFTKGIKDEKRQHATPTKKERDNAELYEERINKLFKLEKSFSIAYLNSISGKTQTIEAYFASLGAYDRNGEQRNIFTQIEKARVAAADILAGKHTNLNQSKSDIKFIKDLLDAFKALQHFVKPLLGSGDEADKDNAFYAKLREVWEALTFITPLYNKVRNRLTCKPYSEEKFKLNFENNGNLLGGWVDSQTKSDNGTQYGGYIFRKKNSIGEYDFYLGISADTKLFRKDDSVINDGTLYERLDYYQVKSHTIFGASYHGNYDVDANSLFEAFHDEIIKQKLDTSFLRKDKETIIGYLKRIKKTDSQTYNILLKSEIIENKYSEMKQHILATLASLSRVPAAVEISKRKELSIEELFDEISKMPSKSFGFFPVKIEDVTHANGREVKPLFLFKISNKDLAYAEKHSKGLRKSRGTDNLHTMYFKVLLSMIQGTYDIGTGEVFYRKHTHELAENTARHKANQPIKNKNKANRTQESVFPYEIIKDRRYTCDKFQFHLSIITNYNSPKTADVNKLVHDAIRNGEIEHIIGIDRGERHLLYLSLIDLKGNIIKQFMLNEIINEYNGHTHSTNYKDLLVSREGDRNEARRNWQKIENIKEIKEGYLSQVVHIIAKMMVEYKAIVVLEDLNGGFMRGRQKIERQVYEKFEKMLIDKLNFYVDKQKDTDDIGGVLHPLQLTNKFESFRKLGKQSGWLFYIPAWNTSKIDPVTGFVNMHDTRYENADKARCFFLKFDVIRYNVEKNWFEFTFDYNNFHKKAEGTQTKWTLCTYGTRIKTFRNPKKNNQWDSEKVILTDEFKEVFADAGIDITGNLKEAICSLTEKKYLEPLMHLMKLLLQMRNSETRTEVDYILSPVADADGNFYDSRKNIATLPKDADANGAYNIARKGLWAIRKIQTTPIGEKLNLAISNKEWLQFAQQKPYLDE

SEQ ID NO: 1031 - protein, 1292 aa, unidentified
  REGION 1..1292: note = Cas Enzyme sequence
MLEDAKVFEKDETIQKKYKKTKPYFDRLHREFVKEALTDAHLSGLSAYLKSFKKWRKDRKLYQKELENVEMKLRKEVITFFDGMAQKWALDYAHLNMKKKDVELLFEEGVFALLKARYGSEKETEIVDESTGEQVSIFDSWKGFTGYFGKFFETRKNFYKDNGTSTAIATRIVDQNLRRFCENIDNYENIKQKIDFSDVEGNYNRSFDEIFSLEFYNQCLLQGGIDFYNTVLGGKTLDNGEKQKGLNELINLHKQQTDEKLPFFKNLDKQILSEKEKFIDEIEDKAALLESLKLFYKSAEIKIGSIKKLFADFVKNNDKYDLSEVYFSKEAFNTVSRKWTNETDGWEEALYDVLKKRKIVSSSAKKKDGGYSFPDFLALSCIKESLENLSVDLKFWKERYYLGSVDSECKGFLSGKELVWPQFLRIFSFEFESLFIREVIDIETNEKKEIGYDVFKQRLKHLLDEFELNVKNKVIIKEFADEILHIYQMAKYFAIEKKRKWLTEYETGDFYDNPAFGYMQFYENAYEEIVQMYNKLRNYLTKKPYSEEKWKLNFENPTLADGWDKNKESDNSAVLLRKDGKYYLGLMSRGNNKIFDSRHLAEFSNNIKTGKYEKVVYKYLPDAAKMIPKCSTQLKAVKNHFDNSTEDFEINTKAFIEPLCISRRTFNLNNIRYDKSDIFHITSDEKNGVKAFQKEYFRLSNDKNGYQTALHDWIDFCKNFLSKYESTNDFDLNTFKETNVYRSLDEFYGDIDRISYNVAFQDISEEYILQKNQNGELYLFQIRNKDWNEGAKGAKNLHTLYFEGLFSDENITANFPLKLNGQAEIFYRPKTKNLEKQKIVTHKNKVTLNKGEKAFHKNRYTENKIFFHVPLTLNRTQSDPKQFNVKINDFLANNPDINIIGVDRGEKHLAYYSVINQKAHILESDSLNTIGNVNYAEKLHEKAKNREQARKDWQDVEGIKNLKKGYISQVVRKLADLAVKYNAIIVFEDLNMRFKQIRGGIEKSVYQQFEKALIDKLNFLVDKGEKDAKKAGYLLKAYQLAAPFETFQKMGKQTGIIFYTQASYTSKIDPVTGWRPHLYLKYSGAEKAKADILKFSQIEFTSSRFEFTYDITKFRSGQKTYPKNTEWTVCSCVERWRWNRILNNNKGGYDYYKNLTDDYQALFQKFGVNTSAGDILRQVDRLETKGNEEFFRKFIFLFNLVCQIRNTNEKEKNSDKQDIILSPVEPFFDSRNSDGKKLPKNGDDNGAFNIARKGIVILKKISDFAKENGDCGKITWGDLYVSNVAWDDFVRG

SEQ ID NO: 1032 - protein, 1292 aa, unidentified
  REGION 1..1292: note = Cas Enzyme sequence
MEKEKTFKSFEDFTNLYEVQKTLRFELKPVGKTKDLIENNKVLEKDKLIDDNYHKIKYYLDLLHKKFIKEALSDISLDLKDYYKAFQALDKKDKKTRDILRIEENKLRDSLVARYDLKANEWKDKYKTNFDLKKEGIEILFEKDNLNILKAEFPVKPVDDLNAPDIEYLEPLTAQKINLFDSFKGFTTYFSGFNQTRRNFYSKDDSATAVANRVVNENLRRFCENIKLFEDKKDNYEKIEITDSERQIFSINSYNRFLTQDGIDRYNEAIGRKAKDESAKGLNQKVNEYRQRTKIKLPFFKELYSQIMGGKELAFQEVIIESDGKLFDVLKEFIKLNDAKINESKELTDSFFDHNNDFDVEKIYLKRLAINSIKKIFGSNAQIFENALPHKETANREEKYKLEDFISIAQIRDVLLGKELDLPKKKKQLGIISQIIIAEELFNGADKKLIAGNNYQTFLNVWHREFIDRRADYESAKEELLNMIEVERAYVKNDSQIKKIKEYSDAALALYQMMKHFALEKGSKPVADIESDNDFYKKIDQYCLNYPIIAYYNAFRNFATKKDYLGRLLFPVFNSERQEKDARSKRVIDGAEKIKLNFDISHDHDWGGLAILFRERSSYFIGVPVKGKKVKIKTDEANCSGGNYEMMEYIQLKFKTLVGKGYVSKFGAKYSEQPDSVAIKNAKELIVERYLNKYPLLGNVLHRNYGSKREFGNDIGKLLDDSYALKFSAVNKNLVNKLNEDGNLYLFSIKSKDFRVGATGNSNLQTQYFNYLFDGKGKIKLNSAVELYMRPKNKNLPIKKDKNNKDVIDHKRYAEDKYFLHFSVILNFGKEKIRNDGGAIKSFGKKFNAISNQWLIKNKNVNIIGIDRGEKNLAYYSIIGQDGKMIEGGSFNEIEVKDRDGNVIRTVNYADLLRKKAGNRDEARKNWQTIENIKELKNGYISQVVRKICDLILEHNAIVVFEDLNVGFKRTRSALDFPIYQKLELALVKKLNYLVNKSAILDTAGHYLKAYQLAPLVANPKDIGKQTGIVYYTPAGYTSKTCPACGFRKNNNEFHFESIEKSQKTLSKLESIRYDEIKNRFAVTYRFSEFQNEEEKTKAKKQKANELYANQERKDKFTVYSDVLRYRWHSLKTEWATRVGRGEEIAVGSETTRGLVKKYDINECLAGLFHGKIEYRNTNILNELAIKEFDKDFYKNLLHYLNLILEIRNSISDTKIDYIQCPACGFHSDHPSENLRLVTNGDANGAYNIARKGLLILEKIRQFKGDIEKMEWKDLSVGIEEWDKFTQEGSKK

SEQ ID NO: 1033 - protein, 1292 aa, unidentified
  REGION 1..1292: note = Cas Enzyme sequence
MVSEKENTPTFNSLTNLYSVSKTLRFELRPQYSTLDHIKDDQIVDKGEELKNHYKTFKKILDQVFSRIINDSLDKTYLDQKYISTYQDLVFKHRDRLTDKDRAELKALKETLKKQIDKSLDHKDKKAIFSDPVNFLIDNESDFADLIGDNRPSIEAFNRQKGYLSGYLQNRANIFDHTTNETSVAFRIVEENLAIFLNNRLTLQHFFEKVADKDGLLKFLQETLSQLGFKLKLEDLLSLDYFNRTLSQPGIDQYNLLISGKALEDGKKMQGINEVLNQYLQQHQEEKLHKIKLKQLYKQILSESKTESFTLDFVEDNKGLAAMLLQFIDFVNKLIEEKMLLLDMIQGLKDSSVSSEFLSRLYLERKNIKRLSNFIYKDYGYIEQSLEENFLSTIEGKITKKALEEHRKQDAFTIHEILVALQKQQYEKDGALESADHLLLPGVVDFLYQNLDCKHSTLLEKVGSEKQPLLDLFNEKQLLEGQDAESHASKYSDRPFNDHEIKVVKTALDFYKNLQSNFAIFQIPDENLKLDSEFYSEFDEFYQGLKNIIPVYNKSRNFLTKKPFSTEKTKLIFNNPQLLDGWSKSKESDCLGTIFIKDGKYYVGIINSATNAKNTLFEPYNFANFDQKQYFEKMNLFFLSDLKRDFPKKYFSEKWHNQHPVPADLREKYDYYRIDEHKDERKNDLKYHHQLIAYYQDCLKKDTEWQIYQFKYKAPEEYSDVNEFLSELTPNTYKMEFNKIPAEYIKKLVDDGKLYFFQIYSKDFSEFAKGKPNLHTLYLKAVFDQKNAEEFNYNYKISGSAEIFYRPASIETRVTHPKNQPIKNKNKNNPKAESVFQYDLCKDRRYMSDKFFLHLPIELNRIPLLANDSSVNSMVNQVVSSRNQNYFLGIDRGERHLIYLVLIDQNGRIIKQQTLNQITSSYQEKANNQTVEVITDYHDLLNDKEKLRKKNLQEWQSVENIKELKAGYLSNVVNEIGKIIVEYQPVIMLENLNTGFKNSRIKIEKQVYQKFEKALIDKFNYFMRKDLDSSAIGGLYHALQLTKEYSKQYNGKQNGIIYYIPASYTSNIDPTTGFISAFIQTRYENVEKTKSLIEKFNDITYDAEESLFCFSADYKKFSPEAKLWQQTIWQIYTNGDRIYTFKNKEEWQSKSYILVEEFKDLFAKYHIDYCRDLKAHILSQTDASFFKQFLFLLRLTLQMRNSRTTELNGTDADTKKRENDYIISPVKNQYGKFYDSRKDYVDWPENADANGAYNIARKGLIMLKHLKEGLPEKRICDISTEEWVQFVEELNK

SEQ ID NO: 1034 - protein, 1293 aa, unidentified
  REGION 1..1293: note = Cas Enzyme sequence
MSGLSDFTNLYSLSKTLRFELIPISNNFNWETFKKSVTFQNDEKRANAYPIVKTMLDQLHKWFIEDALKNVEIDWTNLAELYMKDKKSENYKKEQNKLRKHIVDNFFKKHQWWDAISSKHSKIITEIIPYLLQDDYFIETIIEQNPDYTRENMLAALENFKSFSGNFEKYYTNRKNMYISEAKSSAIAYRIIHDNFPKFIDNIKVYQKLTENCLERLKSVEKGLSEKLQTFTFEQIFISDFFNALIRQQGIDFYNNLIGGSPQESISGINNVGNLFLQNNPKSTLKLKELKMVTLFNQILSDKDENPIYIPDKFENEDEIIPAIQAFFKDISQKNILDNLKKIMQSLNNDDVDKSKIFVIGKSLTILSKELCGDWDKLGMLLRNKFVTGNSKTAKSERDKEIQNWIENKVFSLAEIAEVENDLFCDKKTLEILSSLTTRQGVDLIKTSIDDYIIHISSINESLVIGNRIQGNDVITESLKTCLDNFLNLLHFAKLVHLGKKEGYLDKDDTFYIEYNETIKILETVIPLYNKVRNFLTRKLEDEGKMLLKFDFSTFTHGWNYDSGCFIVKKEKNYFLIVVTDKFKKTDAESLLTNKFDNSAYRVIHKQQKMDFKNFPRWFIFSKGDNYAPAVAKYNLPINSIADDYNKYRKLKDDEKDIFLENNPNFRNNLINYFKECVPHHEALSPFKEDLLKIWKDTSQYKTLSEFYDDTLSACYRLDFEKICYQKLLELDEQGKIFIFQIQNKDFRKESKGTKNLHTLYWEQLFDKQNLEDVIFKLSGQGAELFYRAPHQNVKKTPTHKKDEVLVNKIYSNGVPIPRELYLNYCKYFKIGKNETDLSDKAKENLHLVKTNIAKLDLIKDKRYSENKLLFHVPITLNFKPKYNKLNATQFNQFTLKKLRENKNNINIIGIDRGERHLLYISVINQKGEHIIPPKSFNIIEKFDNQQQLMQKIDYQQKLVQVEGNRNEARKNWKKIGKITDLKEGYLSLVIHEIAKLMIEYNAIVVLEDLNYGFKRGRFAVERQIYQKFEKMLIDKLNFLVFKKNPFPFPLNNFGNLHNALQLTAPFESFKDLGKQSGWLFYVNASYTSKIDPKTGFVNLFNMKDAQKDTKSFFEKFSEIKFSDGLYQFSFDYRNQFSLVGNDYTNTWTVCSNGERLKYNEEESVNLNDRIDALLSEYGIDKNSLSLKEIKKQTDEKFFNELFYYFKLCLQMRNTDKENDYLISPIRQNDAEDFFDSRKDDNIKDADANGAYHIAKKGLFLVKNNFPTDTVDKNEYIRFIKNEEWLQFTQKNK

SEQ ID NO: 1035 - protein, 1293 aa, unidentified
  REGION 1..1293: note = Cas Enzyme sequence
MRDVVTFENFTKQYQVSKTLRFELIPQGKTLDNMKRDGIISVDRQRNEDYQKAKGILDKLYKYILDFTMETVVIDWDELATATEDFRKSKDKKAYEKVQSKIRTALLEHVKKQKVGTEDLFKGMFSSKIITGEVLAAFPEIRLSDEENLILEKFKDFTTYFTGFFENRKNVFTDEALSTSFTYRLVNDNFIKFFDNCIVFKNVVNISPHMAKSLETCASDLGIFPGVSLEEVFSISFYNRLLTQTGIDQFNQLLGGISVKEGEHKQQGLNEIINLAMQQNPEVKEVLKNKAHRFTPLFKQILSDRSTMSFIPDAFADDGEVLSAVDAYRKYLSEKNIGDRAFQLISDMEAYSPELMRIGGKYVSVLSQLLFNSWSEIRDGVKAYKESLITGKKTKKELENIDKGIKYGVTLQEIKEALPKKDIYEEVKKYAMSVVKDYRAGLAESLPGKIETDDERASIKHIMDSMLGLYRFLEYFSHDSIEDTDPVFEEYLDAILDDMNETVPLYNKVRNFSTRKVYSTEKFKLNFNNSSLANGWDKNKEQANGAILLRKEGEYFLGIFNSKNKPKLVSDGGAGIGYEKMIYKQVSGFAKTLYKCAISLKDTEAHFQNSNKDFSLMTDKFEKSLVITKQIYDLGTQTVNGKKKFQVDYPRLTGDIEGYKTALKEWIDFGKEFIQAYASTAIYDISLFRDSSDYSDIQSFYKDADNICYKLSFEWISDEVINNYIDDGSLYLFKLHNKDFSAGSIGKPNLHTLYWKALFEEENLSDVVIKLNGQAELFYRPKSLTRPVVHEEGEVIINKTTSTGLPVPDDVYVELSKFVRNGKKGNLTDKAKNWLDKVTVRKTPHAITKDRRFTVDKFFFHVPITLNYKADSSPYRFNDFVHQYIKDCSDVKIIGIDRGERNLIYAVVIDGKGNIIEQRSFNTVGTYNYQEKLEQKEKERQTARQDWATVTKIKDLKQGYLSAVVHELSKMIVKYKAIVVLENLNVGFKRMRGGIAERSVYQQFEKALIDKLNYLVFKDEEQSGYGGVLNAYQLTDKFESFSKMGQQTGFLFYVPAAYTSKIDPLTGFITPFSWKHVKNREDRRNFMNLFSKLYYDVDTHDFVLAYHHSNKESKYTIKGNWKIADWDILLQENKEVLGKTGTPYCVGKRIVYMDDSTTGHNRMCAYYPHTELKKLLSEYGIEYTLGQDLLKTIQELDDDKLVKGLFYIIKAALQMRNSNSETGEDYISSPIEGRPGICFDSRAEDDTLPHDADANGAFHIAMKGLLLTERIRNDDKLAISNEEWLNYIQEMRG

SEQ ID NO: 1036 - protein, 1293 aa, unidentified
  REGION 1..1293: note = Cas Enzyme sequence
VHHFIFGGITMSNMQQYDNFINHYAIQKTLRFELQPIGKTREHIQKNGIIEHDEALEQKYQIVKKIIDRFHRKHIDEALSLADFSKDTAMLKRFEELYWKKNKNENEKNEFVKIQSDLRKRVVSFLEGKVEGDARFAKVQQRYGILFDAKIFKDKEFISTACDDIEKDAIEAFKRFATYFTGFHENRKNMYSADEESTAIAYRVINENLPRFLENKARFEKIQHTVDSKTLNEIATELKPVLEKNKLETIFTLNYFQNTLSQAGITYYNTILGGKTKENGEKVQGLNEIINLFNQKNKDTMLPLLKPLYKQILSEEYSTSFTISAFEKDNDVLQAIGSFCNDCIFYAKNNVNGKAYNLLQTVQAFCNSIDTYNDNRLDGLHIERKNLATLSHQVYGEWNILRDALQIHYEAYEQKDNGNNNNYLESKTFSWKALKDALTTYKSLVEEAQDIDENGFIAYFKDMKFKEEIDGKTTSIDLIENIQTRYKSIETILQEDRNNKNNLHQEKEKVATIKGFLDSVKYLQWFLNLMYIASPVDDKDYDFYNELEMYHDTLLPLTTLYNKVRNYMTRKPYSVEKFKLTFEKSTLLDGWDKNKERANLGVILRKGNNYYLGIMNKKYNDIFDSIPGLTTTDYCEKMNYKLLPGPNKMLPKVFFSKKGVQFYKPSQEIIRLYNNKEFKKGDTFNKNSLHKLINFYKESIAKTEDWSVFQFKFKNTNDYADISQFYKDVERQGYKISFDKIDWEYILLLVDEGKLFLFKIYNKDFSPYSKGKPNLHTIYWKNIFSHDNLNNVVYKLNGEAEVFYRKKSIEYPEEILQKGHHVNELKDKFKYPIIKDKRYAEDKFLFHVPITMNFLSKGEPNINQRVQQYIASTSEDYHIIGIDRGERNLLYLSLIDATGKIIKQLSLNTIKNENFNTTIDYHAKLDEKEKKREEARKNWDVIENIKELKEGYLSQVVHQIAKLMVEYKAILVMEDLNTGFKRGRFKVEKQVYQKFEKMMIDKLNYLVLKDRQATQPGGSLKAYQLASSLESFKKLGKQCGMIFYVPAVYTSKIDPTTGFYNFLRVDVSTLNSAHSFFNRFNAIVYNNEQDYFEFHCTYKNFVSEPSLQKNVKSSKMHEYNNLKDTTWVLCSTHHERYKKFKNKSGYFEYKPVNVTQSLKQLFDEAGIDYQAGADLKEAIVTGKNTKLLKGLGEQLNILLAMRYNNGKHGNEEKDYIVSPVKNNYGKFFCTLDGDASLPVDADANGAYAIALKGLMLVERMKSNKDIKGRIDYFISNNEWFNYLIAKNTLNKSK

SEQ ID NO: 1037 - protein, 1293 aa, unidentified
  REGION 1..1293: note = Cas Enzyme sequence
MRDVVTFENFTKQYQVSKTLRFELIPQGKTLDNMKRDGIISVDRQRNEDYQKAKGILDKLYKYILDFTMETVVIDWDELATATEDFRKSKDKKAYEKVQSKIRTALLEHVKKQKVGTEDLFKGMFSSKIITGEVLAAFPEIRLSDEENLILEKFKDFTTYFTGFFENRKNVFTDEALSTSFTYRLVNDNFIKFFDNCIVFKNVVNISPHMAKSLETCASDLGIFPGVSLEEVFSISFYNRLLTQTGIDQFNQLLGGISVKEGEHKQQGLNEIINLAMQQNPEVKEVLKNKAHRFTPLFKQILSDRSTMSFIPDAFADDGEVLSAVDAYRKYLSEKNIGDRAFQLISDMEAYSPELMRIGGKYVSVLSQLLFNSWSEIRDGVKAYKESLITGKKTKKELENIDKGIKYGVTLQEIKEALPKKDIYEEVKKYAMSVVKDYRAGLAESLPGKIETDDERASIKHIMDSMLGLYRFLEYFSHDSIEDTDPVFEEYLDAILDDMNETVPLYNKVRNFSTRKVYSTEKFKLNFNNSSLANGWDKNKEQANGAILLRKEGEYFLGIFNSKNKPKLVSDGGAGIGYEKMIYKQFPDFKKMLPKCTISLKDIKAHFQKSDEDFTLQTDKFEKSIVITKQIYDLGTQTVNGKKKFQVDYPRLTGDMEGYRAALKEWIDFGKEFIQAYTSTAIYDTSLFRDSSDYPDLPSFYKDVDNICYKLTFEWIPDAVIDDCIDDGSLYLFKLHNKDFSAGSIGKPNLHTLYWKALFEEENLSDVVVKLNGQAELFYRPKSLTRPVVHEEGEVIINKTTSTGLPVPDDVYVELSKFVRNGKKGNLTDKAKNWLDKVTVRKTPHAITKDRRFTVDKFFFHVPITLNYKADSSPYRFNDFVHQYIKDCSDVKIIGIDRGERNLIYAVVIDGKGNIIEQRSFNTVGTYNYQEKLEQKEKERQTARQDWATVTKIKDLKQGYLSAVVHELSKMIVKYKAIVVLENLNVGFKRMRGGIAERSVYQQFEKALIDKLNYLVFKDEEQSGYGGVLNAYQLTDKFESFSKMGQQTGFLFYVPAAYTSKIDPLTGFITPFSWKHVKNREDRRNFMNLFSKLYYDVDTHDFVLAYHHSNKESKYTIKGNWGIADWDILIQENKEVLGKTGTPYCVGKRIVYMDDSTTGHNRMCAYYPHTELKKLLSEYGIEYTLGQDLLKTIQELDDDKLVKGLFYIIKAALQMRNSNSETGEDYISSPIEGRPGICFDSRAEDDTLPHDADANGAFHIAMKGLLLTERIRNDDKLAISNEEWLNYIQEMRG

SEQ ID NO: 1038 - protein, 1293 aa, unidentified
  REGION 1..1293: note = Cas Enzyme sequence
MANFNGFTQKYKSPKTLRFGIVPLGKTLENMNKYGIISEDRQRNENYKKIKSVLDRFYKTYIEMCLKDVKIDWGPLYEAVVAYRAERSPENRDDLESLQKRYRKTVVGLLTKNKELFKALFSKRLFDGTVASKLPGLILTAEDEALLDSFKGFTTYFDKFFKNRKNLFSAEKEHSAVSYRLVNENFTKFVTDCEILKRIGETVPDVLETLRNTSSLQLYEGCCLEEIFSADFYSSLLGQEQIERFNRLIGGISAAPGEEKVQGLNETMKVILDKSPDEELAAVPHRFVPLYKQLLIDRQAPSFILKSFGSDRDVLDAVEGYLKMLESGQALSNIRALFNGLETCADLQHVYISNDKLSAFSSSVFGQWNLCKEMLRDWKIGDKDRKITKKQTAGIDKWLKNSDFSISEIWQAAGDELPAGKIGEKILKLVDAVEERAGIPLPESLKTPEEKEILKTFLDSVMDLLSRLQWFDVDDCNGKDMGFYGPFEKALQTLRPVRLLYNQVRNHVTKKPYSLSKIRLNFSNGQLGKGWDENKITDHCAVLFTKGGQYYLGILNKNNRPDFETPIPVAGEARYKRMVYKQTKFTTTVPKCATNRKDVEAHFSVSDDDYVLFGENFANPLVITKEIYDLNHVEYGNDKNDDKHKKIQAEYLKYTGDQEGYTEALYKWIDFVKEFAKTYKRTSVNDISTVLPTEQYKNLLDFYTDMDKTAYEIVFQDIPEKVIDAFVDEGKLFLFRIETKDFRAGSTGRPNLQTLYWKALFDPENINNPVIKLNGMIELFYRPKSEMNVVRHRVGEKMVNRVLKDGRPLDNELHSEIYRYVNNMLDRRLSAKAKAVLPLVTVRDVPHELTKDRRFTEDKFFFHASIVLNNKSDKTTAGFNKDVREYLKNNPDMYVIGIDRGERNLIYAVVISPEGRIVEQKSFNVVNGFNYHHKLDQREKERIEARQAWNIVGEIKELKAGYLSNVVHEISRMMIKYNAVVVLENLNLRFKQVHGGIEKSVYQQFERQLINKLGFLVFKERTGSSPGSVLNAYQLTDSTKTMEKTGMQNGFLFYVPAAYTSAVDPTTGFCNPYVFSKVKNTKADIEEFLKGIRSLRYDRLTGDFIAHLDLSQNGRFQRELEGILPEWDVVLEANVMTKSFDGTSFIRGKRIEFRRDEYGHAQYDTYLPCQALCKALQQSGIEYKTGEDVLPPVLRKKDPVLAAAVFKALRLGLQMRNSNAETGEDYFSSVVKNGAGPCFDSRSADETMPKDADALGAYHIALKGLFALEKFRKGKNMGIKNAEWLQFVQQRHS

SEQ ID NO: 1039 - protein, 1293 aa, unidentified
  REGION 1..1293: note = Cas Enzyme sequence
VHHFIFGGITMSNMQQYDNFINHYAIQKTLRFELQPIGKTREHIQKNGIIEHDEALEQKYQIVKKIIDRFHRKHIDEALSLADFSKDTAMLKRFEELYWKKNKNENEKNEFVKIQSDLRKRVVSFLEGKVEGDARFAKVQQRYGILFDAKIFKDKEFISTACDDIEKDAIEAFKRFATYFTGFHENRKNMYSADEESTAIAYRVINENLPRFLENKARFEKIQHTVDSKTLNEIATELKPVLEKNKLETIFTLNYFQNTLSQAGITYYNTILGGKTKENGEKVQGLNEIINLFNQKNKDTMLPLLKPLYKQILSEEYSTSFTISAFEKDNDVLQAIGSFCNDCIFYAKNNVNGKAYNLLQTVQAFCNSIDTYNDNRLDGLHIERKNLATLSHQVYGEWNILRDALQIHYEAYEQKDNGNNNNHLESKTFSWKALKDALTTYKSLVEEAQDIDENGFIAYFKEMKFKEEIDGKTTSIDLIENIQTQYKSIETILQEDRNNKNNLHQEKEKVATIKGFLDSVKYLQWFLNLMYIASPVDDKDYDFYNELEMYHDTLLPLTTLYNKVRNYMTRKPYSVEKFKLTFEKSTLLEGWDKNKERAKFGGILRKGNNYYLGIMNKKYNDIFDSIPGLTTTDYCEKMNYKLLPGPNKMLPKVFFSKKGVQFYKPSQEIIRLYNKKEFKKGDTFNKNSLHKLINFYKESIAKTEDWSVFQFKFKNTKDYADISQFYKDVERQGYKISFDKIDWEYILSLVDEGKLFLFKIYNKDFSPYSKGKPNLHTIYWKNVFSTDNLNNVVYKLNGEAEVFYRKKSIEYPEEILQKGHHVNELKDKFKYPIIKDKRYAEDKFLFHVPITMNFLSKGEPNINQRVQQYIASTSEDYHIIGIDRGERNLLYLSLIDATGKIIKQLSLNTIKNENFNTTIDYHAKLDEKEKKREEARKNWDVIENIKELKEGYLSQVVHQIAKLMVEYKAILVMEDLNTGFKRGRFKVEKQVYQKFEKMMIDKLNYLVLKDRQATQPGGSLKAYQLASSLESFKKLGKQCGMIFYVPAVYTSKIDPTTGFYNFLRVDVSTLNSAHSFFNRFNAIVYNNEQDYFEFHCTYKNFVSEPSLQKNVKSNKMHEYNNLKDTTWVLCSTHHERYKKFKNKSGYFEYKPVNVTQSLKQLFDEAGIDYQAGADLKEAIVTGKNTKLLKGLGEQLNILLAMRYNNGKHGNEEKDYIVSPVKNNYGKFFCTLDGDASLPVDADANGAYAIALKGLMLVERMKSNKDIKGRIDYFISNNEWFNYLIAKNTLNKSK

SEQ ID NO: 1040 - protein, 1293 aa, unidentified
  REGION 1..1293: note = Cas Enzyme sequence
MRAMVTFENFTKQYQVSKTLRFELIPQGKTLDNMKRDGIISVDRQRNEDYQKAKGILDKLYKYILDFTMETVVIDWGELATATEEFRKSKDKKAYEKVQSKIRTALLEHVKKQKVGTEDLFKGMFSSKIITGEVLAAFPEIRLSDEENLILEKFKDFTTYFTGFFENRKNVFTDEALSTSFTYRLVNDNFIKFFDNCIVFKNVVNISPHMAKSLETCASDLGIFPGVSLEEVFSISFYNRLLTQTGIDQFNQLLGGISGKEGEYKQQGLNEIINLAMQQNPEVKEVLKNKAHRFTPLFKQILSDRSTMSFIPDAFADDDEVLSAVDAYRKYLSGKNIGDRAFQLISDMEAYSPERMSIGGKYVSVLSQLLFNSWSEIRDGVKAYKESLITGKKTKKELENIDKGIKYGVTLQEIKEALPKKDIYEEVKKYAMSVVKDYRAGLAESLPGKIETDDERASIKHIMDSMLGLYRFLEYFSHDSIEDTDPVFEEYLDAILDDMNETVPLYNKVRNFSTRKVYSTEKFKLNFNNSSLANGWDKNKEQANGAILLRKEGEYFLGIFNSKNKPKLVSDGGAGIGYEKMIYKQFPDFKKMLPKCTISLKDTKAHFQKSDEDFTLQTDKFEKSIVITKQIYDLGTQTINGKKKFQVDYPRLTGDMEGYRAALKEWIDFGKEFIQAYTSTAIYDTSLFRDSSDYPDLPSFYKDVDNICYKLTFEWIPDAVIDDCIDDGSLYLFKLHNKDFSAGSIGKPNLHTLYWKALFEEENLSDVVVKLNGQAELFYRPKSLTRPVVHEEGEVIINKTTSTGLPVPDDVYVELSKFVRNGKKGNLTDKAKNWLDKVTVRKTPHAITKDRRFTVDKFFFHVPITLNYKADSSPYRFNYFVHQYIKDCSDVKIIGIDRGERNLIYAVVIDGKGNIIEQRSFNTVGTYNYQEKLEQKEKERQTARQDWATVTKIKDLKQGYLSAVVHELSKMIVKYKAIVVLENLNVGFKRMRGGIAERSVYQQFEKALIDKLNYLVFKDEEQSGYGGVLNAYQLTDKFESFSKMGQQTGFLFYVPAAYTSKIDPLTGFITPFSWKHVKNREDRRNFMNLFSKLYYDVDTHDFVLAYHHSNKESKYTIKGNWGIADWDILIQENKEVLGKTGTPYCVGKRIVYMDDSTTGHNRMCAYYPHTELKKLLSEYGIEYTLGQDLLKTIQELDDDKLVKGLFYIIKAALQMRNSNSETGEDYISSPIEGRPGICFDSRAEDDTLPHDADANGAFHIAMKGLLLTERIRNDDKLAISNEEWLNYIQEMRG

SEQ ID NO: 1041 - protein, 1293 aa, unidentified
  REGION 1..1293: note = Cas Enzyme sequence
MRDVVTFENFTKQYQVSKTLRFELIPQGKTLDNMKRDGIISVDRQRNEDYQKAKGILDKLYKYILDFTMETVVIDWDELATATEDFRKSKDKKAYEKVQSKIRTALLEHVKKQKVGTEDLFKGMFSSKIITGEVLAAFPEIRLSDEENLILEKFKDFTTYFTGFFENRKNVFTDEALSTSFTYRLVNDNFIKFFDNCIVFKNVVNISPHMAKSLETCASDLGIFPGVSLEEVFSISFYNRLLTQTGIDQFNQLLGGISVKEGEHKQQGLNEIINLAMQQNPEVKEVLKNKAHRFTPLFKQILSDRSTMSFIPDAFADDGEVLSAVDAYRKYLSEKNIGDRAFQLISDMEAYSPELMRIGGKYVSVLSQLLFNSWSEIRDGVKAYKESLITGKKTKKELENIDKGIKYGVTLQEIKEALPKKDIYEEVKKYAMSVVKDYRAGLAESLPGKIETDDERASIKHIMDSMLGLYRFLEYFSHDSIEDTDPVFEEYLDAILDDMNETVPLYNKVRNFSTRKVYSTEKFKLNFNNSSLANGWDKNKEQANGAILLRKEGEYFLGIFNSKNKPKLVSDGGAGIGYEKMIYKQFPDFKKMLPKCTISLKDIKAHFQKSDEDFTLQTDKFEKSIVITKQIYDLGTQTVNGKKKFQVDYPRLTGDMEGYRAALKEWIDFGKEFIQAYTSTAIYDTSLFRDSSDYPDLPSFYKDVDNICYKLTFEWIPDAVIDDCIDAGSLYLFKLHNKDFSAGSIGKPNLHTLYWKALFEEENLSDVVVKLNGQAELFYRPKSLTRPVVHEEGEVIINKTTSTGLPVPDDVYVELSKFVRNGKKGNLTDKAKNWLDKVTVRNTPHAITKDRRFTVDKFFFHVPITLNYKADSSPYRFNDFVHQYIKDCSDVKIIGIDRGERNLIYAVVIDGKGNIIEQRSFNTVGTYNYQEKLEQKEKERQTARHDWATVTKIKDLKQGYLSAVVHELSKMIVKYKAIVVLENLNVGFKRMRGGIAERSVYQQFEKALIDKLNYLVFKDEEQSGYGGVLNAYQLTDKFESFSKMGQQTGFLFYVPAAYTSKIDPLTGFITPFSWKHVKNREDRRNFLNLFSKLYYDVNTHDFVLAYHHSNKESKYTIKGNWGIADWDILIQENKEVLGKTGTSYCVGKRIVYMDDSTTGHNRMCAYYPHTELKKLLSEYGIEYTSGQDLLKTIQELDDDKLVKGLFYIIKAALQMRNSNSETGEDYISSPIEGRPGICFDSRAEDDTLPHDADANGAFHIAMKGLLLTERIRNDDKLAISNEEWLNYIQEMRG

SEQ ID NO: 1042 - protein, 1294 aa, unidentified
  REGION 1..1294: note = Cas Enzyme sequence
MANKKTFSDFTNLYSLSKTLRFELQPVGKTEEILKNNGVFETDKKRKKAYENTKPYFDRLHREFISESLANAYLDGLSDYFKVFQAFKKDRKNQLINKQIDTLRKSLREQIVGYFDKNGKEWATKKYFHLKIKRKDLDILFEEEVFQILKHKYGNEKETKLTNPETDEIISIFNGWKGFTGYFIKFFATRKNFYKAEVENGKGKSGQISTRIVDQNLDRFLDNLITYDFIKGKIDITEVEKFFELKAGEVFSVDFYNYCLLQDGIDKYNDFLGGKTVNNGEKIRGVNEIINKYRQDNKGEKLPFLKKLDKQILSEKEKFIDEIETPEELLEVLREFYDSAGSKVKVLQTLLNSFFKDYNEYDLNGIYLSKEALNTISNKWTNETETFGSNLYEVLKSEKILTSSAKKTDGGYSFPDFISIANIKASIERIPRESKFWKERYYENPNGSSVLVGDEPVWEQFLKIFKFEFFSHFERTIVDRETGQREAEGYDIFKSNLERLLKDFKIDKNSKLIIKDFADEVLYIYQMAKYFALEKKRAWNTEYDDSLDVFYTDPNNGYFTFYENAYKEIVQPYNKIRNFLTKKPYSEYKWKLNFDNPTLADGWDKNKESDNTAVILRKEGKYYLGIMKKGHNQIFQDKNKTQSQLKGMSNYYEKLVYKQMADPKRDFPKGIFSKKGFETYNPPEDIIQIYEQKTFKTESLEFSKQDLWKLIDFYKICISLHPSWKLYDFSFSNTTKYENLNDFYSEVSKNAYKTWFESISENYIADKNNLGELFLFRIYNKDFSDKSTGTKNLHTLYFKELFSQANMENNFPFKLNGQAELFYRPKSIDAVVEKRNFKREIVNKKRYSENKIFFHVPITLNRVSKNVYRFNTEINNFLANNSGINIIGVDRGEKHLVYYSVINQKGEVLDSESLNTINQVDYHEKLEERADDRKRARKNWEEIEGIKDLKKGYISQVVRKLADLAIKHNAIIVMEDLNMRFKQIRGGIEKSAYQQLEKALIGKLNFLVNKGEVDPLKTGHLLSAYQLTALFETFKDMGKQTGIIFYTQASYTSRIDPLTGWRPNIYLKYSNADQAKKDILKFSNINFNEAKGLFEFTYDIKDFSNTKDFPIKTKWTVCSNVKRFRWDRKLNNNKGGYTHYKNLTDGKTENKNPKSTKPDNLKELFEKYKIDVYSDIKNQIQNLETKRNEKFFQHFIFFFNLICQIRNTQQDKDGDENDFILSPVEPFFDSRYSEKFGKNLPQNGDDNGAYNIARKGIIILDKISKHYKQVGSTDKLSWNDLYISHMDWDDFAQS

SEQ ID NO: 1043 - protein, 1294 aa, unidentified
  REGION 1..1294: note = Cas Enzyme sequence
MKSIYEDFIGLESKNLTLRFALKPEPKTEENLKQYWDKLRDEERAKAYPIVKKILDREYQRLISEGLKSLENQNALDWTELAEYIRTSSLNKKKNEEKRLRKLIAQSLKAHPLVDKLKVKNAFGKNGYLETLPLGKEEKEAVKVFAGFGGFFNSYNKNRENYFSTEEKSTAIANRIVNENFSKHFSNVEIVTKIQKEVPELIQIVEAQFKGYDAIFTVNGYNTALSQAGIDTYNEMVAIWNKEANLYAQKAGKLPDGHPLKKKRNYLLSALFKQIGSEKEHLIQIDRFDGDEEVIEALTGVKKMLQEADVFEKLNMLVEDMENWDYSKIYLSAQSLSNVSVFLNNLYEDERENSWNYLDNVLREKWQIELQGKKKGTDLEEAIRKKKQSFYSIEELQEAVNAIEETDKCYNVSKWLLGAMKSERVIEEKKKDVEDFCTQWKNERNSLKETDITALKEYLEQWIFLARYCKSFYANGIEKKEKDEAFYHILEDVLYVLDEVIYFYNKVRNYVTKKPYSLEKMHLKFGHNELANGWSVNKEGNYGTAILRRNGKYYLAITNSLNKKMSIPTQLESTGNNYEKMVLNVFPNVFRMIPKCTTGRNDVKSCFERKEPNEYFIIDTPEFVNPFKVTCEEYELNKITYDGVKKWQSDYSKNTQDEKGYKEAVTKWIQFCMRFLQSYKSTAIYDYSTLQQPEKYETVDSFYHDVEKILYECHFEYVPANKIEQLEEEGRIFLFQIYNKDFSENRRPDSKKNLHTLYWEALFSEENRKVKVIQLNGNAEIFRREKSIEHPIVHKVGEVLVNKRTKDGEPIPDDIYRDLCNYFNGRNVTSEKEEYKEYLDKVYTSTKKYDITKDKRFTENKYEFHVPITLNYQADGVKYLNQKILRVLQDNPDVNIIGLDRGERNLISYVVLNQEGKIVNNQQGSFNIVGKMDYQKKLYQKEKNRDKERKTWKNIETIKDLKEGYISQVVHELTDMAIRNNAIIVMEDLNFGFKRGRTKVERQVYQKFELALLKKLHYLVTDKTEGEAMLKPGGVLQGYQLAREVKTLKEIGKQCGCVFYVPPGYTSKIDPTTGFVDVFNMSGVTNREKKKAFFEKFDNMFYDEKRDMFGFSFNYEKFTTYQSSYRNDWTVYSNGSKYVWNSLKRTDELIDVTKELKLLFEKYAIDYRNKALFEQIMSQDTDKNNADFWNKLFWYFRVLLRLRNSSDELDQIVSPVLNQNGEFFETPKKITEKSYLSDYPMDADTNGAYHIALKGLYLIQEKIADESVDLDNKLPKDFYKISNAEWFMFRQKEK

SEQ ID NO: 1044 - protein, 1294 aa, unidentified
  REGION 1..1294: note = Cas Enzyme sequence
MKSIYENFIGLESKNLTLRFALNPEAKTQENLKLYWDKLRDEERDRAYPIVKKILDKEYQQLISEGLKLLENQNVLDWTELAEYIRTSDLSKKKKEDKRLRKLIAQNLKAHPLVDKLKVKNAFGKNGYLETLPLGKEEKEAVKVFAGFGGFFNNYNKNRENYFSTEEKSTAIANRIVNENFSKHFSNVEIVTKIQKEVPELIQIVEAQFKGYDAIFTVNGYNMALSQAGIDTYNEMVAIWNKEANLYAQKAGKLPDGHPLKKKRNYLLSALFKQIGSEKEHLIQIDRFDGDEEVIEALTGVKKMLQEADVFEKLNMLVEDMENWDYSKIYLSAQSLSNVSVFLNNLYEDERENSWNYLDNVLREKWQIELQGKKKGTDLEEAIRKKKQSFYSIEELQEAVNAIEETDKCYNVSKWLLGAMKSERVIEEKKKDVEDFCTQWKNERNSLKETDITALKEYLEQWIFLARYCKSFYANGIEKKEKDEAFYHILEDVLYVLDEVIYFYNKVRNYVTKKPYSLEKMHLKFGHNELANGWSVNKEGNYGTAILRRNGKYYLAITNSLNKKMSIPTQLESTGNNYEKMVLNVFPNVFRMIPKCTTGRNDVKSCFERKEPNEYFFIDTPEFVNPFKVTREEYELNKITYDGVKKWQSDYSKNTQDEKGYKEAVTKWIQFCMRFLQSYKSTAIYDYSTLQQPEKYETVDSFYHDVEKILYECHFEYVPANKIEQLEEEGRIFLFQIYNKDFSENRRPDSKKNLHTLYWEALFSEENRKAKVIQLNGKAEIFRREKSIEHPIVHKAGEVLVNKRTKDGEPIPDDIYKDLSNYFNGRNVTSEKEEYKECLDKVYTSTKKYDITKDKRFTETKYEFHVPITLNYQADGVKYLNQKILHVLRDNPDVNIIGLDRGERNLISYVVLNREGKIVNNQQGSFNIVGKMDYQKKLYQKEKNRDKERKTWKNIETIKDLKEGYISQVVHELTDMAIRNNAIIVMEDLNFGFKRGRTKVERQVYQKFELALLKKLHYLVTDKTEGEAMLKPGGVLQGYQLAREVKTLKEIGKQCGCVFYVPPGYTSKIDPTTGFVDVFNMSGVTNREKKKAFFEKFDNMFYDEKRDMFGFSFNYEKFTTYQSSYRNDWTVYSNGSKYVWNSLKRTDELIDVTKELKLLFEKYAIDYRNEALFEQIMSQDTDKNNADFWNKLFWYFRVLLRLRNSSDELDQIVSPVLNQNGEFFETPKKITEKSYLSDYPMDADTNGAYHIALKGVYLIQEKIADESVDLDNKLPKDFYKISNAEWFMFRQKEK

SEQ ID NO: 1045 - protein, 1294 aa, unidentified
  REGION 1..1294: note = Cas Enzyme sequence
MARTMSEFTGKYKLSQTLKFELQPVGVTEQRLRESKLLEQDFKRAEDYPKAKEFLDGKHKAFLQKVLSGITDIDWQPLADMLDQFQKNKDLKKKLEKRQGEYRKKITENFTKDPSFTLLTDPTPSKLFKESIKTDPALMAEIRTFERFACYFSGYQKNRANIYSDEEQQTAAAHRAVNENFTKYHAAVLNFQEICNASSELLQGINSRTTPILNGEVLTDLLTIRNYNRFLSQSGINLFNRIVAEINYEVNRYRQNPLEQTKKVRFLPFLFKQILSDREQTFAVKAFADGTELLSALKDFVLRNQKMKIRGETVDLFDSLRRVLATLKDDDDLFIDSSEMGRISSRLTGSWSTFLDSAAAYAKATLRSKAKIDKYCKQDVFHFRVIQSWGIEQYEKDGSSSPLSLSTYWKRDELADLFEQEKSKRNEILDLAKKGDADRLREREDDVRIIKEYLDTVQDILHDVKPLAVDDKYGGDLDLKGILMGHYLPLKEAFIPLYNQTRNFILKKNADVPKIKLMFNNPVCAKGWPDPQTSSCVIFRKCHEFYLGVLSDKARSCLNSYEPNEESALEIMNFRQMADPSQDLPTLMQIDGKTVRKTGRKDKKSGKNFILEELKKRYLPEAINRIREKESHMKNSPAFSKEDLAAYIDFYKDRIIEYKPDCKFKFKPSEEYSKWEDFTNDLDAQAYQLNFFPISESFIMQLVDEGKLFLFKIWNKDFAPKASGKPNKSTLYWKAVFDPDNLSDVVFKLNCEAELFLREPVIHEPKAHRCGEKMVNRTIASLQNGQTVRTPIPEDVYGEIFQYVNGKCKSSDLSKEARCLLEKRLDWEKGMQFEDTLGRLVVKNVTHEIIKDERFTKRKYFFHVSLEINFKSPKGKGVKFNDLVRDYLRNNPDVKIIGIDRGERNLIYLVLMDQNGNILQQKSYNIISQKLYNSLVVNVDYHAKLDQRQKERDAARKSWKEIGGIKDLKAGYLSGIVYEISRMMIEHNAVVFLEDLNGGFKRSRTKIEKQVYQKFENALITKLNYLVFKDTDDHRSPGGVLNGYQLTPPQENISQRSTQCGFIFYVPAWCTSKIDPVTGFVNLFGSEWLQWKNIEHARDFFTRFDSIRYLQDEDLFEFSFDYKNFNDQAADTRTQWKVYSIGERIESFRKHENQNQWDSRTVQLTDAYKKLFTDSGIDINGDLKAQISSSSAGQKFWYDLLQLFKLTVQLRNSRPNSTASEDDYILSPVRGPDGTFFDSRKGLKNLPGNADANGAYNIARKGLLLLQQLNAAADPVKVKFDLQRKPWLNFVQKR

SEQ ID NO: 1046 - protein, 1295 aa, unidentified
  REGION 1..1295: note = Cas Enzyme sequence
MKKKFEEEFFNLYTLQKTLRFELKPVGETAEYIENFKSEGLKQFVSQDEQRALDYQKTKQIIDDYHRDFIEESLAYFSKQVSDDHVKVAFGHYEKLRKATGDDKASALKDWESHQTNLRKKVVKCFSVSNKTRFSRIDKKKLIKQDLIEWLTNQNRLEDIPTVESFSKFTTYFKGFQENRKNIYSVESHATAISFRIVHENMPKFFDNVISYLKLREVFPELIFDKVIEDLELDRTLDQVFEIANFSEYVTQEGIDHFNYILGGKTLEDGTKKQGVNEQINLFKQQQTKEIARKIPKMVSLFKQILSERTDSHSFIPPQFENDQELFNSLRKLQKTCEPELEKLQQAILALAESDLEKVYIKAADINELSNAVYGFRGVISESLQAYKDTLLKKKDKEAFEKKPVFSLAELVQYIKKHNQTLDENKQNSSTKIIEYLTCTDTLDDIFQTAVSEKFQNASQLFKLNTLSSKRKPPKDEDENGEEGFEQVKLIKNYLDSLLDAVHFAKPLYLVKGRKPIDGLDKDQSFYEAFETCYRELESYIVPVYNKTRSYLSRKSYKADKFKINFDNNTLLSGWDVNKETDNASVIFRKDGLYYLGFMPKGNTFLFDYIDSDEDSKKEVLRKQQTAKLALANNSEDCYEKVRYKLLPCASQMLPKVFFSKKRIGFFAPSDEILRIRNTASHTKNGTPQKGYAKAEFNLSDCHKMIDFFKASIPKYPSWKGFDFEFSPTENYEDTSAFYREVENQGYQISFDKIKQSYIDEQISKGNLYLFQIYNKDFSPFSKGRPNLHTLYWKALFEEANLKNVVAKLNGEAEIFFRRHSIKKSDRVVHPANRPVDNKNPHTQKKQSTFEYDLVKDKRYTKDKFFFHVPISLNFKATGVTKFNDKVNTFLQQNPKVNIIGIDRGERHLLYFTVINQKGEILVQETLNTLMSDMGHKNDYQQKLDKKENERDAARKSWASVENIKELKEGYLSHVVHKLAQLIIEHNAIVCLEDLNFDFKRGRFKVEKQVYQKFERALIEKLNYLVFKDKELGEVGHYLTAYQLTAPFKSFKDLGKQSGILYYVRADYTSKIDPTTGFVNFLNLKYQSIEKSKQLLSDFTAIRYNAEQDYFEFDIDYKKIKITAKREVGEQTQWTLCTFGNERYQNYRDKKSGQWHTETVNVTQELKKLFESCDTPPIDYANDENLIEAILQQEKKEFYSKLFWLIKLTMTLRHSKFKSDDDFILSPVKNSSGEFYDSRKVDGSLPKDADANGAYNIALKGLWNLQRINEWKGGKLNLKISNKDWFNFVQQKPYR

SEQ ID NO: 1047 - protein, 1295 aa, unidentified
  REGION 1..1295: note = Cas Enzyme sequence
MKKKFEEEFFNLYTLQKTLRFELKPVGETAEYIENFKSEGLKQFVSQDEQRALDYQKTKQIIDDYHRDFIEESLAYFSKQVSDDHVKVAFGHYEKLRKATGDDKASALKDWESHQTNLRKKVVKCFSVSNKTRFSRIDKKKLIKQDLIEWLTNQNRLEDIPTVESFSKFTTYFKGFQENRKNIYSVESHATAISFRIVHENMPKFFDNVISYLKLREVFPELIFDKVIEDLELDRTLDQVFEIANFSEYVTQEGIDHFNYILGGKTLEDGTKKQGVNEQINLFKQQQTKEIARKIPKMVSLFKQILSERTDSHSFIPPQFENDQELFNSLRKLQKTCEPELEKLQQAILALAESDLEKVYIKAADINELSNAVYGFRGVISESLQAYKDTLLKKKDKEAFEKKPVFSLAELVQYIKKHNQTLDENKQNSSTKIIEYLTCTDTLDDIFQTAVSEKFQNASQLFKLNTLSSKRKPPKDEDENGEEGFEQVKLIKNYLDSLLDAVHFAKPLYLVKGRKPIDGLDKDQSFYEAFETCYRELESYIVPVYNKTRSYLSRKSYKADKFKINFDNNTLLSGWDVNKEKDNASVIFRKDGLYYLGFMPKGNTFLFDYIDSDEDSKKEVLRKQQTAKLALANNSEDCYEKVRYKLLPCASQMLPKVFFSKKRIGFFAPSDEILRIRNTASHTKNGTPQKGYAKAEFNLSDCHKMIDFFKASIPKYPSWKGFDFEFSPTENYEDTSAFYREVENQGYQISFDKIKQSYIDEQISKGNLYLFQIYNKDFSPFSKGRPNLHTLYWKALFEEANLKNVVAKLNGEAEIFFRRHSIKKSDRVVHPANRPVDNKNPHTQKKQSTFEYDLVKDKRYTKDKFFFHVPISLNFKATGVTKFNDKVNTFLQQNPKVNIIGIDRGERHLLYFTVINQKGEILVQETLNTLMSDMGHKNDYQQKLDKKENERDAARKSWASVENIKELKEGYLSHVVHKLAQLIIEHNAIVCLEDLNFDFKRGRFKVEKQVYQKFERALIEKLNYLVFKDKELGEVGHYLTAYQLTAPFKSFKDLGKQSGILYYVRADYTSKIDPTTGFVNFLNLKYQSIEKSKQLLSDFTAIRYNAEQDYFEFDIDYKKIKITAKREVGEQTQWTLCTFGNERYQNYRDKKSGQWHTETVNVTQELKKLFESCDTPPIDYANDENLIEAILQQEKKEFYSKLFWLIKLTMTLRHSKFKSDDDFILSPVKNSSGEFYDSRKVDGSLPKDADANGAYNIALKGLWNLQRINEWKGGKLNLKISNKDWFNFVQQKPYR

SEQ ID NO: 1048 - protein, 1295 aa, unidentified
  REGION 1..1295: note = Cas Enzyme sequence
MNEKKEFKSLEDFTNLYDVQKTLRFELVAVPETDSILKNRGIWYAKDKKKALEKPIVKFYMDIIHREFTDESLLKLKEQSTLCFDNYFILFKELKNIKNQGFGGDKKLKTEKLKNKKKEISAELSKIRQVFKQEGFDIVDEEWKTKYISNGKKIKNSKSKSYLILSENILDFLSNRFTAEEINRLKNLDKKHADDYKNIFNEENKNVFLNFKKFFGYFDTLINNRKNFYQIDGKSGRIATRSIDENINFFAENSYIYHDEFSSELKNELSDEERGIFEHSYFKKCLLQKDITDYNLFVGRVNKKINKYNQHHEKRVAFLYTLYKQILSFEEKEMYKHIEINTDHELVRTLRDFIIINNEKVKASKLIFDMFTKRCMKSENLDQIFLSKDSMNTIAHRIFKPWEEVMFLFGKSHFISIDTFKKLTESLTWKERWEESQNAKSLIFKDTSLVKEESSIFINFIEILKKEYLNQFIGFERDTRRGKIEFIGYESAIKNLEEKIAWFEEKSSSLNDEEKSDWIKTIKEYADVSLRIFQMTKYLWLPITGDEEDKDYMKIKTEIEDLSKDNDFYNLVNEYIIGYEPFGYRMSFQEYLTRKPFLEDKFKINFENSRLLAGWDKDMIDDRTGILLRKKSEYFLGVLDINKRHCLDNLTLLTRDETEEYDLMQFKQLPGIYRNLPRIAFPKKKEPILKPTTEVKNIKEEFDEFQKQKKNKEIGADVKFDNRKLNILINHYRNFLKKNYESEKCYDFSSLDETKQYKNLADFYADVDKVTYSLSFVKIHLEELIRKGEIFLFKIKNKDFSEKSKGKAKNLHTYYFEALFETENLRSGRTRLGAGAQIFYRPASINKAEQINSAIQTKEKKQIINDKSQNPYHFKRYSEDKLFLHLPIELNADSYESPEINKNTFDFIKANKDNLRIIGIDRGEKNLAYFSVISKDANGVLKVEKCGDLNLGYLKPLDDLEKTRQDQRKSWQSIATIKNKRDGYISHAVREITKLILNNKAIVVFEDLSGNFKRSRMKFEKAPYQQLELALIKKLNYLVKKNATVGEPGHYLSAYQLTDEVSSYKDMGKQTGIIFYTQASYTSRTCPQCGWRKRLTGLYYKDRVSAKKRFDQKTGIQLMYNGDNRCFDFAYHPTYDQKELKEKLDNVSSDVTRVKWDSKKRENIQYKDGELTKKLEEILKNKGIILEQNINTQIQNVDDAGFWEDLINTLRLILEIRNTDNENGRDYIECPHCHFHSDKGFQGMAWNGDANGAYNIARKGAMIANIICDPKNKTDKLTWGDLKIDLTDWDKFTQK

SEQ ID NO: 1049 - protein, 1295 aa, unidentified
  REGION 1..1295: note = Cas Enzyme sequence
MKGAKMGYENFINKNSCVKTLVNELRPTEWTRKHIEEDGILSADELRAEESDKLKSIMDDYYRRYIYTKLSGVNSLDWDELFSIMEVAYKSGKKDKNCKAQLEKVQEEMRGKFYNVLSDDEIFKMMFSGKFVTKVLPEFVRNNKEYSAEEKQQKLDTLKLFKGFTTSLVPFFNNRENIFSKKPIHSSICHRTVDENTAIFYQNIISYKNIEDNAPQEIEKIEHQGRQQLDEWKLPDIYSYSFYNNVLTQQGIEFYNDICGSVNSHMNLYCQQMKEKSGQYRMRKLYKQILSISSTSYEVPYKYEDDAQVYSSINEFVDRIFNSNFSAKVEKMLGKAEEYDFDKIYISSKNYSSISNFISGKWNTLDDCIRRYYEDNTVGNGDKKEKKVEEKVKKDSFRSLDSIDKVVEMYEKRGKSAKEYIYQIREIYNDNRLDKFGQDGSDTVKLIENDAKIERIKCVLDMLLNTNRFLDTFAVGDGEAVDVGFYSEIDELKEIIDGIDPLYNRVRNYVTRKPYNKNKIKLNFNSPTLAEGWSKSKEYEDNAIILRRDGKYYLGIFNVKNKPDKKIMEGYSGDVGDGYEKMVYSLLPGAGKMLPKVFLSKKGIGNYKPSSYIIDGYDNDRHIKSSKNFDINFCHDLIDYFKSSISANPDWKVFDFKFSDTKSYEDISGFYSEVEKQGYKISWVNISKEDIDRLDETGQIYLFQIYNKDFSESSMGTPNLHTLYFKNLFSEENIRETVLKLSGKGELFFRKASIDKPSGHRKGSILVNKTYKTNIGNEEVRVPIPDKEYMEIYTYLNNGRTTKLSENAQSLLDNKLVEYFEAEKEIIKDRRYTVDKFFIHTSVVINYNAEGASDKQLNEQVLEYISKQDDMHIIGIDRGERNLVYVSVIDMKGRIVEQKSYNVVNSYSYQKKLVEREKARDEARKSWKEVGRIKDLKDGYLSLVVHEIADMVIKYNAIIAMEDLNYGFKRGRFKIERQVYQKFESMLISKLSYLVDKTKMADEPGGVLKGYQLAFVPKDVKKVGRQCGIIFYVPPAYTSKIDPATGFVDLFKFKSGEKEGTARADNDRKEFLSKFDDIRYVEKNDNREEMFAFTFDYDNFAMHNTVIAKKKWTAYTFGSRIQKVYENGRYTSSTREIQLTDKMKRLLNENNIEYGDGHNLVDDIRTLDVDSSGAVINEIFKIFRLTVQLRNSKSEAENEKNGEYDRIISPIMNDAGEFFDSFKYKKMNEETEPGKHNATMPIDADANGAYCIAMKCLYEAKNIKSGWEKEGKKNNDLLCVTNADWFDFMQNKRYV

SEQ ID NO: 1050 - protein, 1296 aa, unidentified
  REGION 1..1296: note = Cas Enzyme sequence
MESPNNIFSNFTNLYQLQKTLRFELKPVPRDGETPEETLNRLKSSAFFMNDSRRESAYAEVKTIIDDFFRDFIDISLKKVKIDWQPLASAIDSKDEKVQQQQSDSIRKKILESFGFSKDSKEAKKTKKEIFGKDLFEKIIPNWLSEKVRAQKLTQEEYERKSKKLLEFKGFTTYFSGFWENRENLFSDKEQHTAIAFRIVHENFPRFYGNIKAFENAPQEIREEFIGKFPATLEAFNDTLTQAGIDSYNSHIGGERNAQSGVEKGRGFNEKITQWNQAHKEKKAQKMKLLYKQILSDRESAWSGRLILDKQDLTERLKKLREELFEKKNANGETAIESAVELFASLTDFDFTKIWFAEKNVPALALSLFGQWDALNSNLKISEGESDSKGKKEKLFSLQEIEEAIKFVRKNNESTEENPTLTSLFDFLGTIKYSDDSGIRFVPISKAAQAAQKELSSAILISEQADELLGDDAKIAGIKSALDRVMDIFHKVKVLQVREKNLQAKETDAAFYAEFENIFSPFSSCASVYDSVRNYLTRKPYSTEKMKLCFDSPTLANGWDENKIPDYRAFILRKDGKYFLGLLNNKSSAKERKAVVECEVTIDDSRQECYERMIYKYLPSPVKMLPKIFFSRKGIETYNPADELIEKSTRNDDVAKLVRFYQTAIPQYNNGDYQAFNFVFKKPEAYSTVNEFYGDVEKQNYRLDFKKVPVEKIKEFVENETLFLFEIYNKDFSDNSGGRKNLHTLYWLSAFSSENQSANFPIKLNGEAEIFWRAASKPSAESGIHKAGSVLVNRRDSEGKPIPEKTYLEIYRYKNGKLHKDELSEDARKLIESGKIVCKKASYETRKDRRYTEDKFFFHIPLTFNRTPKSGKDISPKEFNVRTRALLCNKTNSVKIIGIDRGERNLISLVLIDGNGKILRQKSFNEIEESSRHSTRSTNYQELLRIRETERQEARKSWKTIAKIAELKEGYVSQVVHAISKLIVEHNAIVVLEDLNVGFKRGRFAVERQVYQKFERALIEKLNFLVFKERKADELGGVLNALQLTNKFESFEKLGNQSGILFYVPAGYTSKIDPKTGFVNIFDLRGITNAKAKKELFSKFSRIYYSEKDDAFAFEFDYSNFKTHKQPIAKTKWTIYSYGKRLIWNPKSRKTDPPESPTQKLKEALGCAEINWRTSENLVNAICNVSEEGKFRTDFWDKIFRAFKCTLQMRNSIAGQTGSDADYLISPVKGADGAFFDSRAEAKKDSHQERLPTDADNNGAYHIALKGLMGIHRKFAAGWQKNDSWFKFVQNREFEK

SEQ ID NO: 1051 - protein, 1296 aa, unidentified
  REGION 1..1296: note = Cas Enzyme sequence
MENKDYSLSRFTKQYQNSKTVRFALTPIGRTEEYIIQNQYIEAARRKNQAYKIVKPIIDEKFRSMIDDVLTHCEKQDWVTLDKLILQYQNNKCRENMDALAEQQEEIRKNISEEFTKSDEYKNFFGKEDSKKLFKIFLPEYLNQINASESDKEAVNEFQKFKTYFSNFLIVRADIFKADNKHNTIPYRIVNENFMIFAGNKRTFSNIIRLIPNALEEIAKDGMKKEEWSFYNIQNVDSWFEPDSFQMCMSQKGIQKYNFIIGLVNSYINLYTQQNPQATEVKRSRLKLRMLHKQILSDRVNPSWLPEQFKEGEEGEKQIYEAILALENDLIKNCFDKKYDLWIQSIDIQNPRIYIAASEMARVSSALHMGWNGLNDVRKTILLKSDKKQAKVEKILKQDVSLKDLSDTLNRYADIYKEEQIPSLYQYIEYGSELLQDCAITRKEYHDLLNGNSNTLSLNQNEKLIEGLKAYLDSYQAIVHFLNVFIVGDELDKDTDFYAELDGLVESLSEIVPLYNKVRNYITRKVYSLDKMRIMFERSDFLGGWGQSFDTKEALLFQKDNLYYIGIIEKKYTNMDVEYLHEGIKEGNRAIRFIYNFQKADNKNIPRTFIRSKGTNYAPAVRKYNLPIESIIDIYDVGKFKTNYKKINEKEYYESLEKLIDYFKDGILKNENYKKFHFNWKPSNEYENINEFYNDTNNACFLLEKEEINYDHLKEQANQGKIYLFQISSKDFNEGSKGTPNLQTMYWRELFSNQNCKDGVIKLCGGASIYMRDASIKQPVVHRKNAWLINKWYKVNGQNVVIPDNTYVKFTKIAQERMNEDELTPQERQLWNSGLIQKKKATHDIMKDRRFTKKQYMLHAPLTINYKQQDSPRYFNEKVRSFLKDNPDINIIGIDRGEKNLIYITIIDQKGNILKGMQKSFNQIEEKGKEGRTIDYYSKLESVEARHDAARKNWKQIGTIRELKEGYLSQVVHEITQLMIQYNAVIVMENLNMGFKKGRMKVEKSVYQKFEKMLIDKMNYLAFKRDMQGNAIDPYEVGGVMNGYQLTDRFTSFADMGSQNGFIFYVPAAYTSVIDPVTGFVNVFQKTEFKTNDFLHRFDSISWNDKEQSFVFTFDYQNFKCNGTCYQNKWSLYADVDRIETIIKNNQVDRIEPCNPNQKLIDFFDKKGIIYRDGHNIVDDLEKYDSKTISEIIHNFKLILQLRNSMRNPDTGEIIDYIASPVMHNEERFDSRKRNPELPQDADANGAYHIALKGLMFLQKINEYADSDGNMDNRKLKITNEEWFKYMQTRKEHTYF

SEQ ID NO: 1052 - protein, 1296 aa, unidentified
  REGION 1..1296: note = Cas Enzyme sequence
MKSIYEDFIGLESKNLTLRFALKPEPKTEENLKQYWDKLRDEERAKAYPIVKKILDREYQRLISEGLKSLENQNALDWTELAEYIRTSSLNKKKNEEKRLRKLIAQSLKAHPLVDKLKVKNAFGKNGYLETLPLGKEEKEAVKVFAGFGGFFNNYNKNRENYFSTEEKSTAIANRIVNENFSKHFSNVEIVTKIQKEVPELIQIVEAQFKGYDAIFTVNGYNMALSQAGIDTYNEMVAIWNKEANLYAQKAGKLPDGHPLKKKRNYLLSALFKQIGSEKEHLIQIDRFDGDEEVIEALTGVKKMLQEADVFEKLNMLVEDMENWDYSKIYLSAQSLSNVSVFLNNLYEDERENSWNYLDNVLREKWQIELQGKKKGTDLEEAIRKKKKSFYSIAELQETVNALEETDKCYSVSKWLLEALKSETVIEEKEKDAEDFCTKWKTERNPLKETDITALKEYLEQWIFLARYCKSFYANGIEKKERDEAFYHILEDVLYVLKEVIYFYNKVRNYVTKKPYSLEKIHLKFGHVTLGNGWHINQEKDNGTTLLRKDGKYYLAITNSLNKKICIPSQIEGTGNDYEKMVLNAFKKDKIYMLIPKCTTERKNVESCFESKESAQYFIIDTPKFVKPFKVLREEYELNKITYDGVKKWQSDYLKKTKDEKGYKEAVAKWIRFCMRFLQSYKSTAIYDYSTLQQPEEYETVDSFYQDVGKITYECHFEYVPTSEIERLENEGSIFLFQIYNKDFSENRRPDSKKNLHTLYWEALFSEENQKAKVIQLSGNAEVFRREKSIENPIVHKAGEVLVNKRTKKGEPIPDDIYRDLCNYFNGKDVPSEKEDYKEYLDKVYTSTKKYDITKDKRFTENKYEFHVPITLNHQAEGVKYLDQKILRMLRDNPDVNIIGLDRGERNLISYVVLNQEGKIVNNQQGSFNIVGKMDYQKKLYQKEKNRDKERKTWKNIETIKDLKEGYISQVVHELTDMAIRNNAIIVMEDLNFGFKRVRTKVERQVYQKFELALLKKLHYLVTDKTEGKAMLKPGGVLQGYQLAREVKTLKEIGKQCGCVFYVPPGYTSKIDPTTGFVDVFNMSGVTNREKKKAFFEKFDNMFYDEKRDMFGFSFNYEKFATYQSSHRNDWIVYSNGSKYVWNSLNKTNELIDVTKELKMLFEKYAINYRNEALFEQIISKDTDKNNADFWNKLFWYFRVLLRIRNSSGELDQIISPVLNQNGEFFETPKKITEKSYLSDYPMDADTNGAYHIALKGLYLIQEKIADESVDLDDKLPNDFYKISNAEWFRFRQKEK

SEQ ID NO: 1053 - protein, 1296 aa, unidentified
  REGION 1..1296: note = Cas Enzyme sequence
MTQKRTLADFTNKYSLSKTVRFELQGVGRTVEHIRNKGIINKDEERALSYSKMKKTIDAFHKYFIELAMSQVKLTKLDAFAELYAAKPEEKKEDGFKKKFDKVKEELRKEITKGFSSEKAKSIFEKIDKKELLTELLESWIAQQPDKEIYFDQDFKTFTTYFGGFHENRKNMYSDKEQSTAIAYRLVHENLPKFIDNIRIFESLAEKPDLYTKCATLYKEIEEYLNIKTIDEAFELSYFNEVLTQKQIDVYNLIIGGKTADDGKKKIQGLNEYINLYNQKQADKKNRVPKLKPLYKQILSDRESISYLPEQFKESQEVLDAINAYYHSYLLSFEAKDKDKAENVLVEIQQLLADIKSYDLSKLYLRNDTKLTAISQRLFGSYAVIGSALDYYYQTTIQPEFETEYAKANDKKREKLDKAKEKYTKQAYLSLAGLQQAVDAYIATLDEGEEVRKKYTPTCLADYFHTHFKAQKKTDSEKDYTLTANVEAKHSAIKGILNIPYPNDKKLYQQQKDIDNIKLFLDSVMELLHFVKPLSLNKDSALEKDNSFYGQFEVLFEQLDMLTPLYNKVRNYATQKAYSTEKIKLNFDNSTLLKGWDINKETDNTSVILRKDDQYYIAIMPQDYKKAFQSIPKAIDGESTFEKMDYKQIALPMGVGAFVRKCYGTAMQYGWVCPDDCKNEEGKIIIRQDEIKGNLAALIDCYKDFFDKYEKEGFQYKEYNFKFKDSAAYENLNQFFLEVEQQGYKISFREVAETYINQLVEEGKLYLFKIHSKDFSAHSKGKPNLHTLYWKALFEPENIKDVVYKLLGQAELFYRKASITSDKIIVHRAHEAIDNKNPEKKKATSTFAYDLVKDRRYTVDKFQFHVPITLNFKATGNNYINQDVLTYLQRNPEVNIIGLDRGERHLIYLTLINQRGEILKQLSLNDIINTYKDAAGNTVDVKTPYHTLLDTREKQRAEARENWGAIETIKELKEGYISQVVHIIAKMMVEHNAIVVMEDLNFGFKRGRFKVEKQVYQKLEKMLIEKLNYLVFKDKAPSETGGLYHALQLANKFTSFKEMGKQSGFLFYVPAWNTSKIDPTTGFVNLFDTRYESIEKTKSFFDKFKSICFNPIKNYFEFAFDYTDFTTKADDTKTNWTVCTHGDRIRTYRNPDKVNQWDNKPIQLTQEFEDLLGKYNITYGAGACLKAQIAEQKDKEFFASLLHLFKLTLQMRNSITNSEVDYLISPVANERTGLFYDSRKKNEKLPKDADANGAYHIAKKGLWWLEQIHELEGQEWKKLDLDKSNKGWLAYVQQSK

SEQ ID NO: 1054 - protein, 1297 aa, unidentified
  REGION 1..1297: note = Cas Enzyme sequence
MATLVSFTKQYQVQKTLRFELIPQGKTQANIDAKGFINDDLKRDENYMKVKGVIDELHKNFIEQTLVNVDYDWRSLATAIKNYRKDRSDTNKKNLEKTQEAARKEIIAWFEGKRGNSAFKNNQKSFYGKLFKKELFSEILRSDDLEYDEETQDAIACFDKFTTYFVGFHENRKNMYSTEAKSTSVAYRVVNENFSKFLSNCEAFSVLEAVCPNVLVEAEQELHLHKAFSDLKLSDVFKVEAYNKYLSQTGIDYYNQIIGGISSAEGVRKIRGVNEVVNNAIQQNDELKVALRNKQFTMVQLFKQILSDRSTLSFVSEQFTSDQEVITVVKQFNDDIVNNKVLAVVKTLFENFNSYDLEKIYINSKELASVSNALLKDWSKIRNAVLENKIIELGANPPKTKISAVEKEVKNKDFSIAELASYNDKYLDKEGNDKEICSIANVVLEAVGALEIMLAESLPADLKTLENKNKVKGILDAYENLLHLLNYFKVSAVNDVDLAFYGAFEKVYVDISGVMPLYNKVRNYATKKPYSVEKFKLNFAMPTLADGWDKNKERDNGSIILLKDGQYYLGVMNPQNKPVIDNAVCNDAKGYQKMVYKMFPEISKMVTKCSTQLNAVKAHFEDNTNDFVLDDTDKFISDLTITKEIYDLNNVLYDGKKKFQIDYLRNTGDFAGYHKALETWIDFVKEFLSKYRSTAIYDLTTLLPTNYYEKLDVFYSDVNNLCYKIDYENISVEQVNEWVEEGNLYLFKIYNKDFATGSTGKPNLHTMYWNAVFAEENLHDVVVKLNGGAELFYRPKSNMPKVEHRVGEKLVNRKNVNGEPIADSVHKEIYAYANGKISKSELSENAQEELPLAIIKDVKHNITKDKRYLSDKYFFHVPITLNYKANGNPSAFNTKVQAFLKNNPDVNIIGIDRGERNLLYVVVIDQQGNIIDKKQVSYNKVNGYDYYEKLNQREKERIEARQSWGAVGKIKELKEGYLSLVVREIADMMVKYNAIVVMENLNAGFKRVRGGIAEKAVYQKFEKMLIDKLNYLVFKDVEAKEAGGVLNAYQLTDKFDSFEKMGNQSGFLFYVPAAYTSKIDPVTGFANVFSTKHITNTEAKKEFICSFNSLRYDEAKDKFVLECDLNKFKIVANSHIKNWKFIIGGKRIVYNSKNKTYMEKYPCEDLKATLNASGIDFSSSEIINLLKNVPANREYGKLFDETYWAIMNTLQMRNSNALTGEDYIISAVADDNEKVFDSRTCGAELPKDADANGAYHIALKGLYLLQRIDISEEGEKVDLSIKNEEWFKFVQQKEYAR

SEQ ID NO: 1055 - protein, 1298 aa, unidentified
  REGION 1..1298: note = Cas Enzyme sequence
MVFSEFTGQYPLSKTLRFELIPQGKTEYWIEKNGLLASDAKKARDYQDVKKIIDNYHKFFIDSVLERASFDWDGLENSITSYRKDKTLNDELSKVQKQMRNKIAKLFSDDDRFSILTAATPNDLFKTLLPDWLQHETSLHDSAEAVSTFKKFSTYFTGFQENRRNVYSSDEIATSVPYRIVHDNFPKFLQNVELFNTINDKCPAVIKEASNELSMLLGGKKLSEIFSLSSYNSFLNQKGIDVYNQIIGGISEQEGEKKIRGINELLNLYWQQNPEFARDNRKIRLVPLYKQIMSDRSTLSFIHDSITSDNELKKSIVEYTELHLTKISIQNEEVGFLDFCRNLLSSISDYSQEGLFIDLKSITEVSRVLFENWDELNKRMYAYALAVYKTKAAADKWVKSKEFSFAELDKVLSFTSESIDVTAKRMKNFFSNDNTEKVLESESLSLSVKELIKNIENSLQHVKPILESENEEFQIREDNEKVELIKKYLDDVQKLFHRIKPLKAGSEAGQDTAFYSLFEVMYENLSYIIPLYSKVRNYLTKKVFEEGKYKLNFDAPTLASGWDENKEDANSCVLLKKNDKYFLGVMNTKNKPKMKDAAAKNEESFYEKMVYKLLPGPNKMLPKVFFSRKGIENFDPPAHILNGYNAGLHKKGDSFDKSFCHQLIDFFKDSISIHPDWKAFNFKFSDTSSYNDISDFYKEVSDQGYKVSFQKLSKNKIFQWIDDGRLYLFQIYNKDFSEKSTGTKNLHTLYWESLFSKENLDKIVFKLNGEAELFYRPLSIKNPVIHRAGEKVVNRTTIEGYSVSENIHSEVFKYVNKKVNTLSNEARTLYENKQLVVKEVSHEITKDRRYTTSKYLFHVPITINFTASERNSYLNERVRKYLKNNEAVNIIGLDRGERNLIYMTIIDRKGNILLQKSFNTVEQKRQDKVVRVNYHEKLNLREQERDTARKSWKTIGKIAELKEGYLSAVIHEIAKLMIEYNAVITMEDLNFGFKRGRFHVEKQIYQKFEKMLIDKLNYLVFKDKKADEEGGVLNGYQLTERFESFQKMGKQCGFLFYVPAGYTSKIDPLTGFVNMFELKGLTSIDKKRDFFAKLDSLIYDSKTDSFIFSFDYKNFGGKAAEEMKKTKWAVYSKGKRIVFDKKTRGSVTVDPTKQLKELFTNEKIAWEEGNELLDVVLELGADNETLKTQAVLKFYDTLYRSFSATMQMRNSNNQTGEDYIISPVCTEDGIFYDSREELLKADRGITAILPIDADANGAYHIALKGLYLLNQFDKTEDGLLKKIDMRISNVNWFSFRQH

SEQ ID NO: 1056 - protein, 1299 aa, unidentified
  REGION 1..1299: note = Cas Enzyme sequence
MSSFDSLTNLYSLSKTLRFELKPVGKTQKLLDDNKIFEKDEKRAESYKEAKKYFNALHREFIDEALKDITLPINLYEEFEKIYLVCKKKRNKTNIAKLEYSAKKLRTAIVEDFNRKVEELRDEYLKEIGDKKKKKKTQELKGMDLFFKVEVFGYLKQKYLEAKINGESIFNPFNKFGGYFRKFHETRKNFYKDDGTSTAIPTRIINVNLEKFLENKKIFDIKYFQKYESIFTEDERIIFELEHFNNCFTQAQIDQYNDTIASLKSKINKFRQVNPDINKKDLPFFKRLFKQILGQQSKHNTEQDNFIEILTDEDVFPVLQKFINENKTYFPEAETLFKKFINSQRQQADEYNIDEIYVANRFINLISNKWFAAWNTIRNLLRDELNLKKAQKKFPDFIPVATLKTVLKKAKSKIDAKDLFRKDYKEIIASDIDFYQIFIKIWEREFDDNIKDYNSETGKIEQMISEDKQYLPNKKEKLKNGQVGIIHNEKILDYAQSVLNIYQMIKYFSLEKGKEREWNPEGLEEDSIGSFYDEFNKYYENVNTWKYFNEFRNYLTKKPYRVDKIKLNFECSSLLGGWSQSYESNGAFIFEKNGKYYIGIINGTKFSEKEVAALYKNISDDNICKRMMYDFQKPDFKNFPRLFIRSKGENFAPAVEKYHLPIHSILEIYDNGLYKTENKNNPSYQESLNKMIDYFKLGIKQHESYKHFNFKWQDSTRYKNISDFYNDVTRSCYEISWENTNFSELHKLVEKGRIYLLQIYNKDFELDESIAPAGYVFKGKSGNKNLHTIYWKALFGDKNLEKTILKLNGEAELFLRRGSLKPEIDTERKTKRKVTKYKRYTENKLFFHCPITLNFTENDYEINIKIRDLLKNNPDINIIGIDRGEKHLAYYSVINQQGDILDIGSFNKIQERADREATDYQRKLDKIEKDRDWQRKSWQEISNIKEMKKGYISQVVHQICKLIKQYNAIVVFEDLNIGFKRGRFAIEKQVYQNLELALAKKLNYLVFKEAQEGESGHHLQAYQLTAPVNNFQDIGKQCGIMFYIPASYTSAVCPVCGFRKNISTPVEKLEKNRELIEKFVISYDSKKERFCFHYKRSDFYTAENENKNNSELKLFSDIDLKNDVTFYSDVERLKYKRNQNNRGGEIEARYPNEELKKNFAQNGVNFIDNPNISEQIKNQEFDNENFYKPLIYKIALILQLRNSKTVKNDDGTINEKDSRDFISCPTCYFNSEKNLKNLLEKYKGERKFEFNGDANGAFNIARKGSLILKKIYKAKDVGKIDFNSLTVSQEEYDKFVKNL

SEQ ID NO: 1057 - protein, 1299 aa, unidentified
  REGION 1..1299: note = Cas Enzyme sequence
MKNNFNEFVGMYSLSKTLRFELIPQGKTLENIQKKGIIATDTARNESYKEMKKTIDEYHKDFINQALSEAKLNKLDEYYQLYNLNAEKKKDENFKKKFDDVKKELRKEIANSFKSGAVKGIFERIDKKELIKEDLENWINENNNNKYFDKDFKTFTTYFKGYHENRKNMYSDEEKSTAIAYRLINENLPKFIDNLNIFEKVKNSQVAENFEAIYKDLEAILNVNSIQDIFTLNYFNEVLTQPQIEAYNAVIGGKSENELKIKGLNEYINLFNQKQTEKSDKIPKLKPLFKQILSEKLHISFLPEAFESTDEMLTAIEKYYKNNLILCDINNNGKQLNILCEIQKILADLKEYDLAKIYLRNDTKITNISQKIFGNYNIIGEALSNYYDKIIKPDFENLYQKADEKKREKLDKKREKLDKEKEKFAKKDYIAIEELQKSIDLYIADFDNSDENKSVKERYSKTCIADYFKNHFFAETKEEKGKSFDFISNISAKYNCVKGILNISFNNSDLTMEQKYNIKLFLDSIMEMLHFVKPIYLKSDEISQKDENFYSTFDPLFEQLSLVTKLYDKVRNFVTKKPYSIEKVKLNFDCSTLMDGWDENKESSNSSILFMKGGSYYIGIMDKRNTHIFEDIEETFEENNYAKIVYKLLPGPNKMLPKVFFSKSRIDEFAPSNEILEIYEKESFKKGQEFNINDCRKLIGFFKDSIQKHSDWKKFNFVFSDTSQYNDISEFYKEISQQGYKITIKYISNKYIEQMINDGKLYLFQIYNKDFSSYSKGKPNMHTLYWKALFDEENLKNVVYKLNGQAEIFYRKASIEEKNKTTHKANKPINAKNPKTPNKTNIFEYDIVKDKRYTIEKFQFHCPITINFKANENPKVNSKVFEYLKNNPDVNIIGIDRGERHLLYISVIDQKGNVLKDKNGKSIQYTLNEIVGQYKNSKGETVDFKTPYHTLLDIKENEKAKARENWSTIENIKELKEGYISQVVHLISKLMLEYNAIVVMEDLNFGFKRGRFKVEKQVYQKFEKMLINKLNYLVFKDKAPNEIGGLYKAMQLTNQFKSFKEMGKQNGFIFYVPAWNTSKIDPTTGFVDFLKPHYKSIEDSREFINKFDSIRYNKEKDYFEFAFDYDNFTTKAEGTRTQWTVCTYDIERYAWNKSLNQNKGDYEKINVTQKIKELFTENNIEFSSGNDLKRLITNINNSKFYSKLLKYLSVTLSMRYSSSKDGKDFILSPVINSNNEFYYSENASKELPQDADANGAYHIALKGLWVLNEINNTDDFKKLRIAISNKEWLNFAQDIAKRK

SEQ ID NO: 1058 - protein, 1299 aa, unidentified
  REGION 1..1299: note = Cas Enzyme sequence
MYLCNHKICRTLIQFTMKDLNQFIGKYKVEKTLRFELAPIGKTEAWMESKGVIANDKRRADNYTIVKSLIDRYHKVCIRESLTGCNLNWTRLSEAVETYRRWQDTESRKALLKCQDEYRTEIAKRFLSFEDFAELTAPSPSVLIKDTLPYHVTNKVHPEFSDIDDVDNAKQALSLFEGFAMYFESYQKNRSNLYTAKNIASSVAHRIVHDNFSKFLANIKVFENLRVIYPEIIEQCTNELRQLLKGKQLEEVFRVESFNNVLTQEGIDFYNTIIGGVSVLEGEKKFQGINELVNLTLQKENQGRGKRTALTMVPLFKQILSDRNTYSYIPERINDEEELISVLRAFHTHLASSYLNGREVNVMEELLKIVENINHFDPNGIFVDAKKLNGISKKLYDDLFELRAKMTSHLEEQKQTKKSIEKFFQKEAFSITELCLDKKHSLAKYFTGLKGVLKDIDKKWEKFETRNNKDGQKKYKDSHTGIELVRNLLDGYKGFFAVCSVLNVDSENDLDNNFYGIFAPLFTELRGIIPLYNQVRNFLSQKPSDEKKYLLKFDNSKCSDGWDAPQTKSVRIFRRQGKFLLGVADSENRSCLNDLSSYTPISSDDQIDFLDYSQGGHMGQNLLTLVVRDGKTVMVKGRKENGENPGLERQLKELLPPDIYRIRKSQSYKNESPNFSKEDLLLFVDYYKQRAKEYYSHFSFTFKDSCDYASFTELVEDIDEKAYQIKFVPTSYKNLLRLVNEGKLYLFDIRNKDYEPGAHGKKNLHTLYWEQLFSQENLDNLTIKLNAKSTLFCRPQVVANPMTHKKGSMLLNRTDKNGQPIPEPVYQQLYKYVNGKLAETKLNDETKGYLGKIVVKEAQYAITKDKRYTKQKYFIHFSTTLNANAPKTADINEDVLNYIKDNPDVNIIGIDRGERNLLYVTLINQRGEILDQKSLNVINDFDYHAKLEQREKERDEARKSWQTVGNITDLKEGYLSAAIHEITTMMIENNAIIVLEDLNRKGFMPKRFKFEKQVYQLFEKKLIEKLNYLCSKDINPTANGGVLRGYQLTEKFVSFEKMTKQNGNLFYVRPDYTSAIDPVTGFVSHFNFKDITNTKGRKDFFEKMESITYKNGYFEFTFDYRKYKPKVKDFKNIWTVCSSGKRVLWSKETKEYTDYYPTTAISGAFASRGITLDEGADVKALLSGIDDSISNADFYRIMFEAFKRIAQLRNTNSNTGEDYIHSPAIQDGKQYCSLDELRKWKDNGESSIPSLPIDADANGAYHIALKGLYLMLNPQAKQIENEKWFRFVVEKPFKEEKVM

SEQ ID NO: 1059 - protein, 1300 aa, unidentified
  REGION 1..1300: note = Cas Enzyme sequence
MNNKLTAFTGKYQLSKTLRFELKPVGKTLEHIQAKGLISQDEARAASYQKMKKTIDGFHKHFIELAMSTVKLTKLEAFQELFNASPERKKEESYKKELEKVQDSLRKEIVKGFSTGEAKEIFAKIDKKELITELLEQWMQRQNEDDFYFDEKFKNFTTYFGGFHENRKNMYSDQAQSTAIAYRLIHENLPKFLENIKIFEKIKAVPEVYEKCQVLYKEIEEYLNINSIDEAFELDYYNEVLTQKQIDVYNLIIGGRIPSEGKTKIQGLNEYINLYNQRQEKNKRIPKLKILYKQILSDRVSTSFTLDKFTKDQEVLNAVEEYYKFELLDYKPKDKEDTENVLESVKEIVAHLTDYDLRKIYLRNDTKITTISQKLFGNYGVFSTALAYYYTTVIKPNFIEDHQKGNDKKREKLDNEQAQFLKQSYLSLDLLQIALDHYIPTLDQEEDVVKRYSSNCLANYFKDYFKAEKEEGKDKEFGLIDNIKAKYSCIQGMLGTDYPEDKKLVQQKEELFNIKAFLDSLMELLHFVKPLSLPNDSLLEKDQNFYGQFEPLMEQLNGLIPLYNKVRNYATQKPYSEEKVKLNFKNPELLGGWPVDREIATSSVLFRDGENYYLGILDKESKKDFKNLPKPDNPNDVLYKMLYLQAADPSKDVQNLMVIDGKTVKKNGRKEKAGEFMGQNLILEDLKNTYLPDDINTIRKRKSYSKLSDNFSKSDLIAFIDYYKQRAIEYFHNYQFQFKNSDEYRDFGEFTTHINEQAYQINFTEISWKFIDELVNEGKLYLFQIYNKDFSSYSKGKLNMHTMYWKALFEEENLKDVVYKLNGQAEVFYRKSSIKNPVVHKANEAVANKNPLAQKKESVFEYDLIKDKRYTEDKFHFHVPITLNFKATGKEFINQDVIEFLHQNPDVNIIGLDRGERHLIYLTLINQKGEIILQESLNNITAENHPITTPYHELLNKKEKERDEARKSWGTIENIKELKEGYISQVVHKIAKLMVQYNAIVVMEDLNFGFKRGRFKVEKQVYQKLEKMLIDKLNYLVFKDVEPNEPGGLYNALQLTNKFESFQKMGKQSGFLFYVPAWNTSKIDPTTGFVNLFDTRYENLEKAKAFFSKFEEICFNPIDKYFEFKVENYASFNAKAEGSQQDWTVCSFGERIKTFRNPHANNQWDNKVNQLTEEWQGLFKKYNIDYRTELKEQILQQTEAGFFKAALDLFKFTLQMRNSITNSEVDYLISPVKNKQGQFFDSRQADATQPKDADANGAYHIAKKGLMWLAQINAFDGADWKKLDLDKSNKGWLQFIQNKK

SEQ ID NO: 1060 - protein, 1300 aa, unidentified
  REGION 1..1300: note = Cas Enzyme sequence
MKNMESFINLYPVSKTLRFELKPIGKTLETFSRWIEELKEKEAIELKETGNLLAQDEHRAESYKKVKKILDEYHKWFITESLQNTKLNGLDVFYHNYMLPKKEDHEKKAFASCQDNLRKQIVNAFRQETGLFNKLSGKELFKDSKEEVALLKAIVPYFDNKTLENIGVKSNEGALLLIEEFKDFTTYFGGFHENRKNMYSDEAKSTAVAFRLIHENLPRFIDNKKVFEEKIMNSELKDKFPEILKELEQILQVNEIEEMFQLDYFNDTLIQNGIDVYNHLIGGYAEEGKKKIQGLNEHINLYNQIQKEKNKRIPRLKPLYKQILSDRETASFVIEAFENDGELLESLEKSYRLLQQEVFTPEGKEGLANLLAAIAESETHKIFLKNDLGLTEISQQIYESWSLIEEAWNKQYDNKQKKVTETETYVDNRKKAFKSIKSFSIAEVEEWVKALGNEKHKGKSVATYFKSLGKTDEKVSLIEQVENNYNIIKDLLNTPYPPSKDLAQQKDDVEKIKNYLDSLKALQRFIKPLLGSGEESDKDAHFYGEFTAFWDVLDKVTPLYNKVRNYMTKKPYSTEKFKLNFENSYFLNGWAQDYETKAGLIFLKDGNYFLAINNKKLDEKEKKQLKTNYEKNPAKRIILDFQKPDNKNIPRLFIRSKGDNFAPAVEKYNLPISDVIDIYDEGKFKTEYRKINEPEYLKSLHKLIDYFKLGFSKHESYKHYSFSWKKTHEYENIAQFYHDVEVSCYQVLDENINWDSLMEYVEQNKLYLFQIYNKDFSPNSKGTPNMHTLYWKMLFNPDNLKDVVYKLNGQAEVFYRKASIKKENKIVHKANDPIDNKNELNKKKQNTFEYDIVKDKRYTVDKFQFHVPITLNFKAEGLNNLNSKVNEYIKECDDLHIIGIDRGERHLLYLSLIDMKGNIVKQFSLNEIVNEHKGNTYRTNYHNLLDKREKEREKERESWKTIETIKELKEGYISQVVHKITQLMIEYNAIVVLEDLNFGFKRGRFKVEKQVYQKFEKMLIDKLNYLVDKKKEANESGGTLKAYQLTDSYADFMKYKKKQCGFLFYVPAWNTSKIDPTTGFVNLFDTHYVNVSKAQEFFSKFKSIRYNAANNYFEFEVTDYFSFSGKAEGTKQNWIICTHGTRIINFRNPEKNSQWDNKEVVITDEFKKLFEKHGIDYKNSSDLKGQIASQSEKAFFHNEKKDTKDPDGLLQLFKLALQMRNSFIKSEEDYLVSPVMNDEGEFFDSRKAQPNQPENADANGAYNIAMKGKWVVKQIRESEDLDKLKLAISNKEWLNFAQRS

SEQ ID NO: 1061 - protein, 1300 aa, unidentified
  REGION 1..1300: note = Cas Enzyme sequence
MGNNKTTIFDEGFTNLFSLTKTLRFELKPTPETKSLVDVIKEDKDINRLYREEMKPMFDKLHEDFITEAMQSTELPLDLLESLEKSFLKLKELKKDKKINRKIIDKLENSKDGEIEKLQEQLRRELVKAFNNLGDNWKTIYSSLKLKGVGFKILTEAKILEVLLKRNPDKEASIKKFSKFFTYFSGFNQNRENYYTSEEKATSVANRTINENFSRFLDDKQKFEELILVMPQLSTFVDKFKLENYKDYLTQEGIDKFNQDIIGKINKESNLFSQQNRGALPKAPKFKILYKQIGCGKKESFIFDIKENEEWGSLQTLISEQYKKVQVDNKDILLLEYLKELYLHFFSAPDLYDLDKIYFNKSSINIISSLWFVNWHKLSELLALSKIIKNKNKESGEYTIPEKISLTDLREVLETERNVGDLFRCGKIDDSEGKKDNPVGVYEKLFAHDGWKTFLAIWQFEINSNFRLLADKIKAFDELKIKTFSKKEHTQFIKEICDAFLSIERMVKFHRVKEAHEKDDSFYSIIDLYLQETTLNKYYDAFRNYLTKKPFDENKVKLNFKSGDLLGGWSKTFETYGALLFENGGKYYLGIINGTKFSETELASLYSKIDIKNKATRLLYNTQKIDNKNPPRWFIRSKKTAFSPMVREGLIDPVNILDLYDRKLYSKTENKDGYREYLPRLVDYFKEGFLKHKDFVSFSDSFLWLDSKEYDTIVDFYNHTADMCYKTSWEDINFEALRTLSQDGRIFLFEVCNKDFRSQSTGLKNLHTLLFLELLKPENNIKFKLLGGGEIFYREKSIVREIDKDRSFKTDNFEIIKNRRYSEEKYLLHFPIEIKGRKLKGSFNAFLNQKIKKDVKNVAILGIDRGEKHLLYWSLTDGIGRMISQGSFNKIKTKSLVDEKKMFYRYANKSGWIDIWKGFDNKILGKLEDIKLENTGKRVDYVDYHLLLDYYEKKRILARQSWETIGKIKDLKEGYLSQVVHEIYQLVIEHKAIIVLEDLNSEFKAKRTSKVEKSVYKKFELALARKLNHLILKDKEANEVGGVLNAYQLTPAIPAGKIGEFEKSKQWGIMFYVRPDYTSSTDPVSGWRKTIYISNSESIPVIKKKWKEFGISINFDKEKDCFKFSYDKWQLYAHKDLSRLYWNRNEKNEVGGFGRVKSYNLKQEFETLFSGLDKTKNINQQIESNEKFNWKQLVFCWNLLNQIRNSDKNETDDRSDFIQSPVWSEKIQGFYDSRESSLYESKYHLLLPNNGDSNGAYNIARKGVILVNRIVQNSEKFETFISNEQWDDAARDWDSVMKQE

SEQ ID NO: 1062 - protein, 1300 aa, unidentified
  REGION 1..1300: note = Cas Enzyme sequence
MENKKLEIMNVFNQFTGLYSLSKTLRFELRPIGKTLEHIEKKRLIAQDEQRAREYEKVKDIIDRYHRKFIHMCLSGLKLKLNSDGGDDSLEDYVKIISLDKRKEKEEKQFSKIKSNLRKQIVEAFKSGATYGDLFKKELIKNHLIHIAESEEEKFMIENFSKFTTYFTGFHENRKNMYLEEEKSTAIAYRLINENLPIFYDNMQSFKKIAGSEVAAHFVEIETVYQEYLKYLNVGHISEIFSLDYFTNVLTQEQIEVYNCIIGGRVEDGVKLKGINEYVNLYNQQQRDRKKRLPLLKPLYKMILSDKVDVSWLPEKFESDEEMIGAINGLINDLQPVLYSDNDKSLKYLLQHIGEYDLSRIYISNDLGLTDISQQMFGQYDVFTKGIKDEKRQHATPTKKERDNAELYEERINKLFKLEKSFSIAYLNSISGKTQTIEAYFASLGAYDRNGEQRNIFTQIEKARVAAADILAGKHTNLNQSKSDIKFIKDLLDAFKALQHFVKPLLGSGDEADKDNAFYAKLREVWEALTFITPLYNKVRNRLTCKPYSEEKFKLNFENNGNLLGGWVDSQTKSDNGTQYGGYIFRKKNSIGEYDFYLGISADTKLFRKDDSVINDGTLYERLDYYQVKSHTIFGASYHGNYDVDANSLFEAFHDEIIKQKLDTSFLRKDKETIIGYLKRIKKTDSQTYNILLKSEIIENKYSEMKQHILATLASLSRVPAAVEISKRKELSIEELFDEISKMPSKSFGFFPVKIEDVTHANGREVKPLFLFKISNKDLAYAEKHSKGLRKSRGTDNLHTMYFKVLLSMIQGTYDIGTGEVFYRKHTHELAENTARHKANQPIKNKNKANRTQESVFPYEIIKDRRYTCDKFQFHLSIITNYNSPKTADVNKLVHDAIRNGEIEHIIGIDRGERHLLYLSLIDLKGNIIKQFMLNEIINEYNGHTHSTNYKDLLVSREGDRNEARRNWQKIENIKEIKEGYLSQVVHIIAKMMVEYKAIVVLEDLNGGFMRGRQKIERQVYEKFEKMLIDKLNFYVDKQKDTDDIGGVLHPLQLTNKFESFRKLGKQSGWLFYIPAWNTSKIDPVTGFVNMHDTRYENADKARCFFLKFDVIRYNVEKNWFEFTFDYNNFHKKAEGTQTKWTLCTYGTRIKTFRNPKKNNQWDSEKVILTDEFKEVFADAGIDITGNLKEAICSLTEKKYLEPLMHLMKLLLQMRNSETRTEVDYILSPVADADGNFYDSRKNIATLPKDADANGAYNIARKGLWAIRKIQTTPIGEKLNLAISNKEWLQFAQQKPYLDE

SEQ ID NO: 1063 - protein, 1300 aa, unidentified
  REGION 1..1300: note = Cas Enzyme sequence
MENKKLEIMNVFNQFTGLYSLSKTLRFELRPIGKTLEHIEKKRLIAQDEQRAREYEKVKDIIDRYHRKFIHMCLSGLKLKLNSDGGDDSLEDYVKIISLDKRKEKEEKQFSKIKSNLRKQIVEAFKSGATYGDLFKKELIKNHLIHIAESEEEKFMIENFSKFTTYFTGFHENRKNMYLEEEKSTAIAYRLINENLPIFYDNMQSFKKIAGSEVAAHFVEIETVYQEYLKYLNVGHISEIFSLDYFTNVLTQEQIEVYNCIIGGRVEDGVKLKGINEYVNLYNQQQRDRKKRLPLLKPLYKMILSDKVDVSWLPEKFESDEEMIGAINGLINDLQPVLYSDNDKSLKYLLQHIGEYDLSRIYISNDLGLTDISQQMFGQYDVFTKGIKDEKRQHATPTKKERDNAELYEERINKLFKLEKSFSIAYLNSISGKTQTIEAYFASLGAYDRNGEQRNIFTQIEKARVAAADILAGKHTNLNQSKSDIKFIKDLLDAFKALQHFVKPLLGSGDEADKDNAFYAKLREVWEALTFITPLYNKVRNRLTCKPYSEEKFKLNFENNGNLLGGWVDSQTKSDNGTQYGGYIFRKKNSIGEYDFYLGISADTKLFRKDDSVINDGTLYERLDYYQVKSHTIFGASYHGNYDVDANSLFEAFHDEIIKQKLDTSFLRKDKETIIGYLKRIKKTDSQTYNILLKSEIIENKYSEMKQHILATLASLSRVPAAVEISKRKELSIEELFDEISKMPSKSFGFFPVKIEDVTHANGREVKPLFLFKISNKDLAYAEKHSKGLRKSRGTDNLHTMYFKVLLSMIQGTYDIGTGEVFYRKHTHELAENTARHKANQPIKNKNKANRTQESVFPYEIIKDRRYTCDKFQFHLSIITNYNSPKTADVNKLVHDAIRNGEIEHIIGIDRGERHLLYLSLIDLKGNIIKQFMLNEIINEYNGHTHSTNYKDLLVSREGDRNEARRNWQKIENIKEIKEGYLSQVVHIIAKMMVEYKAIVVLEDLNGGFMRGRQKIERQVYEKFEKMLIDKLNFYVDKQKDTDDIGGVLHPLQLTNKFESFRKLGKQSGWLFYIPAWNTSKIDPVTGFVNMHDTRYENADKARCFFLKFDAIRYNVEKNWFEFTFDYNNFHKKAEGTQTKWTLCTYGTRIKTFRNPKKNNQWDSEKVILTDEFKEVFADAGIDITGNLKEAICSLTEKKYLEPLMHLMKLLLQMRNSETRTEVDYILSPVADADGNFYDSRKNIATLPKDADANGAYNIARKGLWAIRKIQTTPIGEKLNLAISNKEWLQFAQQKPYLDE

SEQ ID NO: 1064 - protein, 1300 aa, unidentified
  REGION 1..1300: note = Cas Enzyme sequence
MSLSNFTNQYQLNKTLRFALIPQGETLAQLQNKGLLEEDRERAVSYQKMKQTIDAFHKHFIDLAMQNVKLDGLAEYKDLYGAPADQKKTDQYKKNLELLQAKLRKQIAKGFRAEEVSDIFGHLDSEKLFSELLENWRLEPENKDIYFDESFKTFTTYFRGFNENRKNMYTDKAQTTAIAFRLIHENLPKFLDNIRIFDILRNKKGMAGKVLSLYSELKDLLNLSSIDEAFSLDFFNKVLTQKGIDAYNLIIGGCVHQEGTRKIQGLNEYINEFNQRQKEKTNRIPKLKLLYKQILSDRESNSFNVQVFESGQEVLGAVNNYYHSQLISFSSGEKEDTINVMEEIKELLKDISSYDLKKIYIRNAGQLANISQQLFGSYAVFGDALSLYYDKVLCPAYQEDLQNAKSDAKRTKLEKEKERFTKQEYVSLGMLQKALDHYIKSLDVTHQTISGDTLTCIADYFYKHFKVPAQKGGDKKEFDLVANIYAKYSCIKGKLENYPVNIKLYQDKKTIDDLKLFLDSLMELLHFVKPLMLSTDNTYDRDYDFYGLLEPLYEQLALIVPLYNKVRNYATQKPYSTEKYKLNFENAQLLDGWPIDREIATSSVIFKEEGKYFLGILDKKFKKDFKNLPAPNNNEDIICKMNYLQSGDPGKVIQNLMVIDGETVKKNGRQEKSGKFIGQNLVLEELKNTYLPENINKIRKSRSYSKSSPEFKKDDLITFIDFYKQRAKEYLHRYEFKFKSSSDYKDFGEFTDDINGQAYQINFVDISKKYIYQLVQEGKLYLFQIYNKDFSVYSKGSPNLHTLYWKALFDSNNLANIVYKLNGGAEMFYRKASIEKANYVIHPAKQAIDNKNPLAIKKQSIFDYDLLKDKRYTVNKFLFHVPITLNFKAIGNENINQNVLRYLQNNPDVKIIGIDRGERHLIYLTLIDQEGNLLKQESLNNIVSDKYSIETPYHDLLNVKEKERDTARKSWGTIENIKELKEGFLSQVVHKIAKMMVEHNAIVVMEDLNFGFKRGRFKVEKQVYQKLEKMLIDKLNYLVFKDKEPNMPGGLYQALQLTNKFISFREMGKQSGFLFYVPAWNTSKIDPTTGFVNLFDTRYENLAKAQEFFQTFKSIRYNSNEGYFEFSFDYNDFTTRAKDTKTEWTVCSYGKRIMTFRNPEANNQWDNKEVDLTVEIEELLGRYEIIYGDGLDIRKRLLVDLDKKFYEKLLQVFKLTLQMRNSKTGTDIDYLISPVMGEDGLFYDSRKAISGQPKDADANGAYHIAKKGLWILNRINKTEDFKKLKLAVSNKEWLQFVQKK

SEQ ID NO: 1065 - protein, 1300 aa, unidentified
  REGION 1..1300: note = Cas Enzyme sequence
MEQFTNRYSLQKTLRFELKPHELTKILLEHSDFIAQDEHRSECYKLVKKIIDRYHKAFIEDVLSKPLVIKGKEYPILQYSGNNKNDSLEEFYALYIKKLKTETEKSLIKTIQESLRKQIVKAFTSDSRFKRLDKKELLSQDIYAVAGPEEHQYIKEFDGFATYFAGFHENRMNMYSADAKSTAIGYRLINENLPKFIDNMGTFQKLLKSPVSENFETIYKEMEHILPYGNIEEFFMLHNYPSFLTQKQITIYNAIIGGRVLEDGTQIKGINQYVNLYNKQPLSRESKLPKLKTLYKQILSDKESVSWLAEEFTSDEEMLKSIRDYYTSFKNNASQQMIDILTNIKSYDIDHIFIPNDISLTTISKKVFKDWEAINKSIIKRIKEDNPQKGREKDENYEERMSKAFKSYDSFSLGLINSCTATDDVCIYFSKIAKTDEGTSLSKNLFDNIEVAYNNVKKILNDDIPASQNLAQDKATVQKIKTFLDTIKELQKFIKPLLGSGKEADKDERFYGDICEVWEVLDQITPLYNKVRNRMTRKPYSKEKIKINFNIKGNFLGGWVDSKTEKSDNGTQYGGYLFRKRNEIGEYDYYLGVSTEKKLFRQKKNAIGKFERLDYYQPKSNTIYGNSYKGVNTYEEDKRRLLEAITFFVEKNCEDSLKTKILKNGTPSSMINSLKSESLSLYNQLMLDDSFSVINKEVTNNLHKTIIGLDRIPRALDYKDYHFTVFTEPQQIISEICNEKVFRYFPINDEEMEETLRNEKKPFLLFKITNKDLSYAEKKSNGLRNSRGKENLHTMYFKRLMEGDQKILDIGTAEMFFRRASLRYERPTHPANAPIQKKNPGRTGTSMFNYDIIKDKRFTVDKFGLHLSIILNYQSPKIDGLKSNAQNVLFNNDVRRYIKTHSDIHFIGIDRGERHLLYVSVIDSKGRIKEQFSLNQIINEYKGNSYNTDYHKLLEERDEKRTKERQSWDSIESIKELKQGYLSQVIHKIASLVVKYNAVVVLEDLNIGFKRGRQKVESSIYQQFEKALIDKFNYLVDKNVAPEQPGGLMKGYQLTNKFSSFRDMGKQNGFLFYIPAWNTSKIDPVTGFIDMLHPKYESVEKAREFFSKFNKISYNQEKGWFEFLFDYNDFTTKAEGTRTVWTLCTFGKRIETFRNKDKNSMWDNKEIDLTSALISLCEKYDVPLSCDMKNDIIVQIEKDFYVELTRILRLTLQMRNSITGTDVDYLISPVADENGNFYDSRNADSTLPENADANGAYNIARKGLWAAMQIRSCTDPDLKVNLAISNKEWLTFAQTKPYTK

SEQ ID NO: 1066 - protein, 1301 aa, unidentified
  REGION 1..1301: note = Cas Enzyme sequence
MRSIDEFCGQRNGYSRSITLRNKLIPVGKTQENLKRLNLLANDKNRADSYDEVKELIDDFHRCFIQDVLNDKHLNWVPLADSIIEYQRARDDKSKKAMQAEQMKMRKAVQKLFTDDPRFAKLFKKDLFDELLPQAIKNDTSGIIKSKQDALLVFNKFSTYFTGFHENRKNMYSDEEKSTAIAYRLVNDNFPKFLANVSLYVFIKKQYPEIISNTKNALADYLSGVSLDKVFSVDYFNTVMTQKGIDFYNTIIGGIAAQAGTEKIKGFNEQINLFRQQLPDDEKKNLRGKMTVLFKQILSDHETASFIPEKFQNDQAVYEAVQQFYKNQVRNSISQIKTLFTEMKKIDSDSIEFTQIFVPQKELTAFSLDLTGNWNEISNAIYNAAVKKYGDPNAKESIAKKIKKETGKEMFSLAELQSIYDDYLQDHKDEQNSSYEQKKINFVKKYFGLQIKRTAKDNDEIKEDVSVINQINDLYKLLDFDTSHSLREEKESAIPLKNFLDAVQDLFHYLKHVDYHGEAEKSSLFYSDFDEIIENLFEVVPLYNKVRNYVTQKVGEEEKYKLNFDCPTLADGWDVNKEQANDSVLFMKDNLYYLGIINPRDKIKFDGPFDSDGKPCYKKMIYKFLPGPNKMLPKVFFSTKGCAQFNPPQSILDGYEAGLYKKGDTFDKKYCHQLIDWFKDAIKRHEDWSKFNFKFSETNNYDDISEFYREISNQGYKINFVNIPEEFIDKAVEDGKLFLFQIYNKDFAEKATGRKNMHTLYWESLFSEENLKDVVFQLNGQAELFYRPASVKKLQKHEVGSILLNRTTSEGKSIPDDVYRELFLYKNNRLKTKLSSAATILLESGTLVEKNAKMELIKDKHFTEDVYLFHCPITMNFKAPELTGFKFNERVRTYLKKDPSVKIIGLDRGERNLVYLSLINQNGEIELQKTLNLVDQNRGDKTVSVNYQDKLVTREGERNSARRNWQTIGNIKELKEGYLSAVIHEIAEMMVKENAIVVMEDLNFGFKRGRFPVERQVYQKFEEMLIDKLNYLVFKERASTEKGGVLNAYQLTDKVSTLGDVGKQCGWLFYIPAAYTSKIDPKTGFANLFMLKDLTNVEKKRNFFSKFEAIRYDKETDSFVFGFTYDSFGATPDYKKKWEVYTRGDRVVYSPKERKTIIVNPTANLKAAFDAQNIVWNTERNMCDEINSVSADRANIPFFDALYRAFSVTLQMRNSVPNTQEDYLLSPVMAADGTFFDSREEQCKGTKATLPIDADANGAYHIALKGLYLLRNDFALNEKGYIQGIKNVDWFEFAQQKKYLK

SEQ ID NO: 1067 - protein, 1301 aa, unidentified
  REGION 1..1301: note = Cas Enzyme sequence
MDSYEQFTKLYPIQKTIRFELKPQGRTKEHFDNSNFLEKDRERDDNYKILKEVIDDYHREFIDECLSNIQLNWDDLKKFSEEYRRSKEKKNNRDSESEQKRMSTTSETRAINKKNLEAEQKRMRGEIVSAFKKDDRFKHLFSEKLFSILLKNQIYEKGTLEEIEAFDCFNKFSGYFKSFHENRKNMYSDEDKETAISYRIINENFPKLLDNFEKYQYVCREYPEQIREAESTLAEAGCYIKMDEIFSIDNFNNVMMQGGKESGISRYNLAIGGIVQGTGEKPKGLNEFLNLAYQNEPNGRKKIRMEPLYKQILSKEESFSYRLEAFTDDSQLLSAIRSFFDIVEKDKNGNIFDRAVNLMSSFSNYDTSKIYIRKAYLNQVSKEIFGYRGKSDSKPAKTADESLNKSGGWEKLGQMLRDYKADSIGDRNLEKTCKKVDKWLDSDEFTLSDILGAISLAGSNETFEAYVSEICVARRNIDKEKEKEKNINVEKISGDTESIQIIKALLDSVQEFFHLLSPFQLHPNTPHDWTFYAEFNDIYDKLSAITPLYNQARNHLTKKNLDTSKIKLNFNNPTLANGWDVNKEYENTAVILIRDGKYYLGIMNPKNKRKIKFDEGSGAGPFYQKMVYKLLPGPYRMLPKVFFAKKNIDYYNPSQEIREGYKAGKHKKGKEFDKGFCHKLIDFFKESIQKNENWKVFDFKFSPTESYDDISEFYQEVEKQGYRMYFVNIPSDTIDRYVEGGDMFLFQIYNKDFAKGAKGNKDMHTLYWNAVFSEENLQKGVMKLSGEAELFYRKKSDIKDPPHREGEILVNRTYIDRTHVSGVMGEQNTVKESRIPVPDEIHKNLFDYYNHGRELTKEEKEYCDKVGSFKAYYGIVKDRRYLENKMYFHVPLTLNFKAIGEKRINKMAIEKFLTDENACIIGIDRGERNLLYYSIIDRNGKIIDQKSLNVIDGFDYHEKLSQRQTEREVARQSWNSIGKIKDLKEGYLAKAVHEISKMAIKYNAIVVLEDLHFGFKKGRLKVEKQIYQKFEEMLINKLNYLVFKDVSDSSDAGGVLNAYQLTAPLESFSKLGKQSGILFYVPAAFTSVIDPTTGFVDLFNSSSITSTQKKKEFLQRFESIVYSARDGGIFAFTFDYRNFSKIATDHRNMWTVYTHGERIRYVRDEKCYKTTDPTKRIKEALSGIEYDDGSDIRDKITQSGDNNLINTVYHSFMDTIKMRNKDGRIDYIISPVKNRNGEFFRSDYKHRDFPVDADANGAYHIALKGELLMRMIGKTYDSNSDKMPKLEHKDWFEFMQTRGDQ

SEQ ID NO: 1068 - protein, 1301 aa, unidentified
  REGION 1..1301: note = Cas Enzyme sequence
MENFKSFTNLYSLSKTLRFELRPVGATLQNIENSGLLTQDEHRAESYKKVKQIIDSYHTAFIDNALSHAQLKVNSTNNNDSLEEVYQYLTHRDHTEDENVAFKTTLDNLRKSVVKILKSNELFSRIFKKELIQQDLLRSDLLGYEINDEKKTLIQEFSSFTTYFTGFNENRANMYSEDAKSTAIGFRLIHENLPKFIDNMTVFQKVVQSPVSEYFVNIETDMESLLQGTSLTEIFSLKYYNNLLVQRYIDLYNAVVGGMTTETDNHIKGLNQYINEYNQKQTDKKCRLPKLKPLFKQILSDRVEISWRLDNFENDDEVLKAILNYYNELEEEVLNKEEGNLPSLLANITEYDLGGIYVSAKSITDISQHVFKNWNTIEDALQSACCRQNPPKKNEKPEKYADRIKKLLNQVESYSLGEIIEALAAYQKDPKSDILNYFQQMGSKDDKLSFVDNIHSDFVVVEELLKTEYPKNRNLAMDKSNISKIKSLLDNIKALQFFVKPLLGTGKESGKDERFYGELVGYWDTLDAITHLYNKVRNYATRKPYSTDKIQLYFENKGQFLGGWVDSKTEKSDNGTQAGGYLFRKKNSIGEYDYYLGISSDAKLFRMEEGVSGSFERLDYYQPKSQSVYGSSYAGENTYEEDKKRLLSVMNSFVETISDPSVRKSLKSKASKKEVTPSGLLSDIQNSGEQYYQELLGSNDFIKINRVVTKNLHKTILSLYRIPESKQYANKTFSLFTEPQEVIERLCSNRVFSYFPVSDQEMDEVQMRGTKKMYLFQIVNKDLTFAETFSKGLRKSRGTDNLHTMLFKQLMSGEQSVFDIGTGMVFWRKETKDLKKTPTHFKGEVLKNKNPLNPKKTSTMDYDLVKNRRYTMDKFLFHLSMNLNYNSLKPKQVPINDKVQDYIRKNPDLHFIGIDRGERHLLYITVIDSKGNIKEQFSMNEICNVHNGVEYRTNYHDLLEQRGDVRTEARREWLAIEGIKELKEGYLSQVVHRITDLMVKYNAIVVLEDLNIGFKRGRQKVESSAYQQFEHKLIDKLNYLASKTAPTTEPGGLLCAYQLAIPYSQEMGHQNGFVFYIPAWNTSKMDPVTGFTNLFNLHIDTMDQARKFFEKFDAIRYNKDKNWVEFDFDYSNFTEKAEGSRSQWTLCSQGSRIRTFRNPSKNSEWDDEELDLTSQFLKLFQDKGFDLHSDIRTQILTQTDRDFFMSLLQCMKLTLQMRNSKSGTDIDYLISPVADTEGNFFDSRYTDASLPANADANGAYNIARKGLWLARQIQASLPGEKIKLSISNKEWLQFAQEKPYK

SEQ ID NO: 1069 - protein, 1301 aa, unidentified
  REGION 1..1301: note = Cas Enzyme sequence
MENINLSDFTNLYPLSKTLRFKLVPVGKTEENLKTSRILDGDFKRAEAYAQVKNLIDSYHKAFIEDVLSNAELEWGKLYEQFDLYQKENDKDTKSRQRKELEAQQKRMRQAISGLFKKDKRYEKLFKKELLTELLPSIIKDDESGTITDKKAALDAFNRFATYFKGFHENRENLYKDEQKATAISNRVVNENFPRFYANVKVYEYLNSAFPQIIEDTENSLSDFLKGVKLSEIFNKDSFNAVLSQSGIDFYNTIISGISEEGQKVQGLNEKINLASQKLPAEDKAKLRKKMVLLYKQILSDKNTASFIPAGFEKSEEVYEAVKQFKEQEVDKYIDKIEKLFAAYNDYDLNGIVVPAKERTAFSSLIFGKWSVLNDGLLLLEQGNAKKEFSEKQTETMIKRISERDYSLAELQKAYELWTKENGVIADETVKKYFSLSDLRNVVSGENHTVTIIDKIKEAYTEIDFENQVNLQAEPEAATSIKSFLDEVQNLYHYLKIVDYHGEEQRDSIFYSEFDEIISGLSDIVPLYNKVRNFVTKKPGEVKKVKLNFECSSFLDVWATDFGTKDAHVFIYNEKYYLGIINKKLSKEDVEFIQKNGNCNHVIYNSQKADYKNIPRLFIRSKGESFAPSVSKYNLPIDSIIDIYDNGLFKTGNGHGDSKELKDSLIKMIDYFKLGFSKHDSYKIFDFCWKESSDYNSIDEFYSDVMASCYKINFEKVNFDNLLSLVDSGKLYLFQIYNKDFAEKSTGRKNLHTLYWENLFSEENLRNVCLKLNGEAELFFRPRSESVKEIKHEKGSILVNKTTSDGKSIPEETYQEIYKFKNGIITSISATAQKWLESGKVVCKGATHTIVKDKHFTKDTYLFHCPITMNFKAGDITGNKFNEKVLDYLRENQDVKIIGLDRGERHLIYLSLINQKGEIELQKTLNLVEHVRSDKTVTVNYQEKLVQKEGDRDKARKNWQTIGNIKELKEGYLSNVIHEIAKLMIENNAIVVMEDLNFGFKRGRFPVERQVYQKFENMLIEKLNYLVFKDKSVTEPGGVLNAYQLADKSSKVSDVGKQCGWIFYIPASYTSKIDPVTGFVNMFDTRYVSVEKSREFFGKFENIKYNADKDYFEFVFDYGKFTKKYMGSRMRWAVCSDGKRIETFRNPKKNSQWDNREIDLTEELKKLFDKYDIDINGDLKSLISEMDDRAFFYNDNKKQNEPKGLLQLFRLVLQMRNSVPNTDTDYLISPVADKYGIFYDSRNCDKSLPENADANGAYNIARKGLWAVMQIKQSGSDKPKLAISNEEWLKFAQEKPYEQKQ

SEQ ID NO: 1070 - protein, 1302 aa, unidentified
  REGION 1..1302: note = Cas Enzyme sequence
MNVINKFCGQENGYSRSITLRNALIPIGKTEENIQKLKLLDKDIVRSKAYIEVKKLIDDFHRAFIEEVLSKIKLDWGPLFDQFELYQNERDKQKKNRIKNDLKKLQEGMRKDLVKKFKEDKRFDKLFKKELLSDFVPTVIKTDETGTISDKQAALDAFKGFATYFTGFHQNRQNMYSDEEQSTAISNRIVNENFPKFYANVKFFEYLQKDFPAIIKDTEESLAVFLKGKKLADIFSENGFNAVLSQSGIDFYNTVIGGISEEAGSKKIQGLNEKINLASQQLQAEEKHKLKKKMSVLYKQILSDRSTVSFIPVGFEASDEVYESVKQFKEQRLDKAISLVKKLTDKTDYDISQIYVPAKEVTEFSLKLFGNWSILYDGLFLLEKDGSKKNFTEKQVETLRKEIAKKDFSLEDLQNAYERWTKEYNSPVDKTTKNYFRIAELRLDENTKEKSFVEILKKLDESYSKIDFDKQKNLIKEKEAATPIKNFLDEVQNLYHYMKVVDYRGEEQKDSDFYSGLDEILQILSEIIPLYNKVRNFVTKKPNDVKKVKLNFDCPTLANGWDLNKESSNDAIILRKNGNYYLGIYNPKDKPKFETCTNGEECYEKMIYKLLPGPNKMLPKVFFSTKGKETFLPPEDILIGYEDGKHKKGGNFDKQFMYKLIDWFKAAINRHEDWKNFNFKFSPTESYEDLSGFYKEVELQGYKITFQNIAESYINSLVDSGKLFLFQIYNKDFSTGKDCGNGSTGKKNLHTLYWENLFSEENLRDVCLKLNGEAELFWRDANPNVKDVCHKKGSVLVNRTTSDGKSIPEDVYQEIYQFKNKLTDKISDKAKELLDSGKVVCKVAKFDITKDKHFTKSTYLFHCPITMNFRAPGISDKDFNVKVQSILKDNPDVKIIGLDRGERHLIYLSLINQKGEIELQKTLNLVEQVRNDKTVSVNYQEKLVQKEGDRDKARKNWQTIGNIKELKEGYLSNIVHEIAKLMVENNAIVVMEDLNFGFKRGRFAVERQVYQKFENMLIEKLNYLVFKDKKVTEPGGVLNAYQLANKSANVSDVGKQCGWIFYIPAAYTSKIDPKTGFANLFYTAGITNIEKKKDFFDKFDSIRYDRKTDSFVFSFDYSNFSDNADFKKKWEVYSCEDRLVFSKAEKTTVSVNPTENLKALFDKQEINWNTEDNFIDQIHAVQAERDNCAFYDGLYRSFMAILQMRNSKPNSSNQEDDYLISPVMADDGTFYDSRVEAAKGKDENGRWISKLPVDADANGAYHIALKGLYLLKNDFNLNDKGYIDNISNAEWFKFAQEKDYAE

SEQ ID NO: 1071 - protein, 1303 aa, unidentified
  REGION 1..1303: note = Cas Enzyme sequence
MKTQNEFKSNKSKESIWDRFTNQYKLQKTLRFELKPVGKTKEHIDKNRILENDEKRADDYKMVKKIIDRYHKQFIEQSLSDFSLTKEKKQLQFYADLYSIRDKNDAQKKEFNSLKDSLRKQIAEKFKKTDGWGDLFAKELIKEHLLTIAKDDAEKDLIDEFKTFTTYFTGFHENRKNMYTHEDHATAIAYRLVHENLPKFLDNLNIFEKYIRKNTELKKEITTIEKEILNDQKITEVFKLDFFNTTLTQTGIDLYNTVLGGLSLEGQKKLKGLNEYINLCNQKQSDKNKRIPRLKPLYKQILSDRESSSFRIDAFENDNELLETIENYYHSINAKQEYEGSKLIVLKDFKALMQDISHYDREKIFIKNDTSLTQISQAAFGDWSLIISSLAFYYETCVNPALTKITKKYETEKDKWLKRGNFSIEELESALYAFRDQTDKMKEFKLTENSGPVCDYFKKCEQTVIKNDAKKGKNIEVQTDYIQEIEDAYAQVKDLLNTPYSADKKLAQDKTSVAMIKALLDAIKDFLHFVKSLHPEKVEGAKDENFYGVYTTLYDLLNNVTPLYNKVRNYLTKKPYSVEKYKLNFEYGTLGDGWDVNKETANGLVLLRKGGLYYLGIIDKNDTGVFKNFLSPENGGDVYEKLIYKQIANPANDLPNLLIVEGKTVMKKGRKNKQGINEERENALNQYLPKEINEIRIKKSYLKNLENNQKNPEFDKNDLKTYIAYYQRLTKSYFHYFDFLFKDAGEYSNWVEFTNHINTQGYLIKFQNIGQEYINQLVEEGKLYLFQIYNKDFSSYSKGKPNLHTIYWKMLFDENNLKDVVYKLNGEVEVFYRKKSLNYDARILNEGHHAAKLKGKFKYPIISNKRFAYDKFQFHVPITLNFKATGNGNVNLNLLSFLKNNNKVNIIGIDRGERHLLYLTLIDQNRNIIKQMTLNEIVNSYVKNGITFEKPPTDYHKILDEKEAERDKARKDWGVIENIKELKEGYLSHVIHVIAKMLIEHNAIVVMEDLNFGFKRGRFKVEKQVYQKFEKMLIDKLNYLVFKEHDPQEPGGVLKAYQLAGKFVSFEKLGKQSGVIFYTPAALTSKIDPVTGFVDFLKTKYENLEKAKDFFGRFHDIRYNVDKDRFEFTFDYKDFIPGFENGRSVWTVCSSDTPRYRWNKSANQNKGAQAEVLVTNELKALFKENKIEHEDIQDLKGKIVKIDDANFFRNLIFLFSTLMTLRHNNGKKAEEERDYILSPVEPFFNSLNATEAQPKNADANGAYHIALKGLWALQQIGAVKPDELKKVKLAISNKNWLHFAQEK

SEQ ID NO: 1072 - protein, 1304 aa, unidentified
  REGION 1..1304: note = Cas Enzyme sequence
MNKAADNYTGGNYDEFIALSKVQKTLRNELKPTPFTAEHIKQRGIISEDEYRAQQSLELKKIADEYYRNYITHKLNDINNLDFYNLFDAIEEKYKKNDKDNRDKLNLMEASKRKEIEKMLSADDNFKSMFEAKLITQLLPVYVEQNYIGEDKEKALETIALFKGFTTYFTDYFNIRKNMFKENGGASSICYRIVNVNASIFYDNLKTFMCIKEKAETEIALIEEELTELLDSWRLEHIFSEDYYNELLAQKGIDYYNQICGDVNKHMNLYCQQNKLKANVFKMTKLQKQIMGISEKAFEIPPMYQNDEEVYAAFNGFISRLEEVKLTDRLGNVLQNSNIYDTAKIYINARCYTNVSSYVYGGWGVIESAIERYWYNTIAGKGQSKAKKIEKAKKDNKFMSVKELDSIVSDYEPDYFNASNMDDDNSGRAFSGYGVLGYFNKMSKLLANMSLHTITYDSGDSLIENKETALNIKKDLDDIMSIYHWLQTFIIDEVVEKDNAFYAELEDIYYELENIVTLYDRIRNYVTRKPYSTQKFKLNFASPTLASGWSRSKEFDNNAIILLRNNKYYIAIFNVNNKPDKQIIKGSEEQRLSTDYKKMVYNLLPGPNKMLPKVFIKSDTGKRDYNPSSYILEGYEKNRHIKSSGNFDINYCHDLIDYYKACINKHPEWKNYGFKFKETTQYNDIGQFYKDVEKQGYSISWAYISEADINRLDEEGKIYLFEIYNKDLSSHSTGKDNLHTMYLKNIFSEDNLKNICIELNGNAELFYRKSSMKRNITHKKDTVLVNKTYINEAGVRVSLTDEDYIKVYNYYNNDYVIDVEKDKKLVEILERIGHRKNPIDIIKDKRYTEDKYFLHLPITINYGVDDENINAKMIEYIAKHNNMNVIGIDRGERNLIYISVINNKGNIIEQKSFNLVNNYDYKNKLKNMEKTRDNARKNWQEIGKIKDVKNGYLSGVISKIARMVVDYNAIIVMEDLNRGFKRGRFKVERQVYQKFENMLISKLNYLVFKEKKADENGGILKGYQLTYLPKSALQIGKQCGCIFYVPAAYTSKIDPATGFINIFDFKKYSGSGINAKVKDKKEFLMSMNSIRYVNEGSAEYEKIGHRQLFAFSFDYNNFKTYNVSSPVNEWTAYTYGERIKKLYKDGRWLRSEVLNLTENLIKLMEQYNIEYKDGHDIREDISHMDETRNADFICSLFEELKYTVQLRNSKSEAEDENYDRLVSPILNSSNGFYDSSDYMENENNTTHTMPKDADANGAYCIALKGLYEINKIKQNWSDDKKFKENELYINVVEWLDYIQNRRFE

SEQ ID NO: 1073 - protein, 1304 aa, unidentified
  REGION 1..1304: note = Cas Enzyme sequence
MEFDDFKRLYPLSKTLRFEAKPIGATLKNIIKSGVLEEDEHRAQSYVKVKKLIDEYHKVFIDRVLNEGCLTIENKGNKDSLEEYYESYMSKSNDENANKAFKEIQRNLRSVIANKLTKDKGYANLFGKNLIESYKDKEDKNKNKIIDSDLIQFINTAEPSQLDSMSQDEAKKLVKEFSGFTTYFKGFHKNRKNMYTSEEKSTGIAYRLINENLPKFLDNMEAFKKAIAKPEIQANMGELYSNFADLNVESIQEMFQLDYYNMLLTQKQIDVYNAIIGGINEYINLYNQQHKNEKLPKLKALFKQILSDRNAISWLPEEFNSDQDVLDAIKDCYERLSENVLGDKVLKSLLCSLSDYNLNGIFVRNDLQLTDISQKMFGNWSVIQNAIMQNIKKKKHARKRKESEEDYEKRIPAIFKKADSFSIQYINDCLNKMDDNNIHAVDGYFATLGAVNTPTMQRENLFALIQNAYTDISDLLDTPYPENKNLAQDKTNIAKVKALLDAIKSLQHFVKPLLGMGDESDKDERFYGELASLWTELDTVTPLYNMIRNYMTRKPYSQKKIKLNFENYQLLEGWDANKEKDHAAIILRRNGMYYLAIMDKDSKNLLGKTMPSDGECYEKMVYKQFDISKQLPKCTTELKRVKKALVEDAKRSFLLSDSKDWNKPLNVTRKLWELNNYVWDKKKADWVLGKKENETRPKKFHKQYLELTSDKKGYNQAKNDWIKFTKEFLSSYKKVEDYDIHYKKRYNSVDELYKQLVGDFYTISFTYVSVSFIDKLVDEGKMYLFQIYNKDFSNFSKGTPNMHTLYWKALFDERNLADVVYKLNGKAEMFYRKKSINNTHPTHPANHPIQNKNKENKKKESVFEYDLVKDHRYTEEKFLFHVPITMNFKSVGSENINQQVKEYLQQANDTHIIGIDRGERHLLYLVVIDMQGNIKGQFSLNEIVNEYNGNTFRTNYHDLLDVRADKRLKASQSWQTIENKEGYLSQAIHKITQLMVKYHAVVVLEDLNKGFMRGRQKVEKQVYQKFEKMLIDKLNYLVDKHKDANETGGLLHALQLTSEFKNFKKSDPQSGFLFYIPAWNTSKIDPVTGFANLFDTRYTNADKALEFFSKFDEIRYNEEKDWFEFEFDYDKFTQKAHGTRTKWTLCTYGMRLRSFKNPAKQYNWDSEVVALTDEFKRILGEAGIDIHENLKDAIRNLEGKRRKYLEPLMQFMKLLLQLRNSRKNPEEDYILSPVADENGVFYDSRSCGDTLPENADANGAYNIARKGLMLIREIKKAKELDKVKFDISNKAWLNFAQQKPYKNE

SEQ ID NO: 1074 - protein, 1305 aa, unidentified
  REGION 1..1305: note = Cas Enzyme sequence
MKEFTNLYKLEKTLKFGLEPVLLEDQTLDDFWNTYLNGPEKDELHKLYMHDKERNENYPIMKVMLDHFHKKFITSALEKFEVGEKGVTWDALARAYHEDKQSKEYQKLQEEMRAKIQKTFTEHEWWSYLSSYSKLIGQLMPNLVKNDDDFVESIIEIHSDMELSQGKMLDAIKTFDGFSVYFGKYQENRDNMYSEKAQNTSIPNRIVNDNFPKFLDNITVYNRLKETCPDELKEIENNLEETLKGLSFDDIFVPSYYNKCLTQEGIEMFNWLLGGNPNEGVFGINSVGNHYLQHHSESDLKLRNLQMSPLYKQILSDRVRLAFLPDQFESDDDLMKSVTDFLNDSENLFTRVHEIMNILKDDSTDLTRIYVQGSNLTTLSNILYGDRCILGERLRKTQVTSNTKKAQRELDKEIEKWLEDKCFSLAEIQEVENILMEQSAHPLSLMELLTKLTVWKYNPANYEWTKVSLFKQCNDAYVTEFNVLVEKCKEGLSIRNEEMKVVLKSVLDTYMELFHIVELLRLGNKSGYLEKDDFYQPYEQLFDSDDTVSISHIVPLYMKVQSYLTRKFADTGKMLLKFDSPTRANGWDDCSIIIKDGKYYLLMYLEKLTHEEIKALYSGGSADIVEYHQQKTDNKNCSRLFINSKGEKKSPAVSKYQLPIEMVESLYRERKNLKSESEKKAFDLLHDYDKKLIDYYKIGISQHDDFEPFQKMFEGMWKPTSAYSSIKEFCEHTQKMCYMLSFKSIDFDYLYELQKKKRLLLFCITNKDFKEGAKGTPNMHTLYWEELFSKENLTDVVYKLSSQGVEFFYRKAVSKETAFVHKKGSVLVNKTFSDGTPIEGDLYKKLLRHFNGLDVDLTDKEVQILPKVRTKKAKFDIVKDKRYHEHKFFLHVPITINFKATSMSQKLFNERTLDILRKNKEELNIIGIDRGERNLIYVTVINQKGENLITPRHFNLIETETYGGIQRKYDYLTKLKQTEKNRKEARRNWTTIERIKDLKSGYMSQVVHEIAKMIVQYKAIVVLEDLNFGFKRGRFNVERQVYQKFEEMLIKKLNYLVFKKDSPSQEYGKVRSGLQLTAPFTSFKELGKQTGWLFYVPAGYTSKIDPATGFVNLFNMNRPADSLRGFFAAFKDISYKNGLFYFTFDYSNEVFNKVRTDYTNCWTLSSHGSRIVGKERNMTNLSNEFKQFFEKSKISLENVSVQSISRLDDCQLQKLWDLFKLLLKMRNSNDEADFIISPVAGEQPFVTGPNNPMKISDADANGAYNIALKGLYWVMNDFPMDGGNLKYINDTEWFKFVQTKPYLND

SEQ ID NO: 1075 - protein, 1305 aa, unidentified
  REGION 1..1305: note = Cas Enzyme sequence
MDKNFDDFKRLYPLSKTLRFEAKPIGDTLKNIIKSGLLEEDEHRAQSYVKVKKLIDEYHKVFIDRVLNEGCFTIENKGNKDSLEEYYESYMSKSNDENVSKTFKEIQENLRSVIANKLTKDKGYANLFGNKLIESYKDKDGTKKIIDSDLIQFINTAEPSKLDSMSQDEAKEFVKEFWGFTTYFEGFHKNRKNMYTSEEKSTGIAYRLVNENLPKFIDNMEAFKKAIAKPEIQANMGELYSNFAEYLNVESIQEMFQLDYYDMLLTQKQIDVYNAIIGGKTDEDHDFKIKGINEYINLYNQQHKNEKLPKLKALFKQILSDRNAISWLPEEFNSDQEVLDAIKDCYERLSENVLDKVLKSLLCSLSDYNLNGIFVRNDLQLTDISQKMFGNWSVIQNAIMQNIKKKVPARKRKESEEDYEKRISDIFKKADSFSIQYINDCLNEMDDNNLHAVDGYFATLGAVNTPTMQRENLFALIQNAYTDISDLLDTPYPENKNLAQDKTNVAKVKALLDAIKSLQHFVKPLLGMGDESDKDERFYGELASLWTELDTVTPLYNMIRNYMTRKPYSEKKIKLNFENPQLLGGWDANKEKDYATIILRRNGMYYLAIMDKDSKKLLGKTMPSDGECYEKMVYKFFKDVTTMIPKCSTQLKEVQAYFKVNTDDFVLNSKAFSKPLTITKEVFDLNNVLYGKFKKFQKGYLSATGDNAGYIRAVNVWIKFCMDFLDSYESTCMYDFSSLKSESYLSLDAFYKDANLLLYKLSFTDVSASFIDQLVEEGKMYLFQIYNKDFSEYSKGTPNMHTLYWKALFDERNLADVVYKLNGQAEMFYRKKSIENTHPTHPANHPILNKNKDNRKKESLFDYDLIKDRRYTVDKFMFHVPITMNFKSSGSENINQDVKAYLRHADDMHIIGIDRGERHLLYLVVIDLQGNIKEQYSLNEIVNEYNGNTYHTNYHDLLDVREEERLKARQSWQTIENIKELKEGYLSQVIHKITQLMVKYHAIVVLEDLNKGFMRGRQKVEKQVYQKFEKMLIDKLNYLVDKKADASVSGGLLNAYQLTSKFDSFQKMGKQSGFLFYIPAWNTSKIDPVTGFVNLLDTHSLNSKENIKAFFSKFDAIRYNKDKDWFEFNLDYDKFGKKAEGTRTKWTLCTRGMRIDTFRNKEKNSQWDNQEVDLTAEMKSLLEHYYIDIHGNLKDAISAQTDKAFFTGLLHILKLTLQMRNSITGTETDYLVSPVADENGIFYDSRSCGDELPENADANGAYNIARKGLMMIEQIKEAKDLDNLKFDISNKSWLNFAQQKPYKNG

SEQ ID NO: 1076 - protein, 1306 aa, unidentified
  REGION 1..1306: note = Cas Enzyme sequence
MAKNFEDFKRLYPLSKTLRFEAKPIGATLDNIVKSGLLEEDEHRAASYVKVKKLIDEYHKVFIDRVLDNGCLPLDDKGDNNSLAEYYESYVSKAQDEDAIKKFKEIQQNLLSIIAKKLTDDKAYANLFGNKLIESYKDKADKTKLIDSDLIQFINTAESTQLVSMSQDEAKELVKEFWGFTTYFEGFFKNRKNMYTPEEKSTGIAYRLINENLPKFIDNMEAFKKAIARPEIQANMEELYSNFSEYLNVESIQEMFLLDYYNMLLTQKQIDVYNAIIGGKTDDEHDVKIKGINEYINLYNQQHKDDKLPKLKALFKQILSDRNAISWLPEEFNSDQEVLNAIKDCYERLAENVLGDKVLKSLLGSLADYSLDGIFIRNDLQLTDISQKMFGNWGVIQNAIMQNIKHVAPARKHKESEEDYEKRIAGIFKKADSFSISYINDCLNEADPNNAYFVENYFATFGAVNTPTMQRENLFALVQNAYTEVAALLHSDYPTVKHLAQDKANVSKIKALLDAIKSLQHFVKPLLGKGDESDKDERFYGELASLWAELDTVTPLYNMIRNYMTRKPYSQKKIKLNFENPQLLGGWDANKEKDYATIILRRNGLYYLAIMDKDSRKLLGKAMPSDGECYEKMVYKFFKDVTTMIPKCSTQLKDVQAYFKVNTDDYVLNSKAFNRPLTITKEVFDLNNVLYGKYKKFQKGYLTATGDNVGYTHAVNVWIKFCMDFLDSYDSTCIYDFSSLKPESYLSLDSFYQDVNLLLYKLSFTDVSASFIDQLVEEGKMYLFQIYNKDFSEYSKGTPNMHTLYWKALFDERNLADVVYKLNGQAEMFYRKKSIENTHPTHPANHPILNKNKDNKKKESLFEYDLIKDRRYTVDKFMFHVPITMNFKSSGSENINQDVKAYLRHADDMHIIGIDRGERHLLYLVVIDLQGNIKEQFSLNEIVNDYNGNTYHTNYHDLLDVREDERLKARQSWQTIENIKELKEGYLSQVIHKITQLMVRYHAIVVLEDLSKGFMRSRQKVEKQVYQKFEKMLIDKLNYLVDKKTDVSTPGGLLNAYQLTCKSDSSQKLGKQSGFLFYIPAWNTSKIDPVTGFVNLLDTHSLNSKEKIKAFFSKFDAIRYNKDKKWFEFNLDYDKFGKKAEDTRTKWTLCTRGMRIDTFRNKEKNSQWDNQEVDLTTEMKSLLEHYYIDIHGNLKDAISTQTDKAFFTGLLHILKLTLQMRNSITGTETDYLVSPVADENGIFYDSRSCGDQLPENADANGAYNIARKGLMLVEQIKDAEDLDNVKFDISNKAWLNFAQQKPYKNG

SEQ ID NO: 1077 - protein, 1306 aa, unidentified
  REGION 1..1306: note = Cas Enzyme sequence
MAKNFEDFKRLYPLSKTLRFEAKPIGATLDNIVKSGLLDEDEHRAASYVKVKKLIDEYHKVFIDRVLADGCLPLKNEGHNNSLTEYYESYVSRAQDEDAKKKFKEIQQNLRSVIAKKLTEDKAYANLFGNKLIESYKDKEDKKKIIDSDLIQFINTAESTQLDSMSQDEAKELVKEFWGFVTYFYGFFDNRKNMYTAEEKSTGIAYRLVNENLPKFIDNIEAFNRAITRPEIQENVGVLYSDFSEYLNVESIQEMFQLDYYNMLLTQKQIDVYNAIIGGKTDDEHDVKIKGINEYINLYNQKHKDDKLPKLKALFKQILSDRNAISWLPEEFNSDQEVLNAIKDCYERLSENVLGDKVLKSMLGSLADYSLDGIFIRNDLQLTDISQKMFGNWSVIQNAIMQNIKHVAPARKHKESEEDYEKRIAGIFKKADSFSISYINDCLNEADPNNAYFVENYFATFGAVNTPTMQRENLFALVQNAYTEVAALLHSDYPTVKHLAQDKANVSKIKALLDAIKSLQHFVKPLLGKGDESDKDERFYGELASLWAELDTVTPLYNMIRNYMTRKPYSQKKIKLNFENPQLLGGWDANKEKDYATIILRRNGLYYLAIMDKDSRKLLGKAMPSDGECYEKMVYKFFKDVTTMIPKCSTQLKDVQAYFKVNTDDYVLNSKAFNKPLTITKEVFDLNNVLYGKYKKFQKGYLTATGDNVGYTHAVNVWIKFCMDFLNSYDSTCIYDFSSLKPESYLSLDAFYQDANLLLYKLSFARASVSYINQLVEEGKMYLFQIYNKDFSEYSKGTPNMHTLYWKALFDERNLADVVYKLNGQAEMFYRKKSIENTHPTHPANHPILNKNKDNKKKESLFDYDLIKDRRYTVDKFMFHVPITMNFKSVGSENINQDVKAYLRHADDMHIIGIDRGERHLLYLVVIDLQGNIKEQYSLNEIVNEYNGNTYHTNYHDLLDVREEERLKARQSWQTIENIKELKEGYLSQVIHKITQLMVGYHAIVVLEDLSKGFMRSRQKVEKQVYQKFEKMLIDKLNYLVDKKTDVSTPGGLLNAYQLTCKSDSSQKLGKQSGFLFYIPAWNTSKIDPVTGFVNLLDTHSLNSKEKIKAFFSKFDAIRYNKDKKWFEFNLDYDKFGKKAEDTRTKWTLCTRGMRIDTFRNKEKNSQWDNQEVDLTTEMKSLLEHYYIDIHGNLKDAISTQTDKAFFTGLLHILKLTLQMRNSITGTETDYLVSPVADENGIFYDSRSCGDQLPENADANGAYNIARKGLMLIEQIKNAEDLNNVKFDISNKAWLNFAQQKPYKNG

SEQ ID NO: 1078 - protein, 1306 aa, unidentified
  REGION 1..1306: note = Cas Enzyme sequence
MAKNFEDFKRLYPLSKTLRFEAKPIGATLDNIVKSGLLEEDEHRAASYVKVKKLIDEYHKVFIDRVLDNGCLPLDDKGDNNSLAEYYESYVSKAQDEDAIKKFKEIQQNLLSIIAKKLTDDKAYANLFGNKLIESYKDKADKTKLIDSDLIQFINTAESTQLVSMSQNEAKELVKEFWGFTTYFEGFFKNRKNMYTPEEKSTGIAYRLINENLPKFIDNMEAFKKAIARPEIQANMEELYSNFSEYLNVESIQEMFLFDYYNMLLTQKQIDVYNAIIGGKTDDEHDVKIKGINEYINLYNQQHKDDKLPKLKALFKQILSDRNAISWLPEEFNSDQEVLNAIKDCYERLAENVLGDKVLKSLLGSLADYSLDGIFIRNDLQLTDISQKMFGNWGVIQNAIMQNIKHVAPARKHKESEEDYEKRIAGIFKKADSFSISYINDCLNEADPNNAYFVENYFATFGAVNTPTMQRENLFALVQNAYTEVAALLHSDYPTVKHLAQDKANVSKIKALLDAIKSLQHFVKPLLGKGDESDKDERFYGELASLWAELDTVTPLYNMIRNYMTRKPYSQKKIKLNFENPQLLGGWDANKEKDYATIILRRNGLYYLAIMDKDSRKLLGKAMPSDGECYEKMVYKFFKDVTTMIPKCSTQLKDVQAYFKVNTDDYVLNSKAFNRPLTITKEVFDLNNVLYGKYKKFQKGYLTATGDNVGYTHAVNVWIKFCMDFLDSYDSTCIYDFSSLKPESYLSLDSFYQDVNLLLYKLSFTDVSASFIDQLVEEGKMYLFQIYNKDFSEYSKGTPNMHTLYWKALFDERNLADVVYKLNGQAEMFYRKKSIENTHPTHPATHPILNKNKDNKKKESLFEYDLIKDRRYTVDKFMFHVPITMNFKSSGSENINQDVKAYLRHADDMHIIGIDRGERHLLYLVVIDLQGNIKEQFSLNEIVNDYNGNTYHTNYHDLLDVREDERLKARQSWQTIENIKELKEGYLSQVIHKITQLMVRYHAIVVLEDLSKGFMRSRQKVEKQVYQKFEKMLIDKLNYLVDKKTDVSTPGGLLNAYQLTCKSDSSQKLGKQSGFLFYIPAWNTSKIDPVTGFVNLLDTHSLNSKEKIKAFFSKFDAIRYNKDKKWFEFNLDYDKFGKKAEDTRTKWTLCTRGMRIDTFRNKEKNSQWDNQEVDLTTEMKSLLEHYYIDIHGNLKDAISTQTDKAFFTGLLHILKLTLQMRNSITGTETDYLVSPVADENGIFYDSRSCGDQLPENADANGAYNIARKGLMLVEQIKDAEDLDNVKFDISNKAWLNFAQQKPYKNG

SEQ ID NO: 1079 - protein, 1306 aa, unidentified
  REGION 1..1306: note = Cas Enzyme sequence
MAKNFEDFKRLYPLSKTLRFEAKPIGATLDNIVKSGLLEEDEHRAASYVKVKKLIDEYHKVFIDRVLDNGCLPLDDKGDNNSLAEYYESYVSKAQDEDAIKKFKEIQQNLRSIIAKKLTDDKAYANLFGNKLIELYKDKADKTKLIDSDLIQFINTAESTQLDSMSQDEAKELVKEFWGFVTYFYGFFDNRKNMYTAEDKSTGIAYRLINENLPKFIDNMEAFNTAITRPEIQANMDELYSNFSEYLNVESIQEMFQLDYYNMLLTQKQIDVYNAIIGGKTDDEHDVKIKGINEYINLYNQKHKDDKLPKLKALFKQILSDRNAISWLPEEFNSDQEVLNAIKDCYERLSENVLGDKVLKSLLGSLADYSLDGIFIRNDLQLTDISQKMFGNWGVIQNAIMQDIKHVAPARKHKESEEDYEKRIVGIFKKADSFSISYINDCLNEADPNNAYFVENYFATFGAVNTPTMQRENLFALVQNAYTEVAALLHSDYPTVKHLAQDKANVSKIKALLDAIKSLQHFVKPLLGKGDESDKDERFYGELASLWAELDTVTPLYNMIRNYMTRKPYSQKKIKLNFENPQLLGGWDANKEKDYATIILRRNGLYYLAIMDKDSRKLLGKAMPSDGECYEKMVYKFFKDVTTMIPKCSTQLKDVQAYFKVNTDDYVLNSKAFNRPLTITKEVFDLNNVLYGKYKKFQKGYLTATGDNVGYTHAVNVWIKFCMDFLDSYDSTCIYDFSSLKPESYLSLDSFYQDVNLLLYKLSFTDVSASFIDQLVEEGKMYLFQIYNKDFSEYSKGTPNMHTLYWKALFDERNLADVVYKLNGQAEMFYRKKSIENTHPTHPANHPILNKNKDNKKKESLFEYDLIKDRRYTVDKFMFHVPITMNFKSSGSENINQDVKAYLRHADDMHIIGIDRGERHLLYLVVIDLQGNIKEQFSLNEIVNDYNGNTYHTNYHDLLDVREDERLKARQSWQTIENIKELKEGYLSQVIHKITQLMVRYHAIVVLEDLSKGFMRSRQKVEKQVYQKFEKMLIDKLNYLVDKKTDVSTPGGLLNAYQLTCKSDSSQKLGKQSGFLFYIPAWNTSKIDPVTGFVNLLDTHSLNSKEKIKAFFSKFDAIRYNKDKKWFEFNLDYDKFGKKAEDTRTKWTLCTRGMRIDTFRNKEKNSQWDNQEVDLTTEMKSLLEHYYIDIHGNLKDAISTQTDKAFFTGLLHILKLTLQMRNSITGTETDYLVSPVADENGIFYDSRSCGDQLPENADANGAYNIARKGLMLVEQIKDAEDLDNVKFDISNKAWLNFAQQKPYKNG

SEQ ID NO: 1080 - protein, 1306 aa, unidentified
  REGION 1..1306: note = Cas Enzyme sequence
MAKNFEDFKRLYPLSKTLRFEAKPIGATLDNIVKSGLLEEDEHRAASYVKVKKLIDEYHKVFIDRVLDNGCLPLDDKGDNNSLAEYYESYVSKAQDEDAIKKFKEIQQNLRSIIAKKLTDDKAYANLFGNKLIESYKDKADKTKLIDSDLIQFINTAESTQLDSMSQDEAKELVKEFWGFVTYFYGFFDNRKNMYTAEDKSTGIAYRLINENLPKFIDNMEAFNTAITRPEIQANMDELYSNFSEYLNVESIQEMFQLDYYNMLLTQKQIDVYNAIIGGKTDDEHDVKIKGINEYINLYNQKHKDDKLPKLKALFKQILSDRNAISWLPEEFNSDQEVLNAIKDCYERLSENVLGDKVLKSLLGSLADYSLDGIFIRNDLQLTDISQKMFGNWGVIQNAIMQDIKHVAPARKHKESEEDYEKRIVGIFKKADSFSISYINDCLNEADPNNAYFVENYFATFGAVNTPTMQRENLFALVQNAYTEVAALLHSDYPTVKHLAQDKANVSKIKALLDAIKSLQHFVKPLLGKGDESDKDERFYGELASLWAELDTVTPLYNMIRNYMTRKPYSQKKIKLNFENPQLLGGWDANKEKDYATIILRRNGLYYLAIMDKDSRKLLGKAMPSDGECYEKMVYKFFKDVTTMIPKCSTQLKDVQAYFKVNTDDYVLNSKAFNRPLTITKEVFDLNNVLYGKYKKFQKGYLTATGDNVGYTHAVNVWIKFCMDFLDSYDSTCIYDFSSLKPESYLSLDSFYQDVNLLLYKLSFTDVSASFIDQLVEEGKMYLFQIYNKDFSEYSKGTPNMHTLYWKALFDERNLADVVYKLNGQAEMFYRKKSIENTHPTHPANHPILNKNKDNKKKESLFEYDLIKDRRYTVDKFMFHVPITMNFKSSGSENINQDVKAYLRHADDMHIIGIDRGERHLLYLVVIDLQGNIKEQFSLNEIVNDYNGNTYHTNYHDLLDVREDERLKARQSWQTIENIKELKEGYLSQVIHKITQLMVRYHAIVVLEDLSKGFMRSRQKVEKQVYQKFEKMLIDKLNYLVDKKTDVSTPGGLLNAYQLTCKSDSSQKLGKQSGFLFYIPAWNTSKIDPVTGFVNLLDTHSLNSKEKIKAFFSKFDAIRYNKDKKWFEFNLDYDKFGKKAEDTRTKWTLCTRGMRIDTFRNKEKNSQWDNQEVDLTTEMKSLLEHYYIDIHGNLKDAISTQTDKAFFTGLLHILKLTLQMRNSITGTETDYLVSPVADENGIFYDSRSCGDQLPENADANGAYNIARKGLMLVEQIKDAEDLDNVKFDISNKAWLNFAQQKPYKNG

SEQ ID NO: 1081 - protein, 1306 aa, unidentified
  REGION 1..1306: note = Cas Enzyme sequence
MAKNFEDFKRLYPLSKTLRFEAKPIGATLDNIVKSGLLEEDEHRAASYVKVKKLIDEYHKVFIDRVLDNGCLPLDDKGDNNSLAEYYESYVSKAQDEDAIKKFKEIQQNLLSIIAKKLTDDKAYANLFGNKLIESYKDKADKTKLIDSDLIQFINTAESTQLVSMSQDEAKELVKEFWGFTTYFEGFFKNRKNMYTPEEKSTGIAYRLINENLPKFIDNMEAFKKAIARPEIQANMEELYSNFSEYLNVESIQEMFLLDYYNMLLTRKQIDVYNAIIGGKTDDEHDVKIKGINEYINLYNQQHKDDKLPKLKALFKQILSDRNAISWLPEEFNSDQEVLNAIKDCYERLAENVLGDKVLKSLLGSLADYSLDGIFIRNDLQLTDISQKMFGNWGVIQNAIMQNIKHVAPARKHKESEEDYEKRIAGIFKKADSFSISYINDCLNEADPNNAYFVENYFATFGAVNTPTMQRENLFALVQNAYTEVAALLHSDYPTVKHLAQDKANVSKIKALLDAIKSLQHFVKPLLGKGDESDKDERFYGELASLWAELDTVTPLYNMIRNYMTRKPYSQKKIKLNFENPQLLGGWDANKEKDYATIILRRNGLYYLAIMDKDSRKLLGKAMPSDGECYEKMVYKFFKDVTTMIPKCSTQLKDVQAYFKVNTDDYVLNSKAFNRPLTITKEVFDLNNVLYGKYKKFQKGYLTATGDNVGYTHAVNVWIKFCMDFLDSYDSTCIYDFSSLKPESYLSLDSFYQDVNLLLYKLSFTDVSASFIDQLVEEGKMYLFQIYNKDFSEYSKGTPNMHTLYWKALFDERNLADVVYKLNGQAEMFYRKKSIENTHPTHPANHPILNKNKDNKKKESLFEYDLIKDRRYTVDKFMFHVPITMNFKSSGSENINQDVKAYLRHADDMHIIGIDRGERHLLYLVVIDLQGNIKEQFSLNEIVNDYNGNTYHTNYHDLLDVREDERLKARQSWQTIENIKELKEGYLSQVIHKITQLMVRYHAIVVLEDLSKGFMRSRQKVEKQVYQKFEKMLIDKLNYLVDKKTDVSTPGGLLNAYQLTCKSDSSQKLGKQSGFLFYIPAWNTSKIDPVTGFVNLLDTHSLNSKEKIKAFFSKFDAIRYNKDKKWFEFNLDYDKFGKKAEDTRTKWTLCTRGMRIDTFRNKEKNSQWDNQEVDLTTEMKSLLEHYYIDIHGNLKDAISTQTDKAFFTGLLHILKLTLQMRNSITGTETDYLVSPVADENGIFYDSRSCGDQLPENADANGAYNIARKGLMLVEQIKDAEDLDNVKFDISNKAWLNFAQQKPYKNG

SEQ ID NO: 1082 - protein, 1306 aa, unidentified
  REGION 1..1306: note = Cas Enzyme sequence
MAKNFEDFKRLYPLSKTLRFEAKPIGATLDNIVKSGLLDEDEHRAASYVKVKKLIDEYHKVFIDRVLADGCLPLKNEGHNNSLTEYYDNYVSKSQNEDAKKAFEENLQNLRSIIAKKLTEDKAYANLFGKNLIESYKDKTDKTKIIDSDLFKFINTAESTQLDSMSQDEAKEIVKEFWGFTTYFVGFFDNRKNMYTAEEKSTGIAYRLINENLPKFIDNMEAFKKAIARTEIQANMDELYSNFSEYLNVESIQEMFQLDYYNMLLTQKQIDVYNAIIGGKTDDEHDVKIKGINEYINLYNQQHKDDKLPKLKALFKQILSDRNAISWLPEEFNSDQEVLNAIKDCYERLSENVLGDKVLKSLLGSLADYSLDGIFIRNDLQLTDISQKIFGNWGVIQNAIMQNIKRVAPARKHKESEEDYEKRIAGIFKKADSFSISYINDCLNEADPNNAYFVENYFATFGAVNTPTMQRENLFALVQNAYTEVAALLHSDYPTVKHLAQDKANVSKIKALLDAIKSLQHFVKPLLGKGDESDKDERFYGELASLWAELDTVTPLYNMIRNYMTRKPYSQKKIKLNFENPQLLGGWDANKEKDYATIILRRNGLYYLAIMDKDTRKLLGKAMPSDGECYEKMVYKFFKDVTTMIPKCSTQLKDVQAYFKVNTDDYVLNSKAFNKPLTITKEVFDLNNVLYGKYKKFQKGYLTATGDNVGYTHAVNVWIKFCMDFLNSYDSTCIYDFSSLKPESYLSLDAFYQDANLLLYKLSFARASVSYINQLVEEGKMYLFQIYNKDFSEYSKGTPNMHTLYWKALFDERNLADVVYKLNGQAEMFYRKKSIENTHPTHPANHPILNKNKDNKKKESLFDYDLIKDRRYTVDKFMFHVPITMNFKSVGSENINQDVKAYLRHADDMHIIGIDRGERHLLYLVVIDLQGNIKEQYSLNEIVNEYNGNTYHTNYHDLLDVREEERLKARQSWQTIENIKELKEGYLSQVIHKITQLMVRYHAIVVLEDLSKGFMRSRQKVEKQVYQKFEKMLIDKLNYLVDKKTDVSTPGGLLNAYQLTCKSDSSQKLGKQSGFLFYIPAWNTSKIDPVTGFVNLLDTHSLNSKEKIKAFFSKFDAIRYNKDKKWFEFNLDYDKFGKKAEDTRTKWTLCTRGMRIDTFRNKEKNSQWDNQEVDLTTEMKSLLEHYYIDIHGNLKDAISTQTDKAFFTGLLHILKLTLQMRNSITGTETDYLVSPVADENGIFYDSRSCGDQLPENADANGAYNIARKGLMLIEQIKNAEDLNNVKFDISNKAWLNFAQQKPYKNG

SEQ ID NO: 1083 - protein, 1306 aa, unidentified
  REGION 1..1306: note = Cas Enzyme sequence
MAKNFEDFKRLYPLSKTLRFEAKPIGATLDNIVKSGLLDEDEHRAASYVKVKKLIDEYHKVFIDKVLADGCLPLKNEGHNNSLTEYYDNYVSKSQNEDVKKAFEENQQNLRSIIAKKLTENKAYANLFGKNLIESYKDKTDKTKIIDSDLFKFINTAESTQLDSMSQDEAKEIVKEFWGFTTYFVGFFDNRKNMYTAEEKSTGIAYRLINENLPKFIDNMEAFKKAIARPEIQANMDELYSNFSEYLNVESIQEMFQLDYYNMLLTQKQIDVYNAIIGGKTDDEHDVKIKGINEYINLYNQQHKDDKLPKLKALFKQILSDRNAISWLPEEFNSDQEVLNAIKDCYERLDENVLGDKVLKSLLGSLADYSLDGIFIRNDLQLTDISQKMFGNWGVIQNAIMQNIKRVAPARKHKESEEDYEKRIAGIFKKADSFSISYINDCLNEADPNNAYFVENYFATFGAVNTPTMQRENLFALVQNAYTEVAALLHSDYPTVKHLAQDKANVSKIKALLDAIKSLQHFVKPLLGKGDESDKDERFYGELASLWAELDTVTPLYNMIRNYMTRKPYSQKKIKLNFENPQLLGGWDANKEKDYATIILRRNGLYYLAIMDKDSRKLLGKAMPSDGECYEKMVYKFFKDVTTMIPKCSTQLKDVQAYFKVNTDDYVLNSKAFNKPLTITKEVFDLNNVLYGKYKKFQKGYLTATGDNVGYTHAVNVWIKFCMDFLNSYDSTCIYDFSSLKPESYLSLDAFYQDANLLLYKLSFARASVSYINQLVEEGKMYLFQIYNKDFSEYSKGTPNMHTLYWKALFDERNLADVVYKLNGQAEMFYRKKSIENTHPTHPANHPILNKNKDNKKKESLFDYDLIKDRRYTVDKFMFHVPITMNFKSVGSENINQDVKAYLRHADDMHIIGIDRGERHLLYLVVIDLQGNIKEQFSLNEIVNDYNGNTYHTNYHDLLDVREEERLKARQSWQTIENIKELKEGYLSQVIHKITQLMVRYHAIVVLEDLSKGFMRSRQKVEKQVYQKFEKMLIDKLNYLVDKKTDVSTPGGLLNAYQLTCKSDSSQKLGKQSGFLFYIPAWNTSKIDPVTGFVNLLDTHSLNSKEKIKAFFSKFDAIRYNKDKKWFEFNLDYDKFGKKAEDTRTKWTLCTRGMRIDTFRNKEKNSQWDNQEVDLTTEMKSLLEHYYIDIHGNLKDAISTQTDKAFFTGLLHILKLTLQMRNSITGTETDYLVSPVADENGIFYDSRSCGDQLPENADANGAYNIARKGLMLIEQIKNAEDLNNVKFDISNKAWLNFAQQKPYKNG

SEQ ID NO: 1084 - protein, 1306 aa, unidentified
  REGION 1..1306: note = Cas Enzyme sequence
MAKNFEDFKRLYPLSKTLRFEAKPIGATLDNIVKSGLLEEDEHRAASYVKVKKLIDEYHKVFIDRVLDNGCLPLDDKGDNNSLAEYYESYVSKAQDEDAIKKFKEIQQNLLSIIAKKLTDDKAYANLFGNKLIESYKDKADKTKLIDSDLIQFINTAESTQLVSMSQNEAKELVKEFWGFTTYFEGFFKNRKNMYTPEEKSTGIAYRLINENLPKFIDNMEAFKKAIARPEIQANMEELYSNFSEYLNVESIQEMFLFDYYNMLLTQKQIDVYNAIIGGKTDDEHDVKIKGINEYINLYNQQHKDDKLPKLKALFKQILSDRNAISWLPEEFNSDQEVLNAIKDCYERLAENVLGDKVLKSLLGSLADYSLDGIFIRNDLQLTDISQKMFGNWGVIQNAIMQNIKHVAPARKHKESEEDYEKRIAGIFKKADSFSISYINDCLNEADPNNAYFVENYFATFGAVNTPTMQRENLFALVQNAYTEVAALLHSDYPTVKHLAQDKANVSKIKALLDAIKSLQHFVKPLLGKGDESDKDERFYGELASLWAELDTVTPLYNMIRNYMTRKPYSQKKIKLNFENPQLLGGWDANKEKDYATIILRRNGLYYLAIMDKDSRKLLGKAMPSDGECYEKMVYKFFKDVTTMIPKCSTQLKDVQAYFKVNTDDYVLNSKAFNRPLTITKEVFDLNNVLYGKYKKFQKGYLTATGDNVGYTHAVNVWIKFCMDFLDSYDSTCIYDFSSLKPESYLSLDSFYQDVNLLLYKLSFTDVSASFIDQLVEEGKMYLFQIYNKDFSEYSKGTPNMHTLYWKALFDERNLADVVYKLNGQAEMFYRKKSIENTHPTHPANHPILNKNKDNKKKESLFEYDLIKDRRYTVDKFMFHVPITMNFKSSGSENINQDVKAYLRHADDMHIIGIDRGERHLLYLVVIDLQGNIKEQFSLNEIVNDYNGNTYHTNYHDLLDVREDERLKARQSWQTIENIKELKEGYLSQVIHKITQLMVRYHAIVVLEDLSKGFMRSRQKVEKQVYQKFEKMLIDKLNYLVDKKTDVSTPGGLLNAYQLTCKSDSSQKLGKQSGFLFYIPAWNTSKIDPVTGFVNLLDTHSLNSKEKIKAFFSKFDAIRYNKDKKWFEFNLDYDKFGKKAEDTRTKWTLCTRGMRIDTFRNKEKNSQWDNQEVDLTTEMKSLLEHYYIDIHGNLKDAISTQTDKAFFTGLLHILKLTLQMRNSITGTETDYLVSPVADENGIFYDSRSCGDQLPENADANGAYNIARKGLMLVEQIKDAEDLDNVKFDISNKAWLNFAQQKPYKNG

SEQ ID NO: 1085 - protein, 1306 aa, unidentified
  REGION 1..1306: note = Cas Enzyme sequence
MAKNFEDFKRLYPLSKTLRFEAKPIGATLDNIVKSGLLDEDEHRAASYVKVKKLIDEYHKVFIDRVLADGCLPLKNEGHNNSLTEYYDNYVSKSQNEDAKKAFEENLQNLRSIIAKKLTEDKAYANLFGKNLIESYKDKTDKTKIIDSDLFKFINTAESTQLDSMSQDEAKEIVKEFWGFTTYFVGFFDNRKNMYTAEEKSTGIAYRLINENLPKFIDNMEAFKKAIARTEIQANMDELYSNFSEYLNVESIQEMFQLDYYNMLLTQKQIDVYNAIIGGKTDDEHDVKIKGINEYINLYNQQHKDDKLPKLKALFKQILSDRNAISWLPEEFNSDQEVLNAIKDCYERLSENVLGDKVLKSLLGSLADYSLDGIFIRNDLQLTDISQKIFGNWGVIQNAIMQNIKRVAPARKHKESEEDYEKRIAGIFKKADSFSISYINDCLNEADPNNAYFVENYFATFGAVNTPTMQRENLFALVQNAYTEVAALLHSDYPTVKHLAQDKANVSKIKALLDAIKSLQHFVKPLLGKGDESDKDERFYGELASLWAELDTVTPLYNMIRNYMTRKPYSQKKIKLNFENPQLLGGWDANKEKDYATIILRRNGLYYLAIMDKDTRKLLGKAMPSDGECYEKMVYKFFKDVTTMIPKCSTQLKDVQAYFKVNTDDYVLNSKAFNKPLTITKEVFDLNNVLYGKYKKFQKGYLTATGDNVGYTHAVNVWIKFCMDFLNSYDSTCIYDFSSLKPESYLSLDAFYQDANLLLYKLSFARASVSYINQLVEEGKMYLFQIYNKDFSEYSKGTPNMHTLYWKALFDERNLADVVYKLNGQAEMFYRKKSIENTHPTHPANHPILNKNKDNKKKESLFDYDLIKDRRYTVDKFMFHVPITMNFKSVGSENINQDVKAYLRHADDMHIIGIDRGERHLLYLVVIDLQGNIKEQYSLNEIVNEYNGNTYHTNYHELLDVREEERLKARQSWQTIENIKELKEGYLSQVIHKITQLMVRYHAIVVLEDLSKGFMRSRQKVEKQVYQKFEKMLIDKLNYLVDKKTDVSTPGGLLNAYQLTCKSDSSQKLGKQSGFLFYIPAWNTSKIDPVTGFVNLLDTHSLNSKEKIKAFFSKFDAIRYNKDKKWFEFNLDYDKFGKKAEDTRTKWTLCTRGMRIDTFRNKEKNSQWDNQEVDLTTEMKSLLEHYYIDIHGNLKDAISTQTDKAFFTGLLHILKLTLQMRNSITGTETDYLVSPVADENGIFYDSRSCGDQLPENADANGAYNIARKGLMLIEQIKNAEDLNNVKFDISNKAWLNFAQQKPYKNG

SEQ ID NO: 1086 - protein, 1306 aa, unidentified
  REGION 1..1306: note = Cas Enzyme sequence
MSTKEYFVGQYPVSKTLRFELKPVLLEDQTIDEFWDVYLNGSDDDELHKLYNRDKERNDNYPIMKAILDQFHKRFITSALEQFEAGEKGVLWEALATAYQNDKRSNAYRKLQEEMRKKIRKAFEKHEWWPYVSSYSQLIGSLMEQLVENDDDFMESVLENNPKMELNRNKMLKAIRTFKRFSIYFGNYKDNRDNMYSEKDQATSIANRIVNENFPKFIDNIAVYRRLKEVCPNELKVIENNLCTTLNGLSLDDVFVPRFYNSCLTQDGIERYNWILGGNPNEEVFGINSVGNEYLHQHPDSKLKLRNLEMTKLYKQILSDRIHIAFLPEQFSSDDELMQSVSAFLDRFDSMDLFGRIQEVMKLLKDSDTDKEKIYVQGKNLPKLSTLLYGKWDVLGEKLRSTLLTGSTKKVQKERDKEIEAWLDNKCFSLAQILSVEKELMEQSAHPLSLMELLSELTLWKYDSEGKKWSKKSLPKLCKDAHITEFSELMKKYEQEGLSIKADAAKEVLKSVLDDYMELLHVLELLRLGKKSPYVEKDDFYTPYEFLFESTDNEVAISHIVPLYMKVQSYLTHKLTDKGKILLKFDSPTRANGWDDCSIVIKDNKYYLVLYLDRLEEKEAQTLYAGNSADIVIYQQQKTDFRNAPRLFINSKGDNQSPAVSKYHLPIEMVESLYKERKALSSPSAKKAFDEHHPDYNKKLIDYYKIGFLRHEEFSPFRHTFESMWKKSSEYNSIQEFFEHTQEMCYMLTLKPIAFDYLCDLQKKKKLLLLKISNKDFNEGSKGTPNIHTLYWKELFTKDNLSNVVYKLSSQGIELFYREAISKETAFVHKKGSILVNKTFSDGTPIEGELYQKFLRYFNGLEADLTEEEANLLPMVRTKKAKFNIVKDKRYYEHKFFLHVPIIINFKASETSQKQFNERTLDIFRHNKKELNIIGIDRGERNLVYVSVINQKGNHLIPPRHFNLIGNYNYLAKLIQTEKNRDEARKNWTTIERIKDLKTGYLSQVVHEIANLVVRYNAIVVLEDLNFGFKRGRFNVERQVYQNFEKMLIQKLNYLAFKKDNPSEECGCIRSGLQLTAPFTSFKDLGKQSGWLFYVPAGYTSKIDPATGFVNLFNMNKPADSLQAFFGAFDEIAFKNGLFYFTFDYSKKVFNTVKADCTNHWTLSSHGARIVGKEKELKDLTTEFANFFKEKADLPLDKVSVQTILSLEESKLQELWGLFKLLLKMRNSNDNQDYIISPVAGDTPFITGPNNNLQIADADANGAYNIALKGLYWLRNDFPTDENGYLRYIKDEDWFRFIQTKPYRND

SEQ ID NO: 1087 - protein, 1307 aa, unidentified
  REGION 1..1307: note = Cas Enzyme sequence
MKTVEQFCGQKNGYSRSITLRNRLIPVGKTEENLQKANMLEADFNRAKAYSEVKNLIDDFHRSFIEDVLSNTKLGWKNLYDVFDLCQLEKDKIKKEKQKKDLQSIQAAMRKAIVKKFKDDERFSKLFKKELLSDLLPSIIKNDESGTITDKNEALKVFKGFSTYFSGFHQNRENLYSDEAKATAISNRIVNENFPKFHANVKVFEYLQKNFPEIISDTEESLKAFLNGKKLSEIFNPEKFNAVLCQSGIDFYNTVIGGISDENGKQKIQGLNEKINLASQQLPPEEKSKLKKKMTVLYKQILSDKKTASFIPIGFEKSEEVYKSIKQLKEEYFDKAYKLIERTFSAPDYDLSEIFVPAKELTAFSLAIFGNWSILNDGLFLLEKDNSKKELTEKQVENLHKEISKKDYSLADLQKAYERWANENGVPADKTVKSYFSLSELRANEKTKEKEPVDIVEKIKITYEKIDFENIENLQAEKEAATPIKNFLDEVQCLFHHLKLVDYRGEEQKDSAFYSKLDEILIPLSEIISLYNKVRNFVTKKPGEVKKIKLNFECPTLANGWDLNKESSNDAIILRKNGKYFLGIFNPEDKPKFSNDSICKNQQESHYEKMIYKLLPGPNKMLPKVFFSTKGQETFLPPKDLLLGYEQGKHKKGESFDKSFMHKLIDWFKYAINQHEDWKNFNFKFSPTESYEDMSGFYKEVELQGYKITFQNISENYIDSLIDSGKLYLFQIYNKDFAEKADGKKNLHTLYWENLFSPENLKDICLKLNGDAELFYRPASENLKVIKHEKDSILVNRTTTDGETIRDETYQEIYKFKNPAKQKKGFKLSNEAKSLLDSGKVVFKKARFEITKDKHFLQNTYLFHCPITMNFKAPEITGKKFNERVLEYLRNNPDVKIIGLDRGERHLIYLSLINQNGEIELQKTLNIVEQIRGDKENPVSVNYQEKLVQKEGDRNKARKNWQTIGNIKELKEGYLSNIVHEIAKLMVEQNAIVVMEDLNFGFKRGRFAVERQVYQKFENMLIEKLNYFAFKDRPATEPGGILNAYQLTDKSANISDVGKQCGWIFYIPASYTSKIDPKTGFANLFNTKGLTNVEKKKEVFSKFDSIRYDSKENCFVFSVNYSKLGDNADFKKNWEIYTHGERIVYSRKENKTFSVNPTENLEKAFDGQFAQSGINWKNKENLIDLIENISAEKSNAKFFDELLRSFTTTLQMRNSVPNTEEDYLISPVKAADGTFFDSRNEIAKGKDSGGKWISKFPVDADANGAYHIALKGLYLLQNNFNLNPKGYIENISNADWFKFVQKKEYLK

SEQ ID NO: 1088 - protein, 1307 aa, unidentified
  REGION 1..1307: note = Cas Enzyme sequence
MADLSQFTHKYQVPKTLRFELIPQGKTLENLSAYGMVADDKQRSENYKKLKPVIDRIYKYFIEESLKNTNLDWNPLYEAIREYRKEKTTATITNLKEQQDICRRAIASRFEGKVPDKGDKSVKDFNKKQSKLFKELFGKELFTDSVLEQLPGVSLSDEDKALLKSFDKFTTYFVGFYDNRKNVFSSDDISTGIPHRLVQENFPKFIDNCDDYKRLVLVAPELKEKLEKAAEATKIFEDVSLDEIFSIKFYNRLLQQNQIDQFNQLLGGIAGAPGTPKIQGLNETLNLSMQQDKTLEQKLKSVPHRFSPLYKQILSDRSSLSFIPESFSCDAEVLLAVQEYLDNLKTEHVIEDLKEVFNRLTTLDLKHIYVNSTKVTAFSQALFGDWNLCREQLRVYKMSNGNEKITKKALGELESWLKNSDIAFTELQEALADEALPAKVNLKVQEAISGLNEQMAKSLPKELKIPEEKEELKALLDAIQEVYHTLEWFIVSDDVETDTDFYVPLKETLQIIQPIIPLYNKVRNFATQKPYSVEKFKLNFANPTLADGWDENKEQQNCAVLFQKGNNYYLGILNPKNKPDFDNVDTEKQGNCYQKMVYKQFPDFSKMMPKCTTQLKEVKQHFEGKDSDYILNNKNFIKPLTITREVYDLNNVLYDGKKKFQIDYLRKTKDEDGYYTALHTWIDFAKKFVASYKSTSIYDTSTILPPEKYEKLNEFYGALDNLFYQIKFENIPEEIIDTYVEDGKLFLFQIYNKDFAAGATGAPNLHTIYWKAVFDPENVKDVVVKLNGQAELFYRPKSNMDVIRHKVGEKLVNRTLKDGSILTDELHKELYLYANGSLKKGLSEDAKIILDKNLAVIYDVHHEIVKDRRFTTDKFFFHVPLTLNYKCDKNPVKFNAEVQEYLKENPDTYVIGIDRGERNLIYAVVIDPKGRIVEQKSFNVINGFDYHGKLDQREKERVKARQAWTAVGKIKELKQGYLSLVVHEISKMMVRYQAVVVLENLNVGFKRVRSGIAEKAVYQQFEKMLINKLNYLMFKDAGGTEPGSVLNAYQLTDRFESFAKMGLQTGFLFYIPAAFTSKIDPATGFVDPFRWGAIKTLADKREFLSGFESLKFDSTTGNFILHFDVSKNKNFQKKLEGFVPDWDIIIEANKMKTGKGATYIAGKRIEFVRDNNSQGHYEDYLPCNALAETLRQCDIPYEEGKDILPLILEKNDSKLLHSVFKVVRLTLQMRNSNAETGEDYISSPVEDVSGSCFDSRMENEKLPKDADANGAYHIALKGMLALERLRKDEKMAISNNDWLNYIQEKRA

SEQ ID NO: 1089 - protein, 1307 aa, unidentified
  REGION 1..1307: note = Cas Enzyme sequence
MANLSQFTHKYQVSKTLRFELIPQGKTLENLTECGMVGEDKQRSENYKKLKPVIDRIYKYFIDESLIDANIDWNPLYEAIKNYRKEKTTVTVANLEEQQEICRKAIANRFEGKVPDKGDKNVKDFNKQQSKLFKELFGKELFTDSVSAQLPGVALSDEEKTLLKSFDKFTTYFVGFYENRKNVFSSEDISTAIPHRLVQENFPKFIDNCDTYKRVMAVAPALKEKLENASAATKVFEGITLDEIFSINFYNNLLQQNQIDRFNQLLGGIAGAPGTPKIQGLNETLNLAMQQDKTLEQKLKTIPHRFSPLYKQILSDRSSLSFIPDAFSDDAEVLFAVQEYLDNLKAEHVIENLKALFDQLPLLDLKHVYINSAKLTTFSQSLFSEWNLCREQLRNWKTGNLHETLTKKAQEELEKWLKNSDVTLSELQEAFADEALSVKINKKVQEIITALKGELEKDLPKKLKSAEDKEHLKAVLDAVQEMYHTLEWFMVSDNTETDADFYARLNDAQQILQPIIPLYNKVRNFATQKPYSVEKFKLNFANPTLADGWDENKEQQNCAVLFQKEDKYYLGILNPKNKPDFDNLTSENQEIGYQKMVYKQFPDFSKMMPKCTTQLKEVKQHFENEDSDYVLLNKNFIKPLTITREIYDLNNVLFDGKKKFQIDYLRKTKDEEGYYSALHTWINFAKDFVASYKSTAIYDTSTILPAEQYEKLNEFYGALDNLFYQIKFENIPENIINAYVEEGKLFLFQIYNKDFAAGATGAPNLHTIYWKAVFDPENMKDVVVKLNGQAELFYRPKSNMDVVRHKVGEKLVNRTLKDGTILTDELHNEIYLHANGKLKKELTEEAKKILVNELAVVYDVHHEIVKDRRFTTDKFFFHVPLTLNYKCDKNPVKFNAEVQEYLKENPDTYVIGIDRGERNLIYAVVIDPEGKIVEQKSFNIINGFDYHGKLDQREKERVKARQAWAAVGKIKELKQGYLSLVVHEISRMMIKYQAVVVLENLNVGFKRVRSGIAEKAVYQQFEKMLINKLNYLMFKDVNGTESGSVLNAYQLTDRFESFTKMGLQTGFLFYIPAAFTSKIDPATGFVDPFRWGIIKTLSDKKNFLSGFDSLQYNSANGNFTLHFDTKKNKDFQKKLEGFMPDWDIVIEANKKTTKNGRTYIAGKRIDFVRDSNGQGHYEDYLPCDALAEVLRQNDITYENGEDVLPLILKKDDSKLLHSVFKVIRLALQIRNSNAETGEDYISSPVEDVSGFCFDSRAGNVELPKDADANGAYHIALKGLLVLERLRSNEKLAISNSEWLKYIQEKRA

SEQ ID NO: 1090 - protein, 1308 aa, unidentified
  REGION 1..1308: note = Cas Enzyme sequence
MSKKMFAEFVNQYSVSKTLRFELIPQGKTKEFIESKGLIKQDEDRAAKYKNVKKIIDEYHKDFIEQALDGLKLNDLQNYMDLYLTADKDDKAKKQFEKIKEALRKEISDAFKKHEKFKTIFAKELIRNDLLNFCRGEDKENVKEFKDFTTYFVGFHKNRENMYAADEKATTIASRLIHENLPKFIDNIKIFEKIKKDAPELTLKLNNILTGMKEIINVSSLDDIFSLDYFNETLTQRGIDLYNTVIGGRTAEEGRIKIKGLNEYINTDHNQQQADKRKRLPKFKQLYKQILSDRQSFSFLSESFQNDSDVLEAIEKFYSGELLAFTFEGRTVNVLDTIKNMVNHLETFDLSKVYFRSGTALTNVSQKIFGDWHMIDRALEDYYEKTTPIRPREKSEKFEERKVKWLKQDFDIVTLQVAIDGYENETVKEKNSGKVFAEYFAGFCGNDPADLFQKIQQNYQAVKDLLNVLPFPEEEKLGGNKEHVNRIKSFLDSIMEVMQLVRPLSLKDTDRQKDELFYSRFTPLYDQLTLTIPLYNKVRNYLTQKPYGTEKFKLNFENSTLLDGWDLNKEADNTAVILRKDNLYYLGIMDKSSNRIFRKIPPETNNGPCYEKMIYKYFPDASKMIPKCSTQLKAVVNHFKVNDSIIEIGGKNYEGNLKISKQIFDLNNTAYDNSTNTVVPTNETGKLPKLFQKGYLKITDDVDGYRNALKNWIDFCKDFLRTYKSTNQFKFNFRNSALYKSLDEFYKDIDTQTYTMNFQNVPVSFINKLVDEGKLYLFQIYNKDFSPHSKGKPNLHTLYWKMLFDEANLRNVVYKLNGQAEVFFRRKSISEKNTVVHKANESLINKNPDNPKTTSQFDYDIVKDRRYTLDKFQFHVPITLNFKSKGTLNINPTVNAFLKDNPDVNIIGIDRGERHLLYYTLINHKGEIIKQDTLNVIANEKQKVNYHDLLNRKEGDRAEARKEWGVIETIKELKEGYLSQVVHKLTDLMIENNAIIIMEDLNFGFKRGRQKVEKQVYQKFEKMLIDKLNYLVDKNKNTGEAGGLLNAFQLANRFESFQKVGKQNGLIFYVPAWNTSKIDPGTGFVDLLKPKYENITKTKEFIEKFDSIRFTGGKNYFEFSFDYKNFTEKAEGSKTKWIVCTTNEDRYVWNKTLNNNKGGQERYDATERLKALFDANQLEYKNGIDLKPQILKLDSADFFRGLMKALSVTLAIRYNNGEKGERELDYILSPVADSNGCFFDSRKADGSMPQNADANGAYNTALKGLLLLERLREHGVEAFEKSKKVDKDGKSQWLPNKEWLQFKQAKVS

SEQ ID NO: 1091 - protein, 1308 aa, unidentified
  REGION 1..1308: note = Cas Enzyme sequence
LPRPVAESNIKLTNGDLIVNDKNTPSFNKLTNLYSVSKTLRFELRPQFSTLEHIKDNKIIQKGEELKSHYEIFKKILDQVFIKLIDDSLDHTYFDLKLIEQFKDLKFKRREQFTEKDAANLRNLKEIMKKQIDKNLDSPEKKSIFKDPANFLLDNANQYSNIVDSQQQSIEAFKRQKGYLSGYLQNRQNIFDRTTNETSVAFRVVEDNLPIFLNNQMILSRFLNTIADKNTLLTQIKSAIEKLGANINFETFFELDYFNRTLSQSSIEKYNLLISGKTTDQNTKLKGINELIKEYIDQHQGEKLKKIKLKKLYKQILSESTTNSFAFDIIDTNEDLMEVIGNFLQLTYERVKEKISFLEKIESLKDHNQNSTIDLPQVYIERRNLKRLSSYVFKEFDFIEQKLEENFVVQFSGKLTKKALDSYRKKQNLSLQEVYDGLQDIQYEVNGNNVPAQDLFLSGIPDFIYHGLDCHLQNLLEKAQSENLLFQEISQLQPKNIEQNSFNHSTFDQKSISGIKEILDFYKTFQVNLSLFNINQEDGKVELDPEFYSDFDELYSDLREIIPVYNKARNYLTKKPFSTEKTKLTFNNSYLLNGWSKRKEKSCFGTIFKKDQKYYIGVINSQTKTKDTLFEPHNFSESLQDQDCYEKMNLYFLSDLKRDFPHKYFSEKWDKKHPIPAELHKKYEYYRQDKNKDEQKADLTYHHELIAYYQNCLSKDEECQIYNFKLKDPKSYANVSDFLADLTPNTYRMDFTKIPESYIKKLVDDGKLYFFQLYSKDFSENSKGKPNLHTLYLKAVFDQINAEKFNYSYKISGEAEIFYRPASLECKVTHEKNKPIQNKNKNNHKKESVFSYDLLKDRRYMMDKFFLHLPIELNRTPLHSKDSVINQEVNQIVKLRSKNYFLGIDRGERHLIYLVLIDEDGKIIKQQTLNQISNQYKNQNGETETVTTNYHDLLDAKEKQRKESLQEWQTVENIKELKAGFLSNVVNEIGKIITEYQPVIMLENLNTGFKNSRIKIEKQVYQKFEKALIDKFNYFIRKDLDPESIGGLYRALQLTKGYSKQYNGKQNGIIYYIPANYTSNIDPTTGFISSFIPTRYESVEKTKDLISKFNSIFYDEQEDLFCIEVDYQKIRPDTKLWDQKVWQIYTYGDRFDTYRGKNGQWISDLMKPNEKFKQLFNEYDINLGQDLKQQILSQKDADFFRRFLHLLRLTLQMRNSKTATGEQNIQSSIRDNNYIISPVKNSRGVFYDSRQDYKDWPENADANGAYNIARKGLIMLKNLKSGVDEKRICDISTENWLKFVEEISKGNY

SEQ ID NO: 1092 - protein, 1309 aa, unidentified
  REGION 1..1309: note = Cas Enzyme sequence
MNNLKQFTGIFPVSKTLRFELNPVLLEGQTLNDFWQVYLDGPEGNDLHKLYKNDKERNVNYPIMKAILDQFHKKFIASALEQFVVGDTGVTWESLALAYQEDKKSKAYQKLQGEMRGKMRKAFMGHNWWPYISSYSQLISTLMKKMVEEDDDFVESIQESNPKMNLDRNKMLEAIKAFNNFSVYFGNYQDNRDNMYSEKDQTTSVANRIVNENYPKFLDNIVVYHRLKETCPDELKAIEENLAAVLNGLMLDDIFTPRYYNKCLTQDGIEKYNWLLGGNPNEGVLGINSVGNEYLHQHPDSQLKLRSLEMAQLHKQILSDRVRISFLPEQFNSDEELMQSVSAFFEGFDSFNLFEHIQETMNILKDSTTDLNRVYVQGKNLSRLSTLLYGKWDVLGEKLRSVMVTGNAKKAQKEKDKEIEAWLENKCFSLAQIQSVENELMELSAHPLSLIELLTDLTMWKYDSENKIWSKKSLLKLCMDARITEFSVLMNKYKQGMSIKTDTAKEILKSVLDQYMELLHVLELLRLGTKAQYIEKDDFYNSYELLFESTDDAVSVSHIVPLYMKVQSYLTRKLADKGKMLLKFDSPTLADGWDANKESANNATILLRDGKFFLMIVNPYNKPNISEGICEKGSYLKIVYHQIADASTDIPNLMVENGVTVRKTGRKDPDGINRRLEAEKDRLLPLDINMIRKKGSYLKSSSTFNTADSQTYLAYYMQRIIEYKGREIDFHFKRPDEYECYQDFIDDVSKQKYSLSLVPFSEYMLETWRQQGKAFLFEITNKDFREKSSGMANLHTLYWKELFSAQNLKDSVFKLNGEAELFFREKADSVSFIHKKGSVLVNKTFSNGTPIDTVFYKKLLRHFNGLDVDLTPEEVSLLPLVKTKKAQFDLVKDKRYHEHKFFLHVPITINYKASGTTQKQFNERTLDIFRNNKKELNIIGIDRGERNLIYVAVINQKGENLIPPRHYNLIGNYDYLAKLKQTEKNRDEARKNWTTQERIKDLKSGYLSQVVHEIAKLVVRYNAVIVLEDLSFGFKRGRFNVERQVYQNFEKMLIQKLNYLAFKRDAPSLEFGTIRTGLQLTAPFTSFKELGKQSGWLFYVPAGYTSKIDPSTGFVNLFNMTKPASSLREFFGAFNEISYRNGLFYFTFDYSKEKFNTVKTDYTNRWTLASHGLRIVGKEKELKNLTSEFANFFEKAKLALGEVSVKTVSALDEGMLKELWGLFKILLKMRNSNDDKDFIISPVASDTPFLTGPDNSMQIADADANGAYNIALKGLFWLYYNFPTDEKGYLKYIKDEEWFRFIQTKPYRD

SEQ ID NO: 1093 - protein, 1309 aa, unidentified
  REGION 1..1309: note = Cas Enzyme sequence
MSNLNQFIGLYPLSKTLRFELKPIGKTKENIEKNGILERDTQRAVGYKVVKKVIDEYHKAFIERILNDFENKLGDDERNDWKNSLQEFYSLYLSPVSDNGRKDKLAKTQERLWKQIANAFKKDWQYNKLFADELIRKDLAEFVSTPFFENYIRSQKGNEDIPDSEVRAIQETITQDINCFRDFTTYFTGFNKNRENMYMADGKATSIAHRMINENLPKFIDNVEVFKKIADCDEIKIHFATLYKAMEQYLNVLTINEMFLLEYFPMVLTQKQIDVYNAVIGGLNEYINLYNQQQKDKSKRLPKLKPLFKQILSERNAISWLPDEFESDNEMLESIEKCYQDLTIQVFCGENSLKSLLINIRDYDLDHIYLPNDSSISTISQKLYGGWSIVGNAITEDIKVSNPQKKKESDEEYEERISKIRKGIECYSVGYLNGVLRDKIKIDNFKPIEDYFLLMGATDDKSDQKPNLFVRIEDAYAEARAILTSPYPEERNLSQDEESIEKIKNLLDTIKELQHFIKPLLGSGSESDRDNNFYGEFIPLWESLDQITALYNMVRNRMTQKPYTDEKIKLYFDNNATFLRGWVDSKTESSDNGTQYGGYLFRRQNAIGEYDYYLGVSKDIKLFRRFKEVEESDKSTYERLDYYQLKSKTFYGTLYKGNYEIESANIKRAIDNVVYLIGSAATKEKVNNEKGKRQPKINTAIGYLKFLQQQDKELYNILLKDKSFQECNKAIIASMKSTLLSLNRIPSAKDYAQKNYVLFSVMMDDIDTLLQEKIFTYFSVSKCELDNAVGRDLRPLYLFKITNKDLSFAETYENGLRKNRGTENLHTMYFKALMSGTQNVFDIGSGAIYFREHKISYTEEQLKRGHHYEMLKGKFSYPIISNKRYAFDKFQFHLSVNLNYNADKNVNINTLVNSYLKESNSTHIIGIDRGERNLLYLSLIDLHGNIVEQYSLNEIGDEYNRTNYHELLDKKENQRKEARLSWQTIESIKELKEGYMSQVIHKIVELMVKYNAIVVLEDLNGGFKRGRQKVEKQVYQKFEKMLIDKLNYLVDKKLAVTEPGGVLKAYQLANKFESSQKRDKQNGFLFYVPAWNTSKMDPTTGFVDLFDTRYVNIAKAKAFFGKFKSIRYDAEKGWIEFAFDYNDFTTKASGTRTQWTLCTQGTRIETKRDPSQNNQFISEEFDLTSRFIELFSQFKIDPDGNLMEQICSQTEATFYKSILHLLHVTLQMRNSKTGTDVDYLISPVMNSHGEFYDSRHCGKDLPNNADANGAYNIARKGLWIIEQIKQSEDFAHLKLAISNKEWLQYAQKE

SEQ ID NO: 1094 - protein, 1309 aa, unidentified
  REGION 1..1309: note = Cas Enzyme sequence
MADLSQFTHKYQVSKTLRFELIPQGKTLENLSAYGMVADDKQRSENYKKLKPIIDRIYKYFIEESLKNTNLDWNPLYEAIREYRKEKTTATITHLKEQQDLCRRAIASRFEGKVPDKGDKSVKDFNKKQSKLFKELFGKELFTDSVLEQLPGVSLSDEDKALLKSFDKFTTYFVGFYDNRKNVFSSDDISTGIPHRLVQENFPKFIDNCDDYKRLVLVAPELKEKLEKAAEATKIFEDVSLDEIFSIKFYNRLLQQNQIDQFNQLLGGIAGAPGTPKIQGLNETLNLSMQQDKTLEQKLKSVPHRFSPLYKQILSDRSSLSFIPEAFSSDAEVLLAVQEYLGNLKTEHVVEDLRAIFDRLPLLDLKHIYVNSLKLTAFSQALFGDWNLCREQLRVRKISNGNEKITKKAIEELESWLKNSDIAFTELQEALADEALPAKVNLKVQEAISGLNEQMAKSLPKNLKTPEEKEILKAALDALQEVYHTLEWFIVSDDVETDTDFYVPLKENLQIIQPIIPLYNKVRNFATQKPYSVEKFKLNFANPTLADGWDENKEQQNCAVLFQKGNNYYLGILNPKNKPDFDNVDTEKQGNCYQKMVYKQFPDFSKMMPKCTTQLKEVKQHFEGKDSDYILNNKNFIKPLTITREVYDLNNVLYDGKKKFQIDYLRKTKDEDGYYTALHTWIDFAKKFVASYKSTSIYDTSTILPTEKYEKLNEFYGALDNLFYQIKFENIPEEIIDTYVEDGKLFLFQIYNKDFAAGATGAPNLHTIYWKAVFDSENVKDVVVKLNGQAELFYRPKSNMDVIRHKVGEKLVNRTLKDGSILTDELHKELYLYANGSLKKGLSEDAKTILDKNLAVIYDVHHEIVKDRRFTTDKFFFHVPLTLNYKCDKNPVKFNAEVQEYLKENPDTYVIGIDRGERNLIYAVVIDPKGRIVEQKSFNVINGFDYHGKLDQREKERVKARQAWTAVGKIKELKQGYLSLVVHEISKMMVKYQAVVVLENLNVGFKRVRSGIAEKAVYQQFEKMLINKLNYLMFKDAGGTEPGSVLNAYQLTAPFESFDRINRDKRTGFLFYIPAAFTSKIDPATGFVDPFRWGTIKTLADKREFLSGFESLKFDSTTGNFILHFDVSKNKNFQKKLEGFVPDWDIIIEANKMKTGKGATYIAGKRIEFVRDNNSQGHYEDYLPCNALAETLRQCDIPYEEGKDVLPLILEKDDSKLLHSVFKVVRLTLQMRNSNAETGEDYISSPVEDVSGSCFDSRMENEKLPKDADANGAYHIALKGMLALERLRKDEKMAISNNDWLNYIQEKRA

SEQ ID NO: 1095 - protein, 1309 aa, unidentified
  REGION 1..1309: note = Cas Enzyme sequence
MNNLKQFTGIFPVSKTLRFELNPVLLEGQTLNDFWQVYLDGPEGNDLHKLYKNDKERNVNYPIMKAILDQFHKKFIASALEQFVVGDTGVTWESLALAYQEDKKSKAYQKLQGEMRGKMRKAFMGHNWWPYISSYSQLISTLMKKMVEEDDDFVESIQESNPKMNLDRNKMLEAIKAFNNFSVYFGNYQDNRDNMYSEKDQTTSVANRIVNENYPKFLDNIVVYHRLKETCPDELKAIEENLAAVLNGLMLDDIFTPRYYNKCLTQDGIEKYNWLLGGNPNEGVLGINSVGNEYLHQHPDSQLKLRSLEMAQLHKQILSDRVRISFLPEQFNSDEELMQSVSAFFEGFDSFNLFEHIQETMNILKDSTTDLNRVYVQGKNLSRLSTLLYGKWDVLGEKLRSVMVTGNAKKAQKEKDKEIEAWLENKCFSLAQIQSVENELMELSAHPLSLIELLTDLTMWKYDSENKIWSKKSLLKLCMDARITEFSVLMNKYKQGMSIKTDTAKEILKSVLDQYMELLHVLELLRLGTKAQYIEKDDFYNSYELLFESTDDAVSVSHIVPLYMKVQSYLTRKLADKGKMLLKFDSPTLADGWDANKESANNATILLRDGKFFLMIVNPYNKPNISEGICEKGSYLKIVYHQIADASTDIPNLMVENGVTVRKTGRKDPDGINRRLEAEKDRLLPLDINMIRKKGSYLKSSSTFNTADSQTYLAYYMQRIIEYKGREIDFHFKRPDEYECYQDFIDDVSKQKYSLSLVPFSEYMLETWRQQGKAFLFEITNKDFREKSSGMANLHTLYWKELFSAQNLKDSVFKLNGEAELFFREKADSVSFIHKKGSVLVNKTFSNGTPIDTVFYKKLLRHFNGLDVDLTPEEVSLLPLVKTKNAQFDLVKDKRYHEHKFFLHVPITINYKASGTTQKQFNERTLDIFRNNKKELNIIGIDRGERNLIYVAVINQKGENLIPPRHYNLIGNYDYLAKLKQTEKNRDEARKNWTTQERIKDLKSGYLSQVVHEIAKLVVRYNAVIVLEDLSFGFKRGRFNVERQVYQNFEKMLIQKLNYLAFKRDAPSLEFGTIRTGLQLTAPFTSFKELGKQSGWLFYVPAGYTSKIDPSTGFVNLFNMTKPASSLREFFGAFNEISYRNGLFYFTFDYSKEKFNTVKTDYTNRWTLASHGLRIVGKEKELKNLTSEFANFFEKAKLALGEVSVKTVSALDEGMLKELWGLFKILLKMRNSNDDKDFIISPVASDTPFLTGPDNSMQIADADANGAYNIALKGLFWLYYNFPTDEKGYLKYIKDEEWFRFIQTKPYRD

SEQ ID NO: 1096 - protein, 1309 aa, unidentified
  REGION 1..1309: note = Cas Enzyme sequence
MSIFENFVGLYPVSKTLRFELKPELLDGQTIDDFWSVYLNGSEEDDLHKLYIHDDERNKQYPVVKAILDQFHKMFIASALEHFEEGEKGVTWLTLASAYRQDKRSKEFQKLQDEMRKKLRKSFEKHEWWSYMKSYSKLIGQLTMRMVANNDKFVEAVQESNPELASNPEIRLDRDGMIKALKTFERFSVYFGNYATNRDNMYSEKAQTSSIANRVVNENLPKFLDNIVVYERLKELCPDELKAIEENLSSTLDGLKLDDIFVPDYFNNCLAQVGIEKYNRLLGGNPNEGVLGINSVGNQYLQHHSETSVKLRSLQMTQLFKQILSDRVRLSFLPEQFKSDEELMQSVSDFLEGLESCEVFARIQRTFEILKDESTDLTRIYIQGSNLTKLSTLLYGKWDVLGERLRSTIETGNSKKVRRELDKEIEAWLENKCFSIAQIQAVESELIERSSHSLSVNELFSSLSPWKYDTETHEWSRKPLLKICDDARIVNFKELMRKFKEGCSIRTDAAKEELKYVLDQYIDLFHVVELLRLGNKSAYLEKDDFYVTYEQLFTSDDEVILSHIVPLYMKVQSYLTRQLKDEGKILLKFDSPTLADGWDDCFIVTNEEKYYLVIYLKHLTDKDIKSLYAGNTAKIVIYQQQKTDYRNAPRLFINSKGDNRAPAVAKYNLPVERVEKLYKKRKALTSPSAKRAFDENHPDFDRMLIDYYKVGFSRHEDFLPFWQIFEENWKSSSDYISIQEFFAHTQEMCYKLSYKQIDFSYLLSLQREKKVLVFSISNKDFNPASRGVPNLHTCYWKELFSLANLKDVVFKLSSQGIELFYRKAAEDKTPIVHRKGSILVNKTFSDGKPIEDKLYKRLLKYYNGTLVELSEEERKLLPMVITKEAKFDIVKDKRYHEHKFFLHVPIIINFKASPKSAKQFNEWTLQTLRENRKELNIIGIDRGERNLVYVSVINQRGENLIPPRHFNLIGNYDYLAKLKQTERNRDDARKNWTAMARIKDLKSGYLSQVVHEIAKLAVQYRAIVVLEDLNFGFKRGRFNVERQVYQNFEKMLIQKLNYLAFKTETPSPNCGNIRSGLQLTAPFTSFREMGKQCGWLFYVPAGYTSKIDPATGFVNLFNMNKPAESLRKFFGAFTEISYKDGLFYFTFDYSNEVFNTVKSDYTNRWKLSSHGARIIGKEKELKDLTKEFINFFEKKARIPLDKVSVQTISSLDDANLQQLWGLFKLLLKMRNSNDQFDFIISPVAGEKPFLTGEDNPMQILDADANGAYNIALKGLYWVMNDFPIEDGYLKYIRDTKWFEFVQTKPYLNE

SEQ ID NO: 1097 - protein, 1310 aa, unidentified
  REGION 1..1310: note = Cas Enzyme sequence
MNKAADNYTGSNYDEFIALSKVQKTLRNELKPTPFTAEHIKQRGIISEDEYRAQQSLELKKIADEYYRNYITHKLNDINNLDFYNLFEAIEEKYKKNDKDNRDKLDLVEKSKRGEIAKLLSADDNFKSMFEAKLITQLLPVYVEQNYIGEDKEKALETIALFKGFTTYFTDYFNIRKNMFKENGGASSICYRIVNVNASIFYDNLKTFMCIKEKAETEIALIEEELTELLDSWRLEHIFSEDYYNELLAQKGIDYYNQICGDVNKHMNLYCQQNKLKANVFKMTKLQKQIMGISEKAFEIPPMYQNDEEVYAAFNGFISRLEEVKLIDRLGNVLQNINIYNTAKIYINARYYTNVSSYVYGGWGAIDSAIERYLYNTIAGKGQSKVKKIENAKKDNKFMSVKELDSIVAEYEPDYFNAPYIDDDDNAVKAFGGQGVLGYFNKMSELLADVSLYTIDYNSDDSLIENKESALRIKKQLDDIMSLYHWLQTFIIDEVVEKDNAFYAELEDICCELENVVTLYDRIRNYVTKKPYSTQKFKLNFASPTLAAGWSRSKEFDNNAIILLRNNKYYIAIFNVNNKPDKQIIKGSEEQRLSTDYKKMVYNLLPGPNKMLPKVFIKSDTGKRDYNPSSYILEGYEKNRHIKSSGNFDINYCHDLIDYYKACINKHPEWKNYGFKFKETNQYNDIGQFYKDVEKQGYSISWAYISEADINRLDEEGKIYLFEIYNKDLSSHSTGKDNLHTMYLKNIFSEDNLKNICIELNGNAELFYRKSSMKSNITHKKDTILVNKTYINETGVRVSLSDEDYMKVYNYYNNNYVIDTENDKNLIDIIEKIGHRKSKIDIVKDKRYTEDKYFLYLPITINYGIEDENVNSKIIEYIAKQDNMNVIGIDRGERNLIYISVIDNKGNIIEQKSFNLVNNYDYKNKLKNMEKTRDNARKNWQEIGKIKDVKSGYLSGVISKIARMVIDYNAIIVMEDLNKGFKRGRFKVERQVYQKFENMLISKLNYLVFKERKADENGGILRGYQLTYIPKSIKNVGKQCGCIFYVPAAYTSKIDPATGFINIFDFKKYSGSGINAKVKDKKEFLMSMNSIRYVNEGSAEYEKIGHRQLFAFSFDYNNFKTYNVSIPVNEWTTYTYGERIKKLYKDGRWSGSEVLNLTEDLIELMEQYGIEYKDGHDIREDISHMDEMRNADFICNLFEKFKYTVQLRNSKSEAEGDDYDRLVSPVLNSHNGFFDSSDYKENEKSDDIIDDKQIMPKDADANGAYCIALKGLYEINKIKENWSDDKKLKESELYIGVTEWLDYIQNRRFE

SEQ ID NO: 1098 - protein, 1310 aa, unidentified
  REGION 1..1310: note = Cas Enzyme sequence
MNKAADNYTGGNYDEFIALSKVQKTLRNELKPTPFTAEHIKQRGIISEDEYRAQQSLELKKIADEYYRNYITHKLNDINNLDFYNLFDAIEEKYKKNDKENRDKLDLVEKSKRGEIAKMLSADDNFKSMFEAKLITKLLPDYVERNYTGEDKEKALETLALFKGFTTYFKGYFKTRKNMFSGEGGASSICHRIVNVNASIFYDNLKTFMRIQEKAGDEIALIEEELTEKLDGWRLEHIFSRDYYNEVLAQKGIDYYNQICGDINKHMNLYCQQNKFKANIFKMMKIQKQIMGISEKAFEIPPMYQNDEEVYASFNEFISRLEEVKLTDRLINILQNINIYNTAKIYINARYYTNVSSYVYGGWGVIDSAIERYLYNTIAGKGQSKVKKIENAKKDNKFMSVKELDSIVAEYEPDYFNAPYIDDDDNAVKAFGGQGVLGYFNKMSELLADVSLYTIDYNSDDSLIENKESALRIKKQLDDIMSLYHWLQTFIIDEVVEKDNAFYAELEDICCELENVVTLYDRIRNYVTKKPYSTQKFKLNFASPTLASGWSRSKEFDNNAIILLRNNKYYIAIFNVNNKPDKQIIKGSEEQRLSTDYKKMVYNLLPGPNKMLPKVFIKSDTGKRDYNPSSYILEGYEKNRHIKSSGNFDINYCHDLIDYYKACINKHPEWKNYGFKFKETTQYNDIGQFYKDVEKQGYSISWAYISEADINRLDEEGKIYLFEIYNKDLSSHSTGKDNLHTMYLKNIFSEDNLKNICIELNGNAELFYRKSSMKRNITHKKDTVLVNKTYINEAGVRVSLTDEDYIKVYNYYNNDYVIDVEKDKKLVEILERIGHRKNPIDIIKDKRYTEDKYFLHLPITINYGVDDENINAKMIEYIAKHNNMNVIGIDRGERNLIYISVINNKGNIIEQKSFNLVNNYDYKNKLKNMEKTRDNARKNWQEIGKIKDVKNGYLSGVISKIARMVVDYNAIIVMEDLNRGFKRGRFKVERQVYQKFENMLISKLNYLVFKEKKADENGGILKGYQLTYLPKSALQIGKQCGCIFYVPAAYTSKIDPATGFINIFDFKKYSGSAINAKVKDKKEFLMSMNSIRYVNEGSAEYEKIGHRQLFAFSFDYNNFKTYNVSIPVNEWTTYTYGERIKKLYKDGRWSGSEVLNLTEDLIELMEQYGIEYKDGHDIREDISHMDEMRNADFICNLFEKFKYTVQLRNSKSEAEGDDYDRLVSPVLNSHNGFFDSSDYKENEKSDDIIDDKQIMPKDADANGAYCIALKGLYEINKIKENWSDDKKLKESELYIGVTEWLDYIQNRRFE

SEQ ID NO: 1099 - protein, 1310 aa, unidentified
  REGION 1..1310: note = Cas Enzyme sequence
MSSSNIFSDLTNLYSLSKTLKFELKPVGNTQKMLEDAKIFEKDKAIQRKYEITKSYFDRLHREFVREALQGVKLSELEVYLEIFKKWKIDKKENDEKLKNEERKLRKEVVKFFDKQGELWAKKYKGLKNKDIEILFEEAVFESILKERYQNDPIQKDGEIIPVEILDESTGKLVSVFSSWKGFTGYFDKFFETRKNFYKDNGTAYALATRIINDSLKRFCANILIFESLRDKVDFTEVEHNFEKALSEIFSLDFYNSCLLQDGIDFYNKIIGGETLPNGEKKKGLNECINLHRQQKNEKLPFFIALDNQILGEKEKFLIDEIKDDEEFFNVLKEFSHQAEKRIIILRKLFIDFVEHQENYNLEEIYFSKEAFNTISRKWTSETDGFEDSLYKVLKEANIVTSSAEKAKQKEGGYSFPDFFALCHIKNALEAIEVEAVKAMKINDSQTVVALKFWKERYYEVLKFEERTLWEQFLAILNYEFSSLFEREINNKKIGYSVFQEDLKRLIEDLKIDSKAKVAIKDYADSVLTIYQMAKYFSVEKKRRWNTEYKLDVFYTDPINGYLQFYKNAYEEIVQVYNKLRNYLTKKTYDLEKWKLNFEKANLAKGWPDSPEGNTQYCSFIFRNKRDYFLGITDFPTLFDKLKFPEAYKDDGEDFEKMVYKQIDGKTLYGSVYKGLFGNKYSEDREKLNDIELLQRMKQVLETRVQFFPEFSKFIKKIEDNEYETAKELALEIKKGSFYRIFFESISAEYLYRGIYKIFKNTKCDFKIKKLYLFQINNKDWNKGSTGTKNLHTLYFESLFSTENSSLNFPIKLDGQAEIFYRPKTDVQKLGTKKDKKGKEVVNHKRYKDDKIFFHVKITLNRTKDEARYFKLNPNLNLFLAKNSNVNIIGVDRGEKNLAYFSVINQKGEILDSGSLNLVGKDEKGKAIDYHQKLEVKAEKRLQERKDWQAVEGIKDLKKGYISQVVHKLAELAIQYNAIIVFEDLNMRFKQIRGGIEKSVYQQLEKALIDKLSYLINKEEKDPEQAGHLFNAYQLSAPFTSFKDMGKQTGIIFYTKASYTSKIDPLTGWRPNLYLRYSNAEKAKRDILKFSRIDFVNGMFEFEYDIKKFQELKEYPKNTVWTVCSNVERFKWNKSLNNNIGGYTHYFNLTDGKVENINLKSSKPANLKELFEKYGININDDIKAQIEKLETKGNEKFFEHLIFFFNLICQIRNTDDSEQAKHECKDDFILSPVKPFFDSRNPEKFGKELPKNGDDNGAYNIARKGIIILQKITDHANKQGNCNKLSWKDLNINISDTEWDNFAQKSNKVG

SEQ ID NO: 1100 - protein, 1310 aa, unidentified
  REGION 1..1310: note = Cas Enzyme sequence
KKLNMKNTLENFTNKYSLSKTLKFELIPTPKTLENIEKKGLISTDENRAESYKKVKKIIDEYHKYFISIALENLKLSNLYEFSELYNKNNKTDEDKILLNKIQLELRKEIVNTFSKTSSNDIKEKYDRLFKKELIQVDLIDWINQNGDYEDIKLVEEFKTFTTYFTGFNENRKNMYTAEEHSTGIAYRLIHENLPKFLDNCRSFELLKSKYPTFKVDLIEKELEMVIQGKLLDSIFSIDFFNETLTQKGIDFYNTVLGGLTEKDVKKKIRGINEYINLFRQENHLKSRDVPTLKVLYKQILSDRESVSFLQDEFLDDSDVLNSIEVFYRSELLEKEIDGNKINVFSSISALMKDLNSFDTTKIYLKNDTSLTDISQKIYGSWSIVKVALKFHYETVVKPLNGKKRTEKYDEDLEKWIGTTKNGQFSLQFVQAICDAFFKELEEKEDKNTGDEWNEYFKNMNLIIDENGNSSTSIDRITLKYEEIKDVLNVEIPSSKKLIQEQHKVDKLKAFLDEIVSFLHFIKPLILKDPSLDKEEGFYSMLEGLFTQLDLATPLYNKTRNYLTKKAYSTDKIKLNFENAQLLAGWDVNKESDNTSVLLRKDGLYYLCIMDKKHNKVFKDIPLSPKKETNFEKIVNKFFPDASKMIPKCSTQLKAVKHHFSISKDDYIISGKVFNGDLSISEKVYQLNNYVFDLETNSMVISSGDGEKRPKKFQKKYLELSNDTIDFKDSLTSWVDFCKDFLIKYESTCQFNFTFKSSKEYNSLDEFYRDIDTQTYKITFQNIEEKYINSLIEEGKIFLFQIYNKDFSPNSKGKPNLHTMYWRALFEEENLMNVVYKLNGEAEVFFRKKSLEYSEEIWKRGHHAVELKDKFSYPIIKDKRFALDKFQFHVPITMNFKATDGNYFNTNVNEFLQNNPNVNIIGIDRGERHLLYLTLINQKGESILQKTLNKITNEITTVDYHNLLDTKEKNRDTARKSWGTIETIKELKEGYLSLVIHEVAKMMVENMAIVVLEDLNFGFKRGRQKVEKQVYQKFEKMLIDKLNYLIFKDKKETEVGGLYNALQLTSKFESFQKLGKQCGFLFYVPAALTSKIDPTTGFVNFLDTRYYSIEKSQEFFSKFGNIQYNTSKDYFEFEFDYNNFTLKAEGTKTKWSVCTHGVERWRYNPTSKGSERVNVTAELKTLFEKNTISFKNGNDLKNDIITSENKSLFSSLFHLLGLTLSLRHSESGTENDFILSPVADTKGVFFDSRNSTDKLPKDSDANGAYHIALKGLWILDNINKSTDFKKLRLAISNKEWLQFVQTKPYSKIDC

SEQ ID NO: 1101 - protein, 1310 aa, unidentified
  REGION 1..1310: note = Cas Enzyme sequence
MKQFTNLYPVSKTLRFELKPELLEGQTIDDFWDTYLNGTDENGLHKLYMHDKERNESYPIMKAILDQFHKRFIASALEQFEVGNTGVTWDTLAQAYQEDKRSKVYQKLQGEMREKIRKAFTEHEWWPYLSSYSKLIGSLMVKLVENDDDFVESIKESHSDMGLNRKKMLDAIKTFDHFSVYFEKYQENRDNMYSAKAQNTAISNRIVNENFPKFIDNITVYQRLKVTCPNELKAIEINLAATLKGLSFEEIFVPAYYDKCLNQDGIEMFNWLLGGNPNEGVLGINSVGNQYLQHNPESNLKLRSLQMSPLYKQILSDRVRLAFLPEQFKSDDELMQSVSTFLDGFDSVGLFARIQKTMNILKENSTDLEKIYVQGSKMTKLSTLLYGDWSVLGEKLRSMMVTGNTKKAQEDRNKEIEAWLENKCFSLAQIQAVESELMEQSAHPLSVMELLTTLTVWKYNSSSHEWAKKSLLEQCRDARITEFDVLLEKFREGMSIRNDRPKEVLKSVLDCYLELLHVIELLRLGNKSAYLEKDDFYLPYEQLFESADDTVLVSHIVPLYMKVQGYLTRKMTNEGKILLKFDSPTRANGWDDCSIVIKDNKYYLVLYLDNLTGKEVEALYSGTSADIVIYQQQKTDYKNAPRLFINSKGENQSPAVSKYHLPIEMVESLYKERKSLSSQLAKKAFDKLHPDYEEKLIDYYKIGLLRHDDFQPFRNAFERLWKKSSEYGSVQEFFAHTQEMCYMLSFNPIDFDYCYHLQKEGKLLLFSIVNKDFKENAKGVPNLHTLYWKELFSKDNLANVIYKLSSQGIEFFYREAGSKETTFTHKKNSILVNKTFSDGTPIEDGLYKKLLQHFNGLDVELSDEEVQILPKVITKKAKFDIIKDKRYHEHKFFLHVPITINFKASDMTQKQFNERTLDFLRHNKESLNIIGIDRGERNLIYVAVINQHGENLIPPRHYNLIDTGTYEGKVRKYDYLTKLKQTEKNRDQARKNWTTMERIKDLKSGYLSQVVHEIAKLVVQYNAIVVLEDLNFGFKRGRFNVERQIYQNFEKMLIQKLNYLVFKRDSPSIEYGNIRSGLQLTAPFTSFKELGKQTGWLFYIPAGYTSKIDPATGFVNLFNMNKPANSLKQFFEAFTDISYKDGLFYFSFNYSKEAFNTVKTDYKNCWKLSSHGERIAGKEGELKDLTTEFKNFFDEINLPLDKVSVQTISSLDNNQLQRLWGLFKLLLKMRNSNDKTDFIISPVACEKPFLTGPDNSMKIVDADANGAYNIALKGLYWVWNDFPMDGDYLKYIKDTDWFEFIQTKPYALPQ

SEQ ID NO: 1102 - protein, 1310 aa, unidentified
  REGION 1..1310: note = Cas Enzyme sequence
MKQFTNLYPVSKTLRFELKPELLEGQTIDDFWDTYLNGTDENGLHKLYMHDKERNESYPIMKAILDQFHKRFIASALEQFEVGNTGVTWDTLAQAYQEDKRSKVYQKLQGEMREKIRKAFTEHEWWPYLSSYSKLIGSLMVKLVENDDDFVESIKESHSDMGLNRKKMLDAIKTFDHFSVYFEKYQENRDNMYSAKAQNTAISNRIVNENFPKFIDNITVYQRLKVTCPNELKAIEINLAATLKGLSFEEIFVPAYYDKCLNQDGIEMFNWLLGGNPNEGVLGINSVGNQYLQHNPESNLKLRSLQMSPLYKQILSDRVRLAFLPEQFKSDDELMQSVSTFLDGFDSVGLFARIQKTMNILKENSTDLEKIYVQGSKLTKLSTLLYGDWSVLGEKLRSMMVTGNTKKAQEDRNKEIEAWLENKCFSLAQIQAVESELMEQSAHPLSVMELLTTLTVWKYNSSSHEWAKKSLLEQCRDARITEFDVLLEKFREGMSIRNDRPKEVLKSVLDCYLELLHVIELLRLGNKSAYLEKDDFYLPYEQLFESADDTVLVSHIVPLYMKVQGYLTRKMTNEGKILLKFDSPTRANGWDDCSIVIKDNKYYLVLYLDNLTGKEVEALYSGTSADIVIYQQQKTDYKNAPRLFINSKGENQSPAVSKYHLPIEMVESLYKERKSLSSQLAKKAFDKLHPDYEEKLIDYYKIGLLRHDDFQPFRNAFERLWKKSSEYGSVQEFFAHTQEMCYMLSFNPIDFDYCYHLQKEGKLLLFSIVNKDFKENAKGVPNLHTLYWKELFSKDNLANVIYKLSSQGIEFFYREAGSKETTFTHKKKSILVNKTFSDGTPIEDGLYKKLLQHFNGLDVELSDEEVQILPKVITKKAKFDIIKDKRYHEHKFFLHVPITINFKASDMTQKQFNERTLDFLRHNKESLNIIGIDRGERNLIYVAVINQHGENLIPPRHYNLIDTGTYEGKVRKYDYLTKLKQTEKNRDQARKNWTTMERIKDLKSGYLSQVVHEIAKLVVQYNAIVVLEDLNFGFKRGRFNVERQIYQNFEKMLIQKLNYLVFKRDSPSIEYGNIRSGLQLTAPFTSFKELGKQTGWLFYIPAGYTSKIDPATGFVNLFNMNKPANSLKQFFEAFTDISYKDGLFYFSFNYSKEAFNTVKTDYKNCWKLSSHGERIAGKEGELKDLTTEFKNFFDEINLPLDKVSVQTISSLDNNQLQRLWGLFKLLLKMRNSNDKTDFIISPVACEKPFLTGPDNSMKIVDADANGAYNIALKGLYWVWNDFPMDGDYLKYIKDTDWFEFIQTKPYALPQ

SEQ ID NO: 1103 - protein, 1311 aa, unidentified
  REGION 1..1311: note = Cas Enzyme sequence
MVNYEDFTKQYQVSKTLRFSLIPINETLENIKKEGFLEKDESRSDDYQEVKPILDKIYKEFADKALDHLSVNWKPLADAIEKYRISKTLQDREELRKIQEKIRKEIAGLFKGVHGNTVDEKQESLFKDIFSKKMFDGKVLERIDSIVLSAEEEKLLQKFTSFTTYFTGFYENRRNVFSDDDISTAIPHRIVQDNFPKFFENCKTYSRIKNQFPQLLDLLEKAKENLGILPEVSLDEMFSLQFYNHVVQQKNIDAYNQILGGIAGEAGEKKLQGLNETINLMMQQDGELKKALQNVPHRFIPLFKQILSDRTSLSFISDSFETDAELLDALKHLDEEVQTAAVAEKVKTLFIHWTDFNLAQIYISNSSLDKLSNAVYGQWDFIRNQLYMSQLNKKAAANGKVSQKEEGKIRSWIKNHDFSLTELRLDADPEIVEKCSAVLKEAAENFVKISRMALPSQLLKDNEREEIRNHLDGYMDFLHILEWFDVDLADEVDPMFLVPYEEIMAEMRPVPAFYNKVRNYVTKKPYSTEKYKLTFSIPTLADGWDNNKEKDNRTVIFMKDDKYYLGIMKKGNEIHFPPAGEDAAYFKMNYRFFPSVSKMIPKCSTQRKDVKAHFGKESSDMIIEDQQFNSPLVITKEIYDLNNVQNDEKKKFQKSYLDKTGDEKGYRDALKKWIDFSKEFLKKYESTSHFDYSSVRPTSEYDSLNDFYNDLNHLSYCVAFDKVSETAVNQMVADGKLFLFQIYNKDFAPGHTGRPNLHTMYWKAIFSDENLKYPRIKLNGQAELFYRPKSKMEVVRHRVGEKLVNKKMKDGRTPVPELIYEEVYKYVNGKLKGNLSSEAQALLPDIEIRDVKHEIIKDRRYARDQFFFHVPITLNFQSERKVQKFNDQVTDYLKDHPETPVIGIDRGERNLLYLVVIDGNGKILEQRSLNLINGYDYHEKLADRERERTKARQSWTTIGKIKDLKQGYLSQAIHEITCLMVKYHAIVVLENLNFGFMSKRTGIAEKAVYQQFEKMLIDKLNCLVLKEAELDEPGSVLNPYQLTDQFSSFAKMGNQSGFLFYVPAAYTSKIDPMTGFVDPFSWKAIKTDADRREFLEGFSSLCYDAGKDRFILHMEMKNNQKYQRKLTGFMPDWDIVFESNVERQNPSGESYRAGKRIIAEFANHRRTGQYKEVYPCTELKQILSENDISYNHQEDLLQQVLNKKDPKLNRLLVELIREVFQMRNSCAAANGHDEEDYISSPVAAVNDQCFDSREGLKEMPVDADANGAYHIAMKGKLLLERLRDTDNKKSKNKKMQISNNDWLQYIQQMRN

SEQ ID NO: 1104 - protein, 1312 aa, unidentified
  REGION 1..1312: note = Cas Enzyme sequence
LSKTLRFELKPVGNTLQMLEDENVFEKDRVRKEKYKQTKSFFDRLHRQFIIESLTGKTIDGLDKYFTLLKKLEKDKKDKALQKEFKTLSEELRTQLNNHFQTEALFGVSVFEELKKRYGKEEGSFLKDKKDELVLDEEGNKISIFDEWKGFTGYFDKFQETRKNFYKDDGTSTAVVTRIIDQNLKRFCENTQLFKDIKYKIDFSEVEKTLSVDLGVVFSLEYYNSCLLQDGIDTYNKILGGEVVKDTNEKLKGLNEIINKYRQDHKDEKISFFKLLDKQILSEKEDFIENIEDDKELLQRLREFYISAEEKTEVLKTLLGDFFLHEEEYELDKVFLSKEGLNTILHRWMTDNGRDEFQKVIYEQTKKDKIVKFEKSDNSYRFPDFIALSLIKNALAKSFEEEKLWKDKYLKNEEDSKSKGFLSGEEPKWEQFIKIFESEFNSLFENEYQELIGGEERQVKKGYNVYKKDFEEIINRNESDFSVSSEDKLTIKNFVDSTLWIYQMGKYFALEKKRQWVGDEYDIDTKFYHHPDFGFKKKFYDDAYGKLIKVRMLLQSYLTKKPFSTDKWKLTFENPTLADGWDKNKEPDNSAVILRKDGRYYLAVMQKGHNKVFDDGNIQASGTDSYEKMVYKSISDPVKDIPNLMVIDGRTVRKTGRKDKKTGINHRLEELKDEHLPKEISDIRKSSSYLKTSENFNQEDSQKYLAFYMQRLIEYKKGEFDFEFKKPEEYGSYAEFLDDVGNQGYKIDFVGVSSEYIKNKNTSGELFLFEIHNKDWGSGPKDKNRKRTKNLHSMYFDTLFSKENAESNFPFKLNGEAELFYRPKTDEEKLGYKVKNTKTGKWKNIVVKKSESVPEEAVVDHKRYLKNKTFLHVPITLNRTADDSHYFNQKVNEFLLNNPEINVIGLDRGEKHLIYYAGIDQKCNLLKDKNGNTALGSLNEINGVNYHKLLEERAKGREKARQDWQNIENIKDLKKGYISLVVRKLADLIIEHNAIIVFEDLNMRFKQIRGGIEKSVYQQLEKVLIKKLNFLVNKGEKDPQKAGHLLRAFQLTAPFITFKDMGKQTGVIFYTQASYTSKTCPECGFRPNVKWDQDGLMEKINITFTENNFKIAYKASDFLKQKNSSKRGNRLYADKKGKDEFILSTKNAIRYKWFSRNKKDFELKKGEERMLEQTENGITIKYDITECLKGLLEEQDIDYKNNIVKQISEKVATKKFFTELAYYLYLLSNTRSSVSGTNIDQINCPHCGFHSDKKFNGVDFNGDANGAYNIARKGVMILEKINQYHNVNKTLDKMNWGDLFIDIEEWDKHTQD

SEQ ID NO: 1105 - protein, 1312 aa, unidentified
  REGION 1..1312: note = Cas Enzyme sequence
MISEKPEKNFSQFINKYSLSKTLRFELRPIGNTERMLIDSGVVEIDKQRKEAYIKTKPFFDKLHQEFITESLSGVKLLTLEGYFDLFDNWRKAKDKNEKKKTLEKLEKKEKEIRNEIVKLFDKKSADWIENLPQDLKPKKINHEFLFEKGIFAIAKEKYKEDDEILTEDGRTIFDSWDKWGAYFGKFFETRKNFYKDDGTATAVATRVVNDNLRRFCENLSLFERIVKIVNLSSIENDFKIDLDEFFSFSQYNNILNQEGITFYNSLIGGETREDGKKIKGINELVNEFRQKTKEKIPRLKKLDKQIGSEREIFIDTIESDEDLLTRLSEFVETAIEKNKILDESIDYLLSGEGDLSKIYFRKEALNTITRRWFVSYEKIAEALVLVINDKNVKFDKTKEEYKFPDFVNWQVIKEAVEKIKTNEEEVIWKSYYTENEQLDLNSKNHWQQFLVIFEFEYKNLKESGHEKDGESFEELSLKLKEMLKEGKRETETIKRFSDRVLNLYRFAKYFSLDKSRRWNPDGLETDDFYVKYEEFYSDSFEQTVKTYDKIRNYMTKKPFNQEKWKLNFDNPTLADGWDKNKETDNTAVILRKNGRYYLGIMEKKNNRLFDKLESRQEEGGYEKMVYKLFPDPAKMMPKVCFSKKGIETFKPSEEILRIYKNSEFKKGETFSIDSMQKLIDFYKRALEKYEGWTLYDFKNVKNTNEYTENIGQFYRDVAEDGYFIVFENISEEYIEKANQDGKLYLFEIHNKDWNLKDGAKKTGTKNIHTLYFEQVFSKENADNNFIIKLNGEAELFFRSKTDKKDLGEKLIKGEKRINHFRYSKDKMFFHVPITLNRTAPEAKKFNQSINEFLANNKNINIIGIDRGEKHLAYLSVINQKGEILEIKSLNKITIRDDKNEVVREIDYASLLEERAKNREQARKDWQSVEQIKDLKKGYISHVVREVADLIIKYNAIVVFEDLNMRFKQVRGGIEKSVYQQLEKALIDKLNYLVSKEEIDSKKAGHILHAYQLTEKFDSFQKMGKQTGVLFYTQAEYTSQTDPVTGFRKNLYISNSSVIEKIKSFIKNFKAIGFDKELQSYFFIYNATDFIVDSKIKKTSYEKEWTVYADVPRIKREKQASGHWETKIVNPNDEFKNLFEKWEFENIEAEDIKDLIFQMESDKRLEGTREFDGRKRNFWQSFIYLFNLVMQVRNSTSTQFKKDEEGKVIEVVEGVDFISSPVKPFFCTDAGKFTKGYTNMAGMESKFIGDKDLKDKFVEEFNGDANGAYNIARKGIIILNRLNEYYSLPEEKRPKYPDIFISRDDWDRFSQL

SEQ ID NO: 1106 - protein, 1312 aa, unidentified
  REGION 1..1312: note = Cas Enzyme sequence
MAENRCVLDNLTNMYSLSKTLRFELKPIGKTLEYIEKKRLISEDEKRAESYKKMKKIIDGYHKHFIEIAMSQVELTKLEEFAELYNASPERKKEDDFKTKFKKVQKDLREEVVAGFKNAKEEVHSSKNDKKDTKDKEEVEKSEKSDSSKNDKKDTKGKTFFEKLFMKQLFTELLDDWVKNPEDKKLVDEFKTFTTYFRGFFENRKNLYTNKEQSTAIAYRLIHENLPKFLDNIKTFEKIKSIPELYNKCDILYGEIKEYLGITCIDDVFELDYYNNILTQKQIDVYNLIIGGRVTEKGQNKIQGLNEYINLYNQKQDKKDKIPKLKQLYKQILSDKKSASFLPEAFEESQEVLDSIRDYYQSNLIDFKPDDKEDTENVLKEIRDLLAHLKNYDFNKVYIRNDQSLTNISKKLFDDWGIIKSALEFAFLQTLKIGKKGLSKKQEKEKKNYQDQSYFSIAEIESALLAYKDETEILKYLKEDTNPVANYFHTYFKATKKDAEKEFDLIANIEAKYSCIKGILNTEYPKDKRLYQDKKLIDDIKAFLDSLMELLHFVKPLSLPSDSPLEKDELFYGQFQIWYDQLQLLIPLYNKVRNYATQKPYSTKKFKLNFENVQLLGGWDANKESDNTSVLFRKNRLYYLGIMDKKHNKIFKNIPDASPGELVYEKMVYKLLPGAKKMLPKVFFSTSRIKEFAPSEELQKKYHAGTHKKGEEFNINDCHNLIDFFKESIAKHEDWKNFEFKFSDTSSYENMAEFYREVEHQGYKITFQNISEDYINQLINEGKLYLFQIWNKDFSTHSNGKPNLHTMYWKALFDPKNLKDVVYKLNGQAEIFYRRRSISKERRIIHKANEPIENKNPNNPNKNSVFEYDIIKDKRFTVDKFKFHVPITLNFKASGKENINEEVYKYLKNNPNVNIIGIDRGERNLIYVSLINQKGEILEQFSLNDIITSYKNWENKDVEVKTQYHALLDKREGERAKARENWGTIETIKELKEGYISQVIHKIAQMMVKHNAIVVMEDLNFGFKRGRFKVEKQIYQKLEKKLIDKLNYLVFKDKTDNEIGGLYHALQLTNKFVSFQKLGKQSGFLFYVPAWNTSKIDPTTGFVNLFNTRYENLEKAKTFFETFEDIRYNTTKDYFEFEVKEYSKFNSKADDTRQDWIICTYGERIKTFRNPDKNNQWDNKEIILSEEFKKLFESHHIDYKTNLKAQIISQENKKFFEELLHLFKLTVQLRNSITKSEVDYLISPVMNSTGQFYDSRKAGKKLPKDADANGAYHIAKKGLWILQQINVHNEDRKKPNLAIKNKEWLQFVQSNR

SEQ ID NO: 1107 - protein, 1312 aa, unidentified
  REGION 1..1312: note = Cas Enzyme sequence
MKHHHALFAPISDSSGSAEAAPKSIRDFTGLFAVSETLQFELRPLDADFKPKSPELALADMDKYLEKDRERAGQYSNLKLILDEEHKKLIERVFSDVSASIRRLPASASGRKLLNDAGTGICWSKLAEAERQESFEKVQESFRKLIAELLNTDEKKKSLLEATPSKYIKGMLSSPDLSDSDRKTLSAFEKFACYLKGFQENRANLYSDEAKITAISNRIVNQNFPKFLIGCQIMKHIGEQYPEIIQSAERNLASILHGLSLKDVFRPDAFDRCLSQSGIDAYNNLLGGFTADGGAQKIQGINETINLYRQQHPDVVKKDKLFAPLPSLFKQILSERSSISYIPEMFDSDHAVCETIRTFLAEADLAKALQSITDLLSSIAPDDSGVFVAANELNWISNKVFGAWNMIERALDNYAETLKTKKEQEKWLKKKYYSLAELGALDFRAITTEDAAIPAVADFWRGQVFGQTAATLTNAVAEVQSVLNSPAYLPGNRDPLMRENADDVKRIKALFDSLLDLLHFLKPLRVDAPDANQVFYTGFNAVYDRLDTVVPLYNRVRNYLTRKPSEMKKTKLMFDCATLADGWDRNKESSNNAVLLLKDGNYYLAIIQPAKSRTDRKVDFASLESDRQGDCFRKMVYKYLPGPNKMLPKVIFSDRNRDLFAPSAELKRKYDAKMHTKGDNFDLGFCHELIDYFKACIAKHEDWSKFGFKFSDTAKYRGIDEFYNEISAQGYKMSFTPIPASSISDLIRQDKILLFQIYNKDFAPGATGRPNKFTLYWKQLFDEKNLNDVVFKLNGEAELFLRDPSIRKPFRHRKGEKLVNRTQKDGTPIPESVHRELCKLANGQLNESALSPEARSIWLSGQALVKTATHDIVKDRRFTVPKILFHVPITINFKSPDGKYGINQRVNDYLRGNSDVKIIGIDRGERNLIYITLVDQSGRILLQKSFNTIPQKRPDKTIELDYHAKLDLREKERDEARKNWTEINRIKDMKAGYLSQVVHEIARLMVEHNAIVVMEDLNAGFKRGRTAFEKQVYQNFERALITKLNYLVFKDAEESAPGFVRKGLQLANFFDSFEKLGKQSGFLFYVPPSYTSGIDPATGFVSLFQFGKYTNAAARKQFFESFESIRFDAGRNAFTFEFDYSKFPVPKNSEPSKVRRWTVFSVGDRIVHRMKDAQTVKPTAVILGELQKRGIQVTDGFDLLEYIRGTDADSRNASFFNAIFDAFRWTVQLRNSDKENDYILSPVLSPDGTFFDSRKATDGMPKDADANGAYHIAMKGLYLLQNRFPATDSKKIDLFISNRDWLDFMQTRSRAN

SEQ ID NO: 1108 - protein, 1313 aa, unidentified
  REGION 1..1313: note = Cas Enzyme sequence
MSKLHFATLLTGAIMGVVRIDDKLKKLFWDLYSLRKTLRFELKPQGKTLEHIENKGLISQDEQRAESYKKMKKTINGFHKHFIEIAMSQVKLTKLNEFADLYNASPERKKEDGFKKAFEKIQADLRKDIAKAFNVGEAKEIFSKIDKKELVTELLEKWIRTQEEDLYFDERFKTFTTYFGGFHENRKNMYSDKEQSTAIAYRLIHENLPKFLDNIKVFERIKEISELYKNFPALYKEIKEYLDIEQIDEAFELYYYNKILTQKQIDAYNLIIGGMTAQEGKKKIQGLNEYINLYNQKQDKKDRIPTLKQLYKQILSDKESVSFLPDEFEDDAEETASQKVLNAIEEYYQANLVSFHPSGKDEAENVLEKIKELLTSLKDYDLNKIYLRNDKAITDISKTLFGDWNIIKAALEFAFLQTLETGKKGLSKKQEKEKEKYLEQSYFSIAEIEKALFAYKNEAEVLKDLKENTTPIADYFHTHFLAKKKEESDKEFDMIANIQAKYSCIKGILNTDYPKENRLHQDKKTIGDIKAFLDSLMELLHFVKQISLPSDTPLEKDEIFYSQFQPWYDQLQLLIPLYNKVRNYASQKPYSIEKFKLNFQSSTLAQGWDLNKEHNKNYSLIFKENDSFFLGIINIDDDKDVLRKDKRPEIFVDDSPLKKMVYKDLGDIKRQLPRIAFSDKAKKDVEDIGWNQNIEAIKKEFDKFQDAKKNDKDLWKNEFDRNKLSELIDYYKGVLKNHSERYEDTYKLEYKSTESYKNLGEFFDHIASQTYKVTFVGIDKNYINQLVDQGKLYLFQIYNKDFSKYSKGKPNLHTLYWKALFDPENLKNVMYKLNGGAELFYRKKSIKDLTIHKSNEPIKNKNPNNPKKESFFEYDIVKDRRYSVDKFQFHVPITLNFKATEKKYINNTVLGFLKDNPDVNIIGIDRGERHLLYLTLIDQKGKILEQRSLNTIVNNRVNIKTDYHKLLHNREKERDKARKDWGTIETIKELKDGYISIIVHEISRMMVEHNAIVVMEDLNFGFKRGRFKVEKQIYQKFEKKLIDKLNYLVFKDKANNETGGLYKALQLTSKFESFTKLGKQSGFLFYVPAWNTSKIDPTTGFVNLFNTRYENVDKAKTFFNNFENIRYNTDKDNFEFEVKKYSLFNSKVDDTIQDWVICTHGERIKTFRNSEKNNQWDNKEIVLTEEFKNLFKEYNINYKRDLKNQINSQTNKDFFEQLLNLFKYTVQMRNSITNSETDYLISPVINSEGKFYDSRNAGDELPKDADANGAYHIAKKGLWVLQQINAHEGEDWKKLKLAISNKEWLQFVQARAK

SEQ ID NO: 1109 - protein, 1313 aa, unidentified
  REGION 1..1313: note = Cas Enzyme sequence
MFVWFFGTKIRKIFLVYRELEQVRLYLCGGNDSKWMNLTLCDMKSYSDFTGLYLLSKTLRFELKPIGKTKENIERNGILERDNQRAVGYKAIKKVIDEYHKTFIEQMFDSFELKLEDEGRMNSLEEFYFLYHLPITDTKRKDNLSKVQEALRKQISERFTKSEQYKRLFGKELIREDLAEFVKTPKYEEIIRSQQGNENLTEEEIRKIQEEVEKTIDQFYDFTTYFVGFYDNRKNMYVADDKATSIAHRMIGENLPKFIDNMDVFEKIAASDVATHFEALYKAMEPYLNVNSISEMFQLGYFSMVLTQKQIDVYNAIIGGMVLDDGAKIQGLNEYVNLYNQQQKDKSNRLPKLKPLFKQILSECNAISWLPDEFESDNNMLESIEKCYQDLKNQVFEGENSLKNLLKNIGEYDLEHIYLPDDLQLTDIAQKHYGNWSMIKKALEEDVKAKNPQKRNETVEKYEERIEKLLKANECYSLAQINRLMKVYLGDEYKPIETYFAALGAEDNENGQKPNLSIRIENAHTEASNLLISTYPVDRKLSQDKANVERIKNLLDAIKDLQHFVKPLLGKGTESEKDNRFYGEFVPLWERLDQITPLYNMVRNRMTQKPYSEEKIKINFDNSTLLAGWDLNKEADNTCIILRKDGNYYLAIMDKRNNKVFETKNLVSEGDCYEKMEYKLLPGANKMLPKVFFSKSRMDEFKPSAQLLRNYERGTHKKGDNFSLDDCHALIDFFKESIEKHEDWSKFGFKFSDTKTYEDLSGFYREVEQQGYKISFRNVSVEYINRLVDEGKIYLFQIYNKDFSTYSKGTPNLHTLYWKMLFDERNLADVVYKLNGEAEVFFRKHSIEAEKPTHLANKPIENKNKLNEKKTSVFEYDLVKDRRYTVDKFQFHVPITMNFKAAGLNNINPLVNVYLKESNVTHIIGIDRGERHLLYLSLIDLQGNIVEQYSLNEIVNEYKGNTYRTNYHDLLDAKERQRDEARRSWQTIENIKELKEGYMSQVIHKIAELMVKYNAIVVLEDLNFGFMRGRQKVEKQVYQKFEKMLIDKLNYLVDKKCEADEMGGVFNAYQLTNKFESFQKLGKQSGFLFYIPAWNTSKMDPTTGFVNLLDTRYENMAKAKAFFGKFRSIRYNAAKGWFEFAFDNDDFNTKATGTRTQWTLCTYGTRIETKRDPKQNSNFVSEEFDLASRFKDLFDQYDIDLKGNLMEQICSQNDAAFFKELLHLLHLTLQMRNSITGTEVDYLISPVMNDNGEFYDSRKCGKNLPLNADANGAYNIARKGLWIIEQIKQTEDLSKLKLAISNKEWMRYAQGLE

SEQ ID NO: 1110 - protein, 1313 aa, unidentified
  REGION 1..1313: note = Cas Enzyme sequence
MNKGGYVIMEKMTEKNRWENQFRITKTIKEEIIPTGYTKVNLQRVNMLKREMERNEDLKKMKEICDEYYRNMIDVSLRLEQVRTLGWESLIHKYRMLNKDEKEIKALEKEQEDLRKKISKGFGEKKAWTGEQFIKKILPQYLMDHYTGEELEEKLRIVKKFKGCTMFLSTFFKNRENIFTDKPIHTAVGHRITSENAMLFAANINTYEKMESNVTLEIERLQREFWRRGINISEIFTDAYYVNVLTQKQIEAYNKICGDINQHMNEYCQKQKLKFSEFRMRELKKQILAVVGEHFEIPEKIESTKEVYRELNEYYESLKELHGQFEELKSVQLKYSQIYVQKKGYDRISRYIGGQWDLIQECMKKDCASGMKGTKKNHDAKIEEEVAKVKYQSIEHIQKLVCTYEEDRGHKVTDYVDEFIVSVCDLLGADHIITRDGERIELPLQYEPGTDLLKNDTINQRRLSDIKTILDWHMDMLEWLKTFLVNDLVIKDEEFYMAIEELNERMQCVISVYNRIRNYVTQKGYEPEKIRICFDKGTILTGWTTGDNYQYSGFLLMRNDKYYLGIINTNEKSVRKILDGNEECKDENDYIRVGYHLINDASKQLPRIFVMPKAGKKSEILMKDEQCDYIWDGYCHNKHNESKEFMRELIDYYKRSIMNYDKWEGYCFKFSSTESYDNMQDFYKEVREQSYNISFSYINENVLEQLDKDGKIYLFQVYNKDFAAGSTGTPNLHTMYLQNLFSSQNLELKRLRLGGNAELFYRPGTEKDVTHRKGSILVDRTYVREEKDGIEVRDTVPEKEYLEIYRYLNGKQKGDLSESAKQWLDKVHYREAPCDIIKDKRYAQEKYFLHFSVEINPNAEGQTALNDNVRRWLSEEEDIHVIGIDRGERNLIYVSLMDGKGRIKDQKSYNIVNSGNKEPVDYLAKLKVREKERDEARRNWKAIGKIKDIKTGYLSYVVHEIVEMAVREKAIIVMEDLNYGFKRGRFKVERQVYQKFEEMLINKLNYVVDKQLSVDEPGGLLRGYQLAFIPKDKKSSMRQNGIVFYVPAGYTSKIDPTTGFVNIFKFPQFGKGDDDGNGKDYDKIRAFFGKFDEIRYECDEKVTADNTREVKERYRFDFDYSKFETHLVHMKKTKWTVYAEGERIKRKKVGNYWTSEVISDIALRMSNTLNIAGIEYKDGHNLVNEICALRGKQAGIILNELLEIVRLTVQLRNSTTEGDVDERDEIISPVLNEKYGCFYHSTEYKQQNGDVLPKDADANGAYCIGLKGIYEIRQIKNKWKEDMTKGEGKALNEGMRISHDQWFEFIQNMNKGE

SEQ ID NO: 1111 - protein, 1314 aa, unidentified
  REGION 1..1314: note = Cas Enzyme sequence
MDELKDFKGFYPLLKTLRFELKPVELNEKDTTVLDNIKKSGIFKVEEDTYSLQERQKSDVIKSESYKKVKKIIDDYHRQFISKSLATFSLDEDYLKKYVSLFKNNSKSEKENKEFGTIKSKLREQISNTFDTTHLFNKEFFNKELIQFVNNDKAKEDLIKEFEGFTTYFTGFNDNRKNMYSAEDKASSIAHRIINDNLPKFLNNISSYDTINEIIQKDIQQIEENFKEELNGKKLDDVFKIENYSNCLTQKDITTYNTLIGGKSEGDKKIKGLKEYVNSYNQKNGTKLPKFIALYKQILSSKDSLSWLPEIFEDDAQCIGAIKKVYNDINEKVINTPKDKISIKSLLSNLTDYSSTGIFVQNEAKKELLTSILQSYYGDWAILTKALEIEYLEAHPRKGQKIETYNKNRDTYVKSFKSFSLQRINDLIGEDKPKIEDYFKSCGYKEETISCNKEKDLEKQEQEIIDTFKDDRNIILCTSDIKQEGDNLIVKTPNIFEQIERKYLLVKDILNADYQHSNKALIQDTQSIEKIKLFLDSIKKLQWFIKPLSGCEEEAKRDNNFYSDFDDIWEDLNEITPLYNSVRNYLTQKPYSEEKIKLNFQDSTLLGGWDVNKEPKNLGILLIKDGLYYLAIINKDTKKVFENKHFDSTKKCYQKIDYKQIADAGKDIQNIIRIGDDKYQRFTKNLDALKKKYIPEIYAIKQAESYLQDKSMSTIKTFSSDDLKTFITYYKEAAKQYWTWCNFSFSDEYQNWKSFTDDVNMQGYKITFRDIEEDYINQLVKEGKIYLFQIYNKDFSLYSKGTPNMHTLYWKALFDENNLKDVIYKLNGQAEVFFRKKSFTWNDEVMKNGHHAKELKGKFTYPIIKDKRYTEDKFLFHVPITMNFKAVGTNNINSKVNEFIKDNGIKHIIGIDRGERNLLYLTLIDLQGNIVRQFSLNTITNVYMNKDGKEEEKSFNYHNKLDNIEKDRQEARKNWQTIENIKELKEGYLSQVIHKITQMMIEYKAIVVLEDLNSIFMRGRQKVEKSVYQKFEKMLIDKLNYLVDKKKDPNEEGGLLNAYQLTNKFESFEKMSKQNGFLFYIPAWKTSKIDPVTGFTNYIYTKYENEEKAKELLSKFADILYNEEEKYFEFVISDYTKFNPKADETRKEWTICTYGKRIKTFRNKAKNNQWDNETINLTEALKTLFNSANIDYKTNLKDSILNQGEKAFFEELLNLLKLTLQMRNSNPNTDEDYILSPVADSNGVFFDSREHKGETASLPQDADANGAYNIARKGLWAVRQIQNADDGSKVSLAMSNKKWLNFVQNKEYLDDKDK

SEQ ID NO: 1112 - protein, 1314 aa, unidentified
  REGION 1..1314: note = Cas Enzyme sequence
MKNLKQFTNLYPVSKTLRFELKPELLKGQTIDDFWRSYLDDSKKDSFYNKDKKRNDDYPIVKLILDQFHKNFISLSLGSFLPNSAPKCPTWDDLFDAYCKDRKSKDFVNLQDKMRENISNHFKKHEWWQYISSYSKLIGTLLKQLVNNDDDFIESIQERDTSLTRERMLEALDTFNRFSVYFGNYAENRSNMYKKEAQGTSIANRIVNENLPKFFDNIFVYRKLKAICPTELESIQDNLKDTLNGVSLDEIFTPSYFNECLTQEGIEKYNWILGGNPNEGILGINSVGNQYLQHHPESKLKLKDLLLTQLYKQILSDRDQPSFLPQQYKSEEELMDSVYSFLSGIEEQGLLDSVKRIMETLNEDDTDLSKVYVLGSNLTKLSHLLYGNWNLLGERLREKLVTSNTKKAQQERDKEIEKWLDNKCFSLLQIKEVENELLEQTQHPLSTEELFTALNIWKKESETGLWKKVSLIEQCKTAYIVQFATLRKNLTVGKSISADKSKQILKEVLDKYMELYHIIELLRLGNKSAYLEKDSFYVDYERLFESSDEDTLSLSYIIPLYNKVRSFLTRKLSNEGKMLLKFDSPTRANGWQDCSIVLKDNKYYLLLYLDKLDGEELIKLYSGNSAKIVSYQQQKTDYKNAPRIFINSKGSNRAPAVSEYKLPIEMVEAMYKERKTLFSKAEKEAFCKKYPDYDERLIDYYKIGLLRHKDFEPFRNSFQSNWMMSSDYKSVQDFFEHTQEMCYILTFETINFEYLYQLQANRKLFLFEIHNKDFHKEAKGTPNLHTLYWKELFSNRNLKDVIFKLSSQGIQLFYRAALQNKTKFLHKKGSILVNKTFSDGTPISNEMYQHFVDHYNGKGIKLTEEEDRLLNQVKTNKAKVDIIKDKRYYEHKFYIHVPITINFKSSSTTQQQFNGRTLDIFRQNKDKINIIGIDRGERNLIYVSVINQRGENLIPPKHFNLIETKTYEEVTRKYNYLEKLKQTEQNRDEARKNWTTIEKIKDLKSGYLSQVVHEIAKMVVKYNAIVVLEDLNFGFKRGRFNVERQVYQNFEKMLIQKLNYLTFKTDAPSQDYGNVWNGLQLTAPFTSFKDLGKQSGWLFYVPAGYTSKIDPKTGFANLFNMNKPADDYKTFFGSFIDIWYKNDMFYFKFDYSNKKFNTVRTDYTNVWTLSTHGERIIREKEGLIEVNLTQKFKDFFSGDKVNIPLSEVSIERLKQLDETKLKELFGLFKLLLKMRNSNNQEDYIISPVAGEKPFKTGSNNDMGLTDADANGAYNIALKGLYLVHMNFPMEDKFLKYIKDTDWFEFIQTKPYLRD

SEQ ID NO: 1113 - protein, 1314 aa, unidentified
  REGION 1..1314: note = Cas Enzyme sequence
VNKKTNSFEEFTNLYSLSKTLRFELKPVGNTQQMLKDAKIFETDETIQKKYEATKPFFDRLHREFVKEALQDTDLVGFDEYLGIFRKWKIDKKAVEKDLQKKEGELRKSVVDLFNKKAEAWSFKYKGLKNKNLKIFDEEAVFESVLKMRYGDEKKIKILSDATGEMVSIFDSWKGFTGYFRKFFETRRNFYKEDGTSTAIATRIVDQNLRRFCDNILNFEKIKNKINLTEVEENTKESLSEVFTPEFYSKCLLQDGIDYYNKILGGDPKDQDKRGLNQLINEYRQQKGDKLQLLKSLDKQILSEKEKILKDEIKNNQELLDVLKSFYETANKKIKIFEILFRDFIDNNTNYNLEEVYISREAYNTISHKWTNETEVFDNNLFEALKNEKIVSGTNTKRKDTGYSFPDFITLGNIKKTLDLIKIEKFWKEKYYEISDFGEKHMWEQFLSIFDFEFASLLEKEIIEPESGKKLKVGYKCFSRDFERLLQGIDVDRISSGNKVAIKNFADSVLTIYQMAKYFAIEKKKKWLGDDYNLGEFYQNPEFGYKEKFYNGTYEDIVLVYDKLRNYLTKKPYSEKKWKLNFGNPTLADGWDKNKEKDNFAVILRQDNKYYLGLMTKENSKAFDDCFIEEFRSGLKNGKYEKMVYKYFPDQAKMFPKVCFSAKGLDYFKPSEEIRSIYKNSEFKKGNSFSIKSMHKMIDFYKDCLTRYEGWKGYHFKHIKPTEEYQKNIGEFFRDVAKDGYKITFQDISESYINKKNMTGKLYLFQIKNKDWNCGAKKVKNLHTLYFESLFSKENIAQNFLVKLNGQAEIFYRPRTKDLEKKDIVTKGKGNVIDECNHKEGRAYQKNRFTDDKIFFHVPVTLNRVSKNTNQYQFNSEINSIINGNSNINIIGVDRGEKHLAYYSVINQKGEILDSGSLNFVGKDGSGKPIDYHKKLGEKAKNREQSRRDWQEIEAIKDLKKGYISQVVRKLADLIIKYNAIIVFEDLNMRFKQIRGGIEKSTYQQLEKALIGKLNYLVKKDEKDPEEIGHPLKAYQLSAPFTSFKEMGKQTGIIFYTQANYTSKIDPVTGWRPNLYLKYKNAGQAKKDIIKFSKIEFCNGRFEFTYDLRSFLTENDKPKFSRKAEWKVCSNVERFYWNRKLNNNKGGYKRYKDLTGEFEKLFEKFDIDVKKNILDQIIRIDTEGNETFFNDFIFLFKLVCQIRNTDEKARDVDKQDFILSPVKPFFDSRKSDKFGKNFPKNGDANGAYNIARKGIIMNEHIKQWKKDGSKKYKQGSDLDLLISDQEWDLWLCDRVEWNKKLRYFASRGAKEKSS

SEQ ID NO: 1114 - protein, 1315 aa, unidentified
  REGION 1..1315: note = Cas Enzyme sequence
METKKSIFDEFTNLYSLRKTLRFELIPQGRTLEYINKKGLISKDEQLAQSYQRMKKTIDGFHKYFIDLALSKTKLTRLKEFEELYSADAEKKKEESFKKEFGKVKEILRKEIVSSFESGEAGKTFSKLTKADLLKGKNKNSDETEDGDGSDENTGNKHTELKGLIEEWMEKQPNKDEIYFDKEFKKFTTYFSGFHTNRKNMYSDEDNSTAIAYRLIHENLPKFIDNIRTFGIIKNKIGLYEDCNKLHNELSKYLNIENIDEVFKLDHYNTVLTQKQIDGYNLIISGISVKEGKKIQGLNEYINLYNQKQTDKKNKVPKIKLLYKQILSDKESVSFLPDNFEDDSNRTASQKVLDAINEYYHSNIITFQQIGASHPENVLIKLKELLQELKEYDLNKIYIKNDSNLTLISNKLFGNRNVFDLALNYYYEFVERPNFNNEYQKAKESKREKLNKDKEKFVKASNVSFLLLQSALNEYVQRLDSSHEIKKKYSDSCITNWFIDYFKTESKDCVEKELIKNVEEKYNAIKGILNIKYPSDKKLYQEKDNISVIKTFLDSLMEFLHFVKPIVLDKDSSLEKDNSFYAQFDLYYEELNKIIPLYNKVRNYATQKSYNVGKIKLNFENGTLAAGWDKNKETDNTTVIFRKDSLYYLGILDVNNKQVFKKQFLKSNGESVFEKMEYKLLPGANKMLPKVFFSKKNLKKFNPTKDLLIKYKNGIHKKGDNFNLDFCHELIDFFKKSISIHNDWKHFNHKFSPTFEYKDISDFYREVEQQGYKITFQNIPEAYISSLVSEGKLYLFQIYNKDFSQNKKAKGTDNLHTLYWKALFDEGNLKNVVYKLNGEAELFYRKRSLNYSEEIMKKGHHSEMLKNKFNYPIISNKRFASDKFQFHVPITLNFKSSGFKNINLSVLNFLKNNPKINIIGIDRGERHLIYITIIDQEGNIKLQKSFNELFYNVKGESQSRKVDYREKLDKREDERKEAREKWGVIESIKELKQGYLSIVVHEIVKLMVKYNAILVMEDLNFGFKRGRFKIEKQVYQKLEKALIDKLNYLVFKDNDAFEFGGIYKALQLTSRFESFKKLGKQSGFLFYVPAWNTSKIDPNTGFVNLFKTTYESIEKAKEFFNSFDAIRFNKTNRYFEFVVEDYTKFNIKAEGTRNNWIICTKGDRIHIFKNKDKKDNWDSKIVNLTDRFKSIFKEQNIPFMDEENLIEEIISKDDISFFKNLLDLFRQTLQMRNSIPHKEMDYLVSPIADRNGKFYDSREATDEEPKNADANGAYNIARKGIILLNKIKDLENLKKPNLTISEKEWLKFAQKIGVK

SEQ ID NO: 1115 - protein, 1315 aa, unidentified
  REGION 1..1315: note = Cas Enzyme sequence
MNVTLFFYKYHKQIIHNFIKMKGAKMGYENFINKNSCVKTLVNELRPTEWTRKHIEEDGILSADELRAEESDKLKSIMDDYYRRYIYTKLFGVSSLDWDELFSIMEVAYKSGKKDKNCKAQLEKVQEEMRGKFYNVLSDDDIFKMMFSGKFVTKVLPEFVRNNKEYSAEEKQQKLDTLKLFKGFTTSLVPFFNNRENIFSKKPIHSSICHRTVDENTAIFYQNIISYKNIEDNAPQEIEKIEHQGRQQLDEWKLPDIYSYSFYNNVLTQHGIEFYNDICGIVNSHMNLYCQQTKEKSGQYRMRKLYKQILSISSTSYEVPYKYEDDAQVYSSINEFVDRIFNSNFNAKVEKMLEKAEEYDFDKIYIASKNYSSISNFISGKWNTLEDCIRRYYEDNTVGNGDKKEKKVEEKVKKDSFRSLDSIDKVVEMYEKGGKSAKEYIYQIREIYSDNKLYKFGQDGSDSVKLIENDAKIERIKCVLDMLLNTNRFLDTFTVEDGEAVDVGFYSEIDELKEIIDGIDPLYNRVRNYVTRKPYNKNKIKLNFNSPTLAEGWSKSKEYEDNAIILRRDGKYYLGIFNVKNKPDKKIMEGYSGDVGDGYEKMVYSLLPGAGKMLPKVFLSKKGIGNYKPSSYIIDGYDNDRHIKSSKNFDINFCHDLIDYFKSSISANPDWKVFDFKFSDTKSYEDISGFYSEVEKQGYKISWVNISKEDIDRLDETGQIYLFQIYNKDFSESSMGTPNLHTLYFKNLFSEENIRETVLKLSGKGELFFRKASIDKPSGHRKGSILVNKTYKTNIGNEEVRVPIPDKEYMEIYTYLNNGRTTKLSENAQSLLDNKLVEYFEAEKEIVKDRRYTVDKFFIHTSVVINYNAEGASAKQLNEQVLDYISKQDDMHIIGIDRGERNLVYVSVIDMKGRIVEQKSYNVVNSYSYQKKLVEREKARDEARKSWKEVGRIKDLKDGYLSLVVHEIADMVIKYNAIIAMEDLNYGFKRGRFKIERQVYQKFESMLISKLSYLVDKTKKADEPGGVLKGYQLAFVPKDVKKVGRQCGIIFYVPPAYTSKIDPATGFVDLFKFKSGEKEGTARADNDRKEFLSKFDDIRYVEKNDNREEMFAFTFDYDNFAMHNTVIAKKKWTAYTFGSRIQKVYENGRYTSNTREIELSDKMKRLLNENNIEYGDGHNLVDDIRTLDVDSSGAVINEIFKIFRLTVQLRNSKSEAENEKNGEYDRIISPIMNDAGEFFDSFKYKKMNEETEPGKHNATMPIDADANGAYCIAMKCLYEAKNIKSGWEKEGKKNNDLLCVTNADWFDFMQNKRYV

SEQ ID NO: 1116 - protein, 1316 aa, unidentified
  REGION 1..1316: note = Cas Enzyme sequence
MNVKKSPTTFAEFTNQYSLSKTLRFELKPVGNTQKMLEDFGIIEKDEIIAQKYKITKKYFDKLHRTFVEEALFGKKIEGLDNYFELYRNWKKDKKANQKDLQNKETELRKNIVTLFNKMAKTWSQKETFKGLKNNNIEILFEEAVFKSVLKVLYGDEDESFLRDKVSGEFLLDKDGNKISVFDSWKGFTGYFTKFNETRKNFYKDDGTATAHATRIIDQNLKRFCENIIIFESIKDKLDLSEVENVFDISLVDIFSVTNYGDCFLQAGIDSYNTVLGGETLPNGEKKKGLNELINLYKQQTREKLPFFKSLDKQILSEKDKFTDEIEDAGALKEVLTVFLKNVDVKIQKFSLLITDVLNNPDAYDLSQIYLAKEALNTISRRWLVSFSTFEDALYTVLKNAKIISSSAKKTEGGYSFPEFIPLSYLKEALEKMVEDKIWKEQFYVTVEGLKNNGVIIGNKPVWQQFWEIYRFEFEQLKSRIEIDSQIGTTHPAGYSVSKTALETILKDFKEDDVAPKLAIKNLADDVLHIYQLAKYFAIEKKRRWEGDNFELDVFYTNPDFGYFETFYKNAYEDIVQVYNKLRNYLTKKPYSQEKWKLNFDNPTLAAGWDKNKEADNSAVLLKKDGKYYLGLMEKSHNRIFDKKHEALFLDNNQSENYEKVVYKFFPDQAKMFPKVCFSVKGLDFFKPSEEIYKIYKNAEFKKGDTFSIKSMQSLIKFYIDCLQKYDGWKGYNFKHIKSSNQYTNNIGDFFRDVAEDGYKITYQDVSDSYIKEKNNNGELYLFQIKNQDWNLDKAINGIKKTTTKNLHTLYFEALFSKENAEQNFPIKLNGQAEIFYRPKTSQGKLGTKLVNNKEVVNHKRYSEDKIFFHVPLTLNRTKNDARKFNSKVNEFLVNNPNINIIGIDRGEKHLAYYSVINQQGEILSDAKGIPAIGSLNFVGQGADGKEIDYAEKLTIRASERESSRRDWLDIEKIKDLKKGYISQVVRKLADLAIEHNAIIVLEDLNMRFKQIRGGIEKSIYQQLEKALIEKLSFLVDKGETDPEKAGHLLRAYQLTAPFESFQNIGKQTGIIFYTQANYTSKTCPECGFRPNVRFDESIDWNLINIKYYDNDFTISYSLKTFTKAKETSKRSNQLFTGINKKDSFILSTKNAIRYKWFRRNISAVELSAGESKLINETGSGVTIQYQLTDCMKGLFEGNGIDIKGDINSQLRTGGHLMKFYKQLANYLYLLSNTRSSVSGTDIDIINCPCCGFDSTQGFKGVAYNGDANGAYNIGRKGLIVLDKINNYQKNNGTLEKMNWGDIFIDIDEWDKFTQK

SEQ ID NO: 1117 - protein, 1316 aa, unidentified
  REGION 1..1316: note = Cas Enzyme sequence
MSRATGGGGAFESLMNMLKRRRIWGMGIFDKFVRQYSLSKTLRFELKPVGKTLENMRNHLGFDEKLQTFFADQEIKDAYMTLKPIFDSIHEKFITESLASSVAKKINFLEYFKKYKNRKELGEKEFQNIEKQLRTKFNDAYIEAAESLRKKAGKDEKGKYVLRDASYKVLTEQGILKYIAKNTVEFGNIESREKIDHALKAFEGFFTYFGGFNQNRENYYETGKEASTAVATRVVHENLPKFCDNVLFFEAHTDGYKQIHGYLKKKGRNLVNKKGVTLFPIAKDVFEISYFSKCLSQNEIETYNDAIGNANFLINLYNQALSEGKKSLPLPFFKTLFKQIGCGKRDALFFTITHDTKADANKARVKKAEAFSVEEVLELAAGAGEKYFSGTSDDGMINTVPEFLEHLRHRTDYRGIYWKRAAVNTVAGKYFAGWVDIKEHLLKEKVFHKNSGSGEIVVPEVVELNGLFKALSKVENWKNILFKPSIIKEKDQGKIIERSQYVSQAVLGLVERDIELRKSEFLAGSFAVLSSKRYKKPNEIEKIKSWMDGGLAVIQMLKYFDVRENKAKGDPIDSMLSEGLNNLVRAKDAPWFMWYDGLRNYLTRKPQEGTKDNKLKLNFENSTLGDGWDVNKEPDNYCVLLQDSNKHYFLAVITRQKDIKGYNKIFVKDEQNELFSTRGSNEWKKIEYKLLPGPNKMLPKCLLPGNNRTKYGATETVLDIYDKGGFKKNESSFSPSSLGKIIDFYKEALKKYEDWRCFNFSFKETASYKDISQFYLDVERQGYKLDMIDINKSVLDHWVDEGMIYLFAINNQDYNRGKRVGHKNNLQTTYWNAIFKILENRPKLNGGAEIFYRRALASDQLEKVSDKDSNLKHFRFSKEKFMFHVPITLNPTLKNPRMNNLINDTLKKQKDVNFLGIDRGEKHLAYYSLIDRNGNIKEQGTLNMPFLDKQGKQRIIKADKRTIGEDEKEQIKIVDCKDYNDLLDARAGDRDYARLNWQAIRTIKELKDGYISQVVRKICDLAIQHNALIILEDLNTGFKRGRQKIEKSVYQKLELALAKKLNFLVDKNAKIGELGSVTNALQLTPLISNFGDIENRKQVGIMLYVRANYTSQTDPITGWRRSIYLKNGSEKSIKEQILKYFTDFGFKDDDYYFTYKDENKNWTLFSGTKGKGLDRFRRRMGLKKDTWTIEKQDIVKILDEVFIGFDKERSFYSQIKAGKELHGWGNLRFAIEMIQQIRNTGTTDADDDFIVSPVRDATGNHFDSRRAKKNQPDSGDANGAYNIARKGIMMLDRIASDENPYIRDSEWDAWLSKNSR

SEQ ID NO: 1118 - protein, 1318 aa, unidentified
  REGION 1..1318: note = Cas Enzyme sequence
LGDNRRPFLFLRGKIKSRNYKIIFYKNMTTETKKFESFEDFTNLYEVQKTLRFELKPEPETDAFFKKIGIWYAKDEKRARERSIVKFYMDLLHREFTEESLKKVSLDFSKFFTLFKDLKKAENKGVQAVDQKKNKKGEIDRKKKEIADEFVNLRVIFVSQGFNAVNSEWKERYNADGNKIKNEKSDKYLILSENVLNLLKNRFTPQEVEKLKSIDKKHKNDYKSVINGEGKNIFNNFVGFFGYFDNLINNRKNFYESDGKSGRIATRSINENLNFFAGNVCIYENEFNKDLISKLIEKEKEIFQLPFYNKCLLQKGIEKYNFVVGDINKKINKYNQQNKKKIPFLKILYKQVLSMEEKEEYEHIEINNDDDLLSTIANFILLNQKKIKTGREIFKSFILRCQTDDNIDQIYLPKDSINTISNRTFKPWDEIMTLYGNKRYFISLKELRDFMLNERWKAMAQEKKLFKESVKDSSNVKKNVFLSFVAILKKEYQNQFDGFEKTTRQGKIKMIGYDKALLLLNEKIIWFKEKNGKLNDNEKMDWIKAIKDYSDAALRIFQMTKYFWLPITGDENDKDYRKIKAEIDDLPKDENFYNKVNEYIVGYEPFVYRSSFQEYLTKRPFSEDKFKINFDSSSLLKGWDKNKINERLGIILRDGDEYLLGIINKDNKHCFDDLSKFYAHGDDSYYELMQFKQLTGLYRQLPRMAFPKKKKAIIEVSQSVLKIKNEFDDFQKLKKEHKISSKEIFDNQKINILISYYRSFVKEYYKKENIYDFSLLDDGKTYERLSDFYADVDKITYNLSFIKVKKSEIKRNVCEGKLFLFSIYNKDFSGNSKGKNNLHTNYFNAVFNKENNPNGHLRLGANAGIYYRPASLKESDQKKEIIKTRSGKEINKKENPYHLKRYAQNKILFHLPVVLNADTYDEENVNQNVFKYIKNNFDNIKVIGIDRGEKNLAYYSVISRAADGKIKIEDCDDLNLGYLEPLNKLAEERQEQRRAWQSISKIKGKRDGYISHVIHKIVELILKHKAIVVFEDLSGGFKRSRMKIEKAPYQQLELALINKLNYLVRKKAKQEEAGHYLSAYQFAERIGSYKKVGKQTGIIFYTQAGYTSRTCPKCGWRKRIQGLYYKDRKSAQKIFTAERGVQISYDVANNYFVFKYHPVYNQKESKEWDKEVYSDVSRIKRDNKEKKYKKGYEGEITKKLKELFTGIDVQKNINIQIKDNDNASFWENLINLFRLILEIRNTDNKTGEDYIECPHCHFHSDKGFQGYKWNGDANGAYNIARKGLIILKKIKDAKEPEKLKFGDLVVNLDEWDKFVQKD

SEQ ID NO: 1119 - protein, 1318 aa, unidentified
  REGION 1..1318: note = Cas Enzyme sequence
LGDNRRPFLFLRGKIKSRNYKIIFYKNMTTETKKFESFEDFTNLYEVQKTLRFELKPEPETDAFFKKIGIWYAKDEKRARERSIVKFYMDLLHREFTEESLKKVSLDFSKFFTLFKDLKKAENKGVQAVDQKKNKKGEIDRKKKEIADEFVNLRVIFVSQGFNAVNSEWKERYNADGNKIKNEKSDKYLILSENVLNLLKNRFTPQEVEKLKSIDKKHKNDYKSVINGEGKNIFNNFVGFFGYFDNLINNRKNFYESDGKSGRIATRSINENLNFFAGNVCIYENEFNKDLISKLIEKEKEIFQLPFYNKCLLQKGIEKYNFVVGDINKKINKYNQQNKKKIPFLKILYKQVLSMEEKEEYEHIEINNDDDLLSTIANFILLNQKKIKTGREIFKSFILRCQTDDNIDQIYLPKDSINTISNRTFKPWDEIMTLYGNKRYFISLKELRDFMLNERWKAMAQEKKLFKESVKDSSNVKKNVFLSFVAILKKEYQNQFDGFEKTTRQGKIKMIGYDKALLLLNEKIIWFKEKNGKLNDNEKMDWIKAIKDYSDAALRIFQMTKYFWLPITGDENDKDYRKIKAEIDDLPKDENFYNKVNEYIVGYEPFVYRSSFQEYLTKRPFSEDKFKINFDSSSLLKGWDKNKINERLGIILRDGDEYLLGIINKDNKHCFDDLSKFYAHGDDSYYELMQFKQLTGLYRQLPRMAFPKKKKAIIEVSQSVLKIKNEFDDFQKLKKEHKISSKEIFDNQKINILISYYRSFVKEYYKKENIYDFSLLDDGKTYERLSDFYADVDKITYNLSFIKVKKSEIKRNVCEGKLFLFSIYNKDFSGNSKGKNNLHTNYFNAVFNKENNPNGHLRLGANAGIYYRPASLKESDQKKEIIKTRSGKEINKKENPYHLKRYAQNKILFHLPVVLNADTYDEENVNQNVFKYIKNNFDNIKVIGIDRGEKNLAYYSVISRAADGKIKIEDCDDLNLGYLEPLNKLAEERQEQRRAWQSISKIKGKRDGYISHVIHKIVELILKHKAIVVFEDLSGGFKRSRMKIEKAPYQQLELALINKLNYLVRKKAKQEEAGHYLSAYQFAERIGSYKKVGKQTGIIFYTQAGYTSRTCPKCGWRKRIQGLYYKDRKSAQKIFTAERGVQISYDVANNYFVFKYHPVYNQKESKEWDKEVYSDVSRIKWDNKEKKYKKGYEGEITKKLKELFTGIDVQKNINIQIKDNDNASFWENLINLFRLILEIRNTDNKTGEDYIECPHCHFHSDKGFQGYKWNGDANGAYNIARKGLIILKKIKDAKEPEKLKFGDLVVNLDEWDKFVQKD

SEQ ID NO: 1120 - protein, 1319 aa, unidentified
  REGION 1..1319: note = Cas Enzyme sequence
MDNKNCIFDSFIGKYELSKTLRFELKPTPATEKLLKQNKVFEKDKTIDDSYNQAKFYFDEMHREFINNSLAGLPAIIIKPLVVGIALKEEQEKNGNKKESNNEWEKTRKEFCLKIAEIFAIEDKKIELKYIKTGEKKETDEDDRKKKVKFLLSAKVLDYLKNKFPEEKESEFSDKKWPSLFVDDLENPETKKYVFSSFDKFSTYLSKFQETRNNLYSADDKATSVASRIIDNFVVFHGNCDKFENKLKDILERIGTTEVEKNIFQQNFYIDCFIQSGIDRYNAVVGNLNKKIKELRDKDEQSAKNEKKEFKKSNYPLLVELDKQILSYKDAERELIENDEDLKNVFNDFIKINDGKFKGDLFVEKFFDGEFAEEYGKIYLQKKVLNTISRKWFVDGNGFELLLPQTGKKEDRSIANIKTYISLTDIKAALEKNDENGGLSGDIYKDKYYDEEDGLRLERGAKEEKRFAQFLLIWKFEFESLFSNKNLSDGKTIYGYDSCFEIAKTICWGHLSSDNKNSNDYKKEVEKIKQYADASLHIYQMLKYFVLSGNNAPIGSDLFYGEFNDFYQDFDFIRYYNGLRNYITKKAFGADKIKLNFGKGTLLNGWQESPEGNAQFFGWIIRKNGEYLLGISKNTHFFDIKKNHLAPSSGEDFCEKLEFQSLNWGKNIVGGQVYKSFTGFSYKDHQKLIGKGEQVKIIKKLINEKYIKTGKFPELANFVAKEFNAAKEMQKDFQTLNIGGMKFAKIKASRLSEQVDNSGAKQCFYLFKIQNRDFNEYIKTGRKNIHSLYWEQIFSDENINNPVFSILGGAEIFFRKASENLSKKKDCEGNPVVEHKRYAKNKLFLHIPIKINSGKKEKNINRQVIKFLSGNDKINIIGIDRGEKNLLYYSVVNQKGEILDQGSLNTINGVDYFNKLVAREKERQADRESWNQIEQIKDLKKGYLSGVIHKICELIIKYDAIVVLEDLNMRFKQIRGGIERSVYQQFEKMLIDKLGYTVFKDRKVNEVGGVAKGYQLAAPFESFEKIFKQTGILFYTQADYTSVTDPVTGFRKNIYIGNSWSQEKIKRAIDKFKSIRWDDSVGGYAFAYDQANFGFEISGKNKKYAKSQEIVSKDWVIYSKVARIERFRNDAGYWEYQPINLNEKFKELFGIWGIDDKDDILRQIRKKEIAELKEGKLIGGKKRDFYHQFVYLFNLALQLRNSFSQKIVKDKEDKDIVIGDDIDFIASPVYPFFSMAAKSEKMGEISKLNLADFNKRILTKSKDEIVKNLNGDANGAYNIARKGIIILKKIKEDAEKPNLFISKNEWDEFAQGQYKKQNE

SEQ ID NO: 1121 - protein, 1319 aa, unidentified
  REGION 1..1319: note = Cas Enzyme sequence
MEFNDFKRLYPLSKTLRFEAKPIGDTLKNIIKNGLLEEDEHRAQSYVKVKKLIDEYHKVFIDRVLNDGCLTIENKGKKDSLEEYYESYMSKSNDENVSKTFKDIQENLRSVIANKLTKDKGYANLFGNKLIESYKDKDDTKKIIDSDLIQFINTAEPSNLDSMSQDEAKELVKEFWGFTTYFEGFHKNRKNMYTSEEKSTGIAYRLVNENLPKFIDNMEAFKKAIAKPEIQANMEELYSNFAEYLNVESIQEMFQLDYYNMLLTQKQIDVYNAIIGGKTDEDHDVKIKGINEYINLYNQQHKDEKLPKLKALFKQILSDRNAISWLPEEFNSDQEVLNAIKDCYERLSENVLGDKVLKSLLCSLSDYNLDGIFVRNDTQLTDISQKMFGNWSVIQNAIMQNIKKKKLARKRKESEEDYEKRIPDIFKKADSFSIQYINDSLNKMDDNNLHAVDEYFATLGAVNTPTMQHENLFALIQNAYTDISDLLDTPYPENKNLAQDKTNVAKVKALLDAIKSLQHFVKPLLGKGDESDKDERFYGELASLWTELDTVTLLFNMVHNYMTRKPYSQKKIKLNYKNTQLLAGWDANKEKEHAAIILRRNGMYYIAIMDKDSKNLLDKAMPSDGECYEKMVYKQFDISKQLPKCTTELKRVRKALIEDAKRSCLLSDSKDWNKPLNVTRKLWELNNYVWDKKKADWVLRKKENETRPKKFHKKYLELTSDKKGYNQAKNDWIKFTKEFLSSYKKVKDYDIHYKKRYNSVDELYKQLNSDFYTISFTYVSVSFIDKLVNEGKMYLFQIYNKDFSNYSKGTPNMHTLYWKALFDERNLADVVYKLNGEAEMFYRKKSINNTHPTHPANHPIQNKNKDNKKKESVFEYDLVKDYRYTEDKFLFHVPITMNFKSVGSENINQQVKEYLQQADDTHIIGIDRGERHLLYLVVIDMEGNIKEQFSLNEIVNEYNGNTYRTNYHDLLDVCADKRLKASQSWQTIENIKELKEGYLSQAIHKITQLMVKYHAVVVLEDLNKGFMRGRQKVEKQVYQKFEKMLIDKLNYLVDKKADAAQSGGLLNAYQLTSKFDSFQKLGKQSGFLFYIPAWNTSKIDPVTGFVNLFDTRYTNADKALKFFSKFDAIRYNEEKDWFEFEFDYDEFTQKAHGTRTKWTLCTYGMRLCSFKNPAKQYNWDSEVVALTDEFKRILGEAGIDIHENLKDAICNLEGKRRKYLEPLMQFMKLLLQLRNSRKNPEEDYILSPVADENGVFYDSRSCGDKLPENADANGAYNIARKGLMLIRQIKKAKELDKVKFDISNKAWLNFAQQKPYKNE

SEQ ID NO: 1122 - protein, 1319 aa, unidentified
  REGION 1..1319: note = Cas Enzyme sequence
MEFDDFKRLYPLSKTLRFEAKPIGATLKNIIKSGLLEEDEHRAQSYVKVKKLIDEYHKAFIDRVLNEGCLTIENKGNKDSLEEYYESYMSKSNDENVSKTFKEIQENLRSVIAKKLTDDKAYANLFGKNLIESYKDKEEKNKIIDSDLIQYINTAEPSQIDSMSQDEAKELVKEFWGFTTYFVGFFDNRKNMYTSEEKSTGIAYRLVNENLPKFIDNMEAFKKAIAKPEIQANMEELYSNFAEYLNVESIQEMFQLDYYDMLLTQKQIDVYNAIIGGKTDEDHDVKIKGINEYINLYNQQHKDEKLPKLKALFKQILSDRNAISWLPEEFNSGQEVLNAIKDCYERLSENVLGDKVLKSLLCSLSDYNLNGIFVRNDLQLTDISQKMFGNWSVIQNAIMQNIKNVAPARKRKESEEDYEKRISDIFKKADSFSIQYINDCLNEMDDNNIHAVDGYFATLGAVNTPTMQRENLFALIQNAYTDISDLLDTQYPENKNLAQDKTNVAKVKVLLEAIKSLQHFVKPLLGMGDESDKDERFYGELASLWTEFDTVTPLYNMVHNYMTRKPYSQKKIKLNYKNTQLLAGWDANMEKEHAAIILRRNGMYYLAIMDKDSKELLGKVMPSDGECYEKMVYKQFDISKQLPKCTTELKRVRKALVEDAKRSCLLSDSKDWNKPLNVTRKLWELNNYVWDKKKADWVLRKKENETRPKKFHKKYLELTSDKKGYNQAKNDWIKFTKEFLSSYKKVEDYDIHYKKRYNSVDELYKQLNSDFYTISFTYVSVSFIDKLVNEGKMYLFQIYNKDFSNYSKGTPNMHTLYWKALFDERNLADVVYKLNGEAEMFYRKKSINNTHPTHPANHPIQNKNKDNKKKESVFEYDLVKDYRYTEDKFLFHVPITMNFKSVGSENINQQVKEYLQQADDTHIIGIDRGERHLLYLVVIDMEGNIKEQFSLNEIVNEYNGNTYRTNYHDLLDVCADKRLKASQSWQTIENIKELKEGYLSQAIHKITQLMVKYHAVVVLEDLNKGFMRGRQKVEKQVYQKFEKMLIDKLNYLVDKKADAAQSGGLLNAYQLTSKFDSFQKLGKQSGFLFYIPAWNTSKIDPVTGFVNLFDTRYTNADKALEFFSKFYAIRYNEEKDWFEFEFDYDKFTQKAHGTRTKWTLCTYGMRLRSFKNPAKQYNWDSEVVALTDEFKRILGEAGIDIHENLKDAICNLEGKRRKYLEPLMQFMKLLLQLRNSRKNPEEDYILSPVADENGVFYDSRSCGDKLPENADANGAYNIARKGLMLIRQIKKANELDKVKFDISNKAWLNFAQQKPYKNE

SEQ ID NO: 1123 - protein, 1319 aa, unidentified
  REGION 1..1319: note = Cas Enzyme sequence
MSNLNQFIGLYPVSKTLRFELKPIGKTKENIEKNGILERDTQRAAGYKVVKRVMDEYHKAFIERILNDFENKLGEEDRTDWKNSLQEFYGLYLSPVSDNGRKDKLAKVQERLRKQIANVFKKDRQYNRLFADELIHDDLTEFVHAPIFENYIRSQKGNEDISDPEVKTIQETIVQDITCFRDFTTYFDGYNTSRKNMYVADGKATSIAHRMIDDNLPKFIDNVEVFKKIADCAEIGIHFATLYKAMEQYLNVPTINEMFLLEYFPMVLTQKQIDVYNAVIGGKTEADGTKIQGLNEYINLYNQQQKDKSKRLPKLKSLFKQILSERNAISWLPDEFESDNEMLESIESCYQDLRSTVFDGNHSLQSLLSSINDYDLNHIYISNDSSISLISQKQYGGWGVIGNAIMENAKAANPQKRNESNEKYEERISKIQKGIDRYSIGYLNDVLRNKLDDFKPIEDYFLKMGGAVDNETEQKPTFFTRIENAYTEAHTLLTSPYPEGRQLSQDKKNVEKIKNLLDAIKELQHFVKPLLGQGAESEKDNNFYGEFIPLWELLDQITVLYNMVRNRMTQKPYTDEKIKLYFDNNATFLRGWVDSKTESSDNGTQYGGYLFRRQNAIGEYDYYLGVSKDIKLFRRFKEVEESDKSTYERLDYYQLKSKTFYGTLYKGDYEIESSNIKRAIDNVVNSVGSTSIKGKLYNEKSKRQPKTATAIGYLKFIKQQDEELYNILLKDKSFDESNKAIIASMKSTLLSLNRIPSAKEYTQKNYVLFSAMMDDIDILLQEKIFSYFPVSQRELDEVVERNLRPLYLFKITNKDLSFAENYENGLRKNRGTDNLHTMYFKALMSGAQSVFDIGSGAIYFREHKISYTEEQLKRGHHYEMLKDRFSYPIISNKRYAFDKFQFHLSVNLNYNANKNVDINTLVNSYLKESNSTHIIGIDRGERNLLYLSLIDLHGNIVEQYSLNEIGDEYNRTNYHELLEKKENQRKEARPSWQTIESIKELKEGYMSQVIHKIVELMVKYNAIVVLEDLNKGFKRGRQKVEKQVYQKFEKMLIDKLNYLVDKKLAITEPSGVLKAYQLTNKFESFQKMGKQNGFLFYVQAWNTSKMDPTTGFVNLFNTRYENMAKAKAFFGKFESIRYNSEKGWFEFAFDYNDFTTKALDTRTRWMLCTHGTRIETKRDPNQNNQFVSEEFDLTSRFIELFSQYKIDPEGNLMEQICSQIEATFYKEMLHLLHLTLQMRNSKTGTDIDYLISPVMNSRNEFYDSRHCGKNLPNNADANGAYNIARKGLWIIEQIKQSEDLAHLKMTISNKEWLQYAQKE

SEQ ID NO: 1124 - protein, 1319 aa, unidentified
  REGION 1..1319: note = Cas Enzyme sequence
MKAVEKFCGQKNGYSRSITLRNRLIPIGKTEENIQKLKLLDKDMERAKAYSEVKELIDDFHRIFIEEVLSKASFEWTPLYDQFDLFQTEKDKLKKNKIKKELEVLQGVRRKEIVESFKKDKRFEKLFKKELLTEFVPAVIKNDESGTITDKQAALNVFKGFATYFTGFHQNRQNMYSKEAQSTAISNRIVNENFPKFYANVKVFEYLKNNYPEIINETEKSLAEFLKGKKLADVFSPESFNAVMSQSGIDFYNTVIGGISDESGSRKIQGLNEKINLASQQLPSEEKYKLKKKMTILYKQILSDRNTASFIPVGFEKSEEVYESVKHFKEEILDKVITNTKKLFDSVDYDLGQIYVPAKEATEFSLKLFGNWSIIHNGLFLLEQDMAKKTLTEKQIEALKKEIAKRNLSLLDLQNAYERWAKENDVKAEKNVRNYFTLTELRVDEKSKEKDSIEILKNLDVLYSKIDFKKQENLIKEKTSATPIKDYLDEIQNLYHYLKLVDYRGEEQKDTDFYSKYDEIIQALSEIIPLYNKVRNFVTKKPNEIKKVKLNFDCSSFLSGWGTDYGTKEAHIFIDSGKYYLGIINEKLSRTDEENLKSNASKTVKRVIFDFQKPDNKNTPRLFIRSKGTSYAPSVALYNLPIESIIDIYDKGLFKTEYRKVNPQVYKESLIKMIDYFKLGFSRHESYKHYTFLWKDSADYNDISEFYSDVIKSCYQLKFEDVNYEKLLSLVDSGKLFLFQIYNKDYSTGEEGGNGSTGKKNLHTLYWENLFSEENLRDVCLKLNGEAELFWRDSNPNVKAVCHKKDSVLVNRTTRDGKSIPEEIYQEIYKYKNPEKKEKDFILSKDAKELLESGTVVCKKAKFSITKDRHFTQQTYLFHCPITMNFKAPEITGRKFNEHVQEILRNNSEVKVIGLDRGERHLIYLSLINQKGEIELQKTLNLVEQVRNDKTVSVNYQEKLVQKEGERDKARKSWQSISNIKELKEGYLSNIVHEIAKLMVENNAIVVMEDLNFGFKRGRFPVERQVYQKFENMLIEKLNYLVFKDKKVSEPGGVLNAYQLADKTANVSDVGKQSGWIFYIPASYTSKIDPKTGFANLFYTAGLTNIEKKKDFFDKFDSIKYNRKLDSFVFSFDYSNFSDNADYNKKWDLYSRGERLVYSKAEKTTISVNPTENLKALFDKQGIIWNSEDNFIEQIHAVQAERDNVPFYDGLYRSFTAILQMRNSIPNSSRQEDDYLISPVMAEDGTFFDSRVEAAKGKKENGKWISKLPVDADANGAYHIALKGLYLLQHNFNLNDKGYIENISNADWFKFAQEKEYAK

SEQ ID NO: 1125 - protein, 1320 aa, unidentified
  REGION 1..1320: note = Cas Enzyme sequence
MNVKKSPTTFAEFTNQYSLSKTLRFELKPVGNTQKMLEDFGIIEKDEIIAQKYKITKKYFDKLHRTFVEEALFGKKIEGLDNYFELYRNWKKDKKANQKDLQNKETELRKNIVTLFNKMAKTWSQKETFKGLKNNNIEILFEEAVFKSVLKVLYGDEDESFLRDKVSGEFLLDKDGNKISVFDSWKGFTGYFTKFNETRKNFYKDDGTATAHATRIIDQNLKRFCENIIIFESIKDKLDLSEVENVFDISLVDIFSVTNYGDCFLQAGIDSYNTVLGGETLPNGEKKKGLNELINLYKQQTREKLPFFKSLDKQILSEKDKFTDEIEDAGALKEVLTVFLKNVDVKIQKFSLLITDVLNNPDAYDLSQIYLAKEALNTISRRWLVSFSTFEDALYTVLKNAKIISSSAKKTEGGYSFPEFIPLSYLKEALEKMVEDKIWKEQFYVTVEGLKNNGVIIGNKPVWQQFWEIYRFEFEQLKSRIEIDSQIGTTHPAGYSVSKTALETILKDFKEDDVAPKLAIKNLADDVLHIYQLAKYFAIEKKIEKKRRWEGDNFELDVFYTNPDFGYFETFYKNAYEDIVQVYNKLRNYLTKKPYSQEKWKLNFDNPTLAAGWDKNKEADNSAVLLKKDGKYYLGLMEKSHNRIFDKKHEALFLDNNQSENYEKVVYKFFPDQAKMFPKVCFSVKGLDFFKPSEEIYKIYKNAEFKKGDTFSIKSMQSLIKFYIDCLQKYDGWKGYNFKHIKSSNQYTNNIGDFFRDVAEDGYKITYQDVSDSYIKEKNNNGELYLFQIKNQDWNLDKAINGIKKTTTKNLHTLYFEALFSKENAEQNFPIKLNGQAEIFYRPKTSQGKLGTKLVNNKEVVNHKRYSEDKIFFHVPLTLNRTKNDARKFNSKVNEFLVNNPNINIIGIDRGEKHLAYYSVINQQGEILSDAKGIPAIGSLNFVGQGADGKEIDYAEKLAIRASERESSRRDWLDIEKIKDLKKGYISQVVRKLADLAIEHNAIIVLEDLNMRFKQIRGGIEKSIYQQLEKALIEKLSFLVDKGETDPEKAGHLFRAYQLTAPFESFQNIGKQTGIIFYTQANYTSKTCPECGFRPNVRFDESIDWNLINIKYYDNDFTISYSLKTFTKAKETSKRSNQLFTGINKKDSFILSTKNAIRYKWFRRNISAVELSAGESKLINETGSGVTIQYQLTDCMKGLFEGNGIDIKGDINSQLRTGGHLMKFYKQLANYLYLLSNTRSSVSGTDIDIINCPCCGFDSTQGFKGVAYNGDANGAYNIGRKGLIVLDKIKNYQKNNGPLEKMNWGDIFIDLDEWDKFTQK

SEQ ID NO: 1126 - protein, 1320 aa, unidentified
  REGION 1..1320: note = Cas Enzyme sequence
MNVKKSPTTFAEFTNQYSLSKTLRFELKPVGNTQKMLEDFGIIEKDEIIAQKYKITKKYFDKLHRTFVEEALFGKKIEGLDNYFELYRNWKKDKKANQKDLQNKETELRKNIVTLFNKMAKTWSQKETFKGLKNNNIEILFEEAVFKSVLKVLYGDEDESFLRDKVSGEFLLDKDGNKISVFDSWKGFTGYFTKFNETRKNFYKDDGTATAHATRIIDQNLKRFCENIIIFESIKDKLDLSEVENVFDISLVDIFSVTNYGDCFLQAGIDSYNTVLGGETLPNGEKKKGLNELINLYKQQTREKLPFFKSLDKQILSEKDKFTDEIEDAGALKEVLTVFLKNVDVKIQKFSLLITDVLNNPDAYDLSQIYLAKEALNTISRRWLVSFSTFEDALYTVLKNAKIISSSAKKTEGGYSFPEFIPLSYLKEALEKMVEDKIWKEQFYVTVEGLKNNGVIIGNKPVWQQFWEIYRFEFEQLKSRIEIDSQIGTTHPAGYSVSKTALETILKDFKEDDVAPKLAIKNLADDVLHIYQLAKYFAIEKKIEKKRRWEGDNFELDVFYTNPDFGYFETFYKNAYEDIVQVYNKLRNYLTKKPYSQEKWKLNFDNPTLAAGWDKNKEADNSAVLLKKDGKYYLGLMEKSHNRIFDKKHEALFLDNNQSENYEKVVYKFFPDQAKMFPKVCFSVKGLDFFKPSEEIYKIYKNAEFKKGDTFSIKSMQSLIKFYIDCLQKYDGWKGYNFKHIKSSNQYTNNIGDFFRDVAEDGYKITYQDVSDSYIKEKNNNGELYLFQIKNQDWNLDKAINGIKKTTTKNLHTLYFEALFSKENAEQNFPIKLNGQAEIFYRPKTSQGKLGTKLVNNKEVVNHKRYSEDKIFFHVPLTLNRTKNDARKFNSKVNEFLVNNPNINIIGIDRGEKHLAYYSVINQQGEILSDAKGIPAIGSLNFVGQGADGKEIDYAEKLTIRASERESSRRDWLDIEKIKDLKKGYISQVVRKLADLAIEHNAIIVLEDLNMRFKQIRGGIEKSIYQQLEKALIEKLSFLVDKGETDPEKAGHLFRAYQLTAPFESFQNIGKQTGIIFYTQANYTSKTCPECGFRPNVRFDESIDWNLINIKYYDNDFTISYSLKTFTKAKETSKRSNQLFTGINKKDSFILSTKNAIRYKWFRRNISAVELSAGESKLINETGSGVTIQYQLTDCMKGLFEGNGIDIKGDINSQLRTGGHLMKFYKQLANYLYLLSNTRSSVSGTDIDIINCPCCGFDSTQGFKGVAYNGDANGAYNIGRKGLIVLDKIKNYQKNNGPLEKMNWGDIFIDIDEWDKFTQK

SEQ ID NO: 1127 - protein, 1320 aa, unidentified
  REGION 1..1320: note = Cas Enzyme sequence
MNVKKLPTTFAEFTNQYSLSKTLRFELKPVGNTQKMLEDFGIIEKDEIIAQKYKITKKYFDKLHRTFVEEALFGKKIEGLDNYFELYRNWKKDKKANQKDLQNKETELRKNIVTLFNKMAKTWSQKETFKGLKNNNIEILFEEAVFKSVLKVLYGDEDESFLRDKVSGEFLLDKDGNKISVFDSWKGFTGYFTKFNETRKNFYKDDGTATAHATRIIDQNLKRFCENIIIFESIKDKLDLSEVENVFDISLVDIFSVTNYGDCFLQAGIDSYNTVLGGETLPNGEKKKGLNELINLYKQQTREKLPFFKSLDKQILSEKDKFTDEIEDAGALKEVLTVFLKNVDVKIQKFSLLITDVLNNPDAYDLSQIYLAKEALNTISRRWLVSFSTFEDALYTVLKNAKIISSSAKKTEGGYSFPEFIPLSYLKEALEKMVEDKIWKEQFYVTVEGLKNNGVIIGNKPVWQQFWEIYRFEFEQLKSRIEIDSQIGTTHPAGYSVSKTALETILKDFKEDDVAPKLAIKNLADDVLHIYQLAKYFAIEKKIEKKRRWEGDNFELDVFYTNPDFGYFETFYKNAYEDIVQVYNKLRNYLTKKPYSQEKWKLNFDNPTLAAGWDKNKEADNSAVLLKKDGKYYLGLMEKSHNRIFDKKHEALFLDNNQSENYEKVVYKFFPDQAKMFPKVCFSVKGLDFFKPSEEIYKIYKNAEFKKGDTFSIKSMQSLIKFYIDCLQKYDGWKGYNFKHIKSSNQYTNNIGDFFRDVAEDGYKITYQDVSDSYIKEKNNNGELYLFQIKNQDWNLDKAINGIKKTTTKNLHTLYFEALFSKENAEQNFPIKLNGQAEIFYRPKTSQGKLGTKLVNNKEVVNHKRYSEDKIFFHVPLTLNRTKNDARKFNSKVNEFLVNNPNINIIGIDRGEKHLAYYSVINQQGEILSDAKGIPAIGSLNFVGQGADGKEIDYAEKLAIRASERESSRRDWLDIEKIKDLKKGYISQVVRKLADLAIEHNAIIVLEDLNMRFKQIRGGIEKSIYQQLEKALIEKLSFLVDKGETDPEKAGHLFRAYQLTAPFESFQNIGKQTGIIFYTQANYTSKTCPECGFRPNVRFDESIDWNLINIKYYDNDFTISYSLKTFTKAKETSKRSNQLFTGINKKDSFILSTKNAIRYKWFRRNISAVELSAGESKLINETGSGVTIQYQLTDCMKGLFEGNGIDIKGDINSQLRTGGHLMKFYKQLANYLYLLSNTRSSVSGTDIDIINCPCCGFDSTQGFKGVAYNGDANGAYNIGRKGLIVLDKIKNYQKNNGPLEKMNWGDIFIDIDEWDKFTQK

SEQ ID NO: 1128 - protein, 1320 aa, unidentified
  REGION 1..1320: note = Cas Enzyme sequence
MNVKKSPTTFAEFTNQYSLSKTLRFELKPVGNTQKMLEDFGIIEKDEIIAQKYKITKKYFDKLHRTFVEEALFGKKIEGLDNYFELYRNWKKDKKANQKDLQNKETELRKNIVTLFNKMAKTWSQKETFKGLKNNNIEILFEEAVFKSVLKVLYGDEDESFLRDKVSGEFLLDKDGNKISVFDSWKGFTGYFTKFNETRKNFYKDDGTATAHATRIIDQNLKRFCENIIIFESIKDKLDLSEVENVFDISLVDIFSVTNYGDCFLQAGIDSYNTVLGGETLPNGEKKKGLNELINLYKQQTREKLPFFKSLDKQILSEKDKFTDEIEDAGALKEVLTVFLKNVDVKIQKFSLLITDVLNNPDAYDLSQIYLAKEALNTISRRWLVSFSTFEDALYTVLKNAKIISSSAKKTEGGYSFPEFIPLSYLKEALEKMVEDKIWKEQFYVTVEGLKNNGVIIGNKPVWQQFWEIYRFEFEQLKSRIEIDSQIGTTHPAGYSVSKTALETILKDFKEDDVAPKLAIKNLADDVLHIYQLAKYFAIEKKIEKKRRWEGDNFELDVFYTNPDFGYFETFYKNAYEDIVQVYNKLRNYLTKKPYSQEKWKLNFDNPTLAAGWDKNKEADNSAVLLKKDGKYYLGLMEKSHNRIFDKKHEALFLDNNQSENYEKVVYKFFPDQAKMFPKVCFSVKGLDFFKPSEEIYKIYKNAEFKKGDTFSIKSMQSLIKFYIDCLQKYDGWKGYNFKHIKSSNQYTNNIGDFFRDVAEDGYKITYQDVSDSYIKEKNNNGELYLFQIKNQDWNLDKAINGIKKTTTKNLHTLYFEALFSKENAEQNFPIKLNGQAEIFYRPKTSKGKLGTKLVNNKEVVNHKRYSEDKIFFHVPLTLNRTKNDARKFNSKVNEFLVNNPNINIIGIDRGEKHLAYYSVINQQGEILSDAKGIPAIGSLNFVGQGADGKEIDYAEKLAIRASERESSRRDWLDIEKIKDLKKGYISQVVRKLADLAIEHNAIIVLEDLNMRFKQIRGGIEKSIYQQLEKALIEKLSFLVDKGETDPEKAGHLFRAYQLTAPFESFQNIGKQTGIIFYTQANYTSKTCPECGFRPNVRFDESIDWNLINIKYYDNDFTISYSLKTFTKAKETSKRSNQLFTGINKKDSFILSTKNAIRYKWFRRNISAVELSAGESKLINETGSGVTIQYQLTDCMKGLFEGNGIDIKGNINSQLRTGGHLMKFYKQLANYLYLLSNTRSSVSGTDIDIINCPCCGFDSTQGFKGVAYNGDANGAYNIGRKGLIVLDKIKNYQKNNGPLEKMNWGDIFIDLDEWDKFTQK

SEQ ID NO: 1129 - protein, 1320 aa, unidentified
  REGION 1..1320: note = Cas Enzyme sequence
MKNEKTKSIYDKFIDKYELSKTLRFELKPTEATGKLLKQNKVFEKDKTIDDSYNQAKFYFDEMHREFINNSLSGLPTAIIDPLIKGFALKEAQEKEGNKKESGKEWEKTRKAFCSEIAEIFAANDHEIAQKNEKNEKDESSKSLDGKTRVKFLLSAKSLAYVKNKFPEKKEKEFTNKKWPSLYVNDLENSGNKKYIFSSFDKFSTYLGKFQETRNNLYTADDKATSVASRIIDNFVVFQGNRGKFENKLKSILSETSFVDTEKEIFEQNFYVDCFVQAGIDKYNAIIGTLNKQIKELRDKGQQEAKNAKKEFKKSNYPLLVEMDKQILSYGDKEKELIENDQDLRYVFEDFIKNNEIKFKQDLFIWKFFNGDSEDEYGKIYLHKKVLNTISRKWFVDANAFELLLPQTAKKEDKSIANVKTHISLFDIKLALEKEEHSGGLSGDIYKDKYYDDENGLRLRRSANESERFDQFLSVWKFEFDNLFKNKQMSGGDFAFGYEACLNDAKNVRWEHLESKNKNGDDYKSEVGKIKRYADSSLAIYQMLKYFVLSGNNAPLGSDLFYGEFNQFYQGFEFIRYYNGLRNYITKKVFNTDKIKLNFGKGTLLNGWQESPEGNAQFFGWIIKKQREYFLGISKNTHFFDIKKNDLKPKNGEDSCEKLEFHSLNWGKNIVGGQVYKSFTGFSYKDHQNEIGEVAQIEIIKKLINEKYIKTGKFPELDNFIAKEFKTVKEMQKYFQVLNIGGMEFAKIKANRLNDQNNDDSNRCFYLFKIQNRDFNGYAKTGRKNIHSLYWEQMLSGKNIKNPVFSVLGGAEIFFRQASDGLAKRKDNKGDFVIEHKRYAEDKLFFHIPIKINPGKKEKDINRQVDKFLAGNDNVNIIGIDRGEKNLLYYSVINQKGEILSQGSLNTINNINYFDKLVAREKGRQADRESWNQVEQIKDLKKGYLSGVIHKICELIIKYDAIVVLEDLNMRFKQIRGGIERSVYQQFEKMLIDKLGYMVFKDKNVDEIGGIAKGYQLAAPFESFEKIYRQTGILFYTQADYTSVTDPLTGFRKNIYIGNSWSMGKIWGAIDKFKSIKWDESASGYIFTYNQADFVFEANGKNKKNIKSQEIVFKEWAVCSKVARIERFKNGAGYWDCKPINLNEKFKELFDAWEIDGEGDILRQIREKEGAGELRKNKLVGGGKRDFHHQFAYLFNLVLQLRNAFSQKIAKDKNGKDILVGEDIDFIASPVYPYFSMEAKNEKTGQKISNLNVAGFDKRIIAKNKDEIVRNLNGDANGAYNIARKGIIILEKIKENAEKPNLFISKNEWDKFAQGQYKGK

SEQ ID NO: 1130 - protein, 1320 aa, unidentified
  REGION 1..1320: note = Cas Enzyme sequence
MNVKKSPTTFAEFTNQYSLSKTLRFELKPVGNTQKMLEDFGIIEKDEIIAQKYKITKKYFDKLHRTFVEEALFGKKIEGLDNYFELYRNWKKDKKANQKDLQNKETELRKNIVTLFNKMAKTWSQKETFKGLKNNNIEILFEEAVFKSVLKVLYGDEDESFLRDKVSGEFLLDKDGNKISVFDSWKGFTGYFTKFNETRKNFYKDDGTATAHATRIIDQNLKRFCENIIIFESIKDKLDLSEVENVFDISLVDIFSVTNYGDCFLQAGIDSYNTVLGGETLPNGEKKKGLNELINLYKQQTREKLPFFKSLDKQILSEKDKFTDEIEDAGALKEVLTVFLKNVDVKIQKFSLLITDVLNNPDAYDLSQIYLAKEALNTISRRWLVSFSTFEDALYTVLKNAKIISSSAKKTEGGYSFPEFIPLSYLKEALEKMVEDKIWKEQFYVTVEGLKNNGVIIGNKPVWQQFWEIYRFEFEQLKSRIEIDSQIGTTHPAGYSVSKTALETILKDFKEDDVAPKLAIKNLADDVLHIYQLAKYFAIEKKIEKKRRWEGDNFELDVFYTNPDFGYFETFYKNAYEDIVQVYNKLRNYLTKKPYSQEKWKLNFDNPTLAAGWDKNKEADNSAVLLKKDGKYYLGLMEKSHNRIFDKKHEALFLDNNQSENYEKVVYKFFPDQAKMFPKVCFSVKGLDFFKPSEEIYKIYKNAEFKKGDTFSIKSMQSLIKFYIDCLQKYDGWKGYNFKHIKSSNQYTNNIGDFFRDVAEDGYKITYQDVSDSYIKEKNNNGELYLFQIKNQDWNLDKAINGIKKTTTKNLHTLYFEALFSKENAEQNFPIKLNGQAEIFYRPKTSQGKLGTKLVNNKEVVNHKRYSEDKIFFHVPLTLNRTKNDARKFNSKVNEFLVNNPNINIIGIDRGEKHLAYYSVINQQGEILSDAKGIPAIGSLNFVGQGADGKEIDYAEKLAIRASERESSRRDWLDIEKIKDLKKGYISQVVRKLADLAIEHNAIIVLEDLNMRFKQIRGGIEKSIYQQLEKALIEKLSFLVDKGETDPEKAGHLLRAYQLTAPFESFQNIGKQTGIIFYTQANYTSKTCPECGFRPNVRFDESIDWNLINIKYYDNDFTISYSLKTFTKAKETSKRSNQLFTGINKKDSFILSTKNAIRYKWFRRNISAVELSAGESKLINETGSGVTIQYQLTDCMKGLFEGNGIDIKGDINSQLRTGGHLMKFYKQLANYLYLLSNTRSSVSGTDIDIINCPCCGFDSTQGFKGVAYNGDANGAYNIGRKGLIVLDKINNYQKNNGTLEKMNWGDIFIDIDEWDKFTQK

SEQ ID NO: 1131 - protein, 1320 aa, unidentified
  REGION 1..1320: note = Cas Enzyme sequence
MNVKKLPTTFAEFTNQYSLSKTLRFELKPVGNTQKMLEDFGIIEKDEIIAQKYKITKKYFDKLHRTFVEEALFGKKIEGLDNYFELYRNWKKDKKANQKDLQNKETELRKNIVTLFNKMAKTWSQKETFKGLKNNNIEILFEEAVFKSVLKVLYGDEDESFLRDKVSGEFLLDKDGNKISVFDSWKGFTGYFTKFNETRKNFYKDDGTATAHATRIIDQNLKRFCENIIIFESIKDKLDLSEVENVFDISLVDIFSVTNYGDCFLQAGIDSYNTVLGGETLPNGEKKKGLNELINLYKQQTREKLPFFKSLDKQILSEKDKFTDEIEDAGALKEVLTVFLKNVDVKIQKFSLLITDVLNNPDAYDLSQIYLAKEALNTISRRWLVSFSTFEDALYTVLKNAKIISSSAKKTEGGYSFPEFIPLSYLKEALEKMVEDKIWKEQFYVTVEGLKNNGVIIGNKPVWQQFWEIYRFEFEQLKSRIEIDSQIGTTHPAGYSVSKTALETILKDFKEDDVAPKLAIKNLADDVLHIYQLAKYFAIEKKIEKKRRWEGDNFELDVFYTNPDFGYFETFYKNAYEDIVQVYNKLRNYLTKKPYSQEKWKLNFDNPTLAAGWDKNKEADNSAVLLKKDGKYYLGLMEKSHNRIFDKKHEALFLDNNQSENYEKVVYKFFPDQAKMFPKVCFSVKGLDFFKPSEEIYKIYKNAEFKKGDTFSIKSMQSLIKFYIDCLQKYDGWKGYNFKHIKSSNQYTNNIGDFFRDVAEDGYKITYQDVSDSYIKEKNNNGELYLFQIKNQDWNLDKAINGIKKTTTKNLHTLYFEALFSKENAEQNFPIKLNGQAEIFYRPKTSQGKLGTKLVNNKEVVNHKRYSEDKIFFHVPLTLNRTKNDARKFNSKVNEFLVNNPNINIIGIDRGEKHLAYYSVINQQGEILSDAKGIPAIGSLNFVGQGADGKEIDYAEKLAIRASERESSRRDWLDIEKIKDLKKGYISQVVRKLADLAIEHNAIIVLEDLNMRFKQIRGGIEKSIYQQLEKALIEKLSFLVDKGETDPEKAGHLFRAYQLTAPFESFQNIGKQTGIIFYTQANYTSKTCPECGFRPNVRFDESIDWNLINIKYYDNDFTISYSLKTFTKAKETSKRSNQLFTGINKKDSFILSTKNAIRYKWFRRNISAVELSAGESKLINETGSGVTIQYQLTDCMKGLFEGNGIDIKGDINSQLRTGGHLMKFYKQLANYLYLLSNTRSSVSGTDIDIINCPCCGFDSTQGFKGVAYNGDANGAYNIGRKGLIVLDKINNYQKNNGTLEKMNWGDIFIDIDEWDKFTQK

SEQ ID NO: 1132 - protein, 1320 aa, unidentified
  REGION 1..1320: note = Cas Enzyme sequence
MKNLKQFTEIYPVDRTLRFELKPELLEGQTIDDFWSNYLDENKKDSFYNKDKKRNDDYPIVKLILDQFHKNFISLALSSFLPESAPKCPTWNDLFDAYCKDRKSKDFANLQDKMRESISNHFKKHEWWQYISSYSKLIGSLLKQLVENDDDFVESIQERDSSLTREKMLEALETFNRFSVYFGNYADNRSNMYKKEAQGTSIANRIVNENLPKFFDNISVYRKLKATCPIDLESIQDNLKDTLKGMSLDEIFTPCYFNECLTQDGIEKYNWILGGNPNEDVLGINSVGNEYLQHHPESKLKLKDLVMTQLYKQILSDRVQPSFLPQQYKSEEDLMDSVFSFLSAVEKQGLLESVKRIMETLYDNDTDLSKVYVLGSNLTKLSHLLYGDWNLLGEKLREKLVTSNTKKAQQERDKEIEKWLDNKCFSLLQIKEIEDELLEQTQHPLSTEELFTTLNIWKKENETSLWQKVSLIEQCKTAYIVQFATLRKSFKDGKSISTDESKQILKEVLDKYMELYHIVELLRLGNKSAYLEKDSFYVDYERLFESSDEDTLSLSYIIPLYNKVRSFLTRKLSNEGKMLLKFDSPTLADGWDANKEDANNATILKHSDKYYLMLINPLNKPRLEDGICENGSYRKIVYHQIADASKDLPNLMMIDGKTVRKTGRKSQDGFNHILEDLKNKYLPDEINRIRKCGSYLKTSDSFNKEDSQAYLKYYMQRLLDYKKDEMVFHFKEPNEYESYADFLNDVAMQKYSISFVSFSKDKIDEWRKENKVMLFQVSNKDFKEGACGTENIHTLYWKELFSSRNMDNTIFKLNGGAELFYRSKLSSKPFMHKKGSILVNKTLSDGTPISDEMYKHFVDHFNGKGIVLTDEEVRLLPQVRTNRAKLDIIKDKRYYEHKFFMHVPITINFKAPKITQQQFNERTLELLRQNKKQLNIIGIDRGERNLIYVSVINQRGENIIPPKHFNLIETKTYDEVTRKYNYLEKLKQTEQNRDEARKNWTTIERIKDLKSGYLSQVVHEIAKMVVKYNAIVVLEDLNFGFKRGRFNVERQVYQNFEKMLIQKLNYLAFKKDAPSPDYGNVWNGLQLTAPFTSFKDLGKQSGWLFYVPAGYTSKIDPATGFVNLFNMNKPAKDFKTFFGSFTQICYKDDMFYFTFDYSNEKFNTVRTDYTNVWTLSTHGERIVREKDELREIQLIQKFKKFFSDDGVNIPLSEVSVERIKLLEEVKLKELFGLFKLLLKMRNTNGQEDYIISPVAGENPFKTGSNNYMGLTDADANGAYNIALKGLYWVHNGFPVEDKYLKYIKDTDWFEFIQTKPYLND

SEQ ID NO: 1133 - protein, 1320 aa, unidentified
  REGION 1..1320: note = Cas Enzyme sequence
MNNLKQFTGIYPVPKTLRFELKPVLLDGQTINDFWNIYLNGSIDNDLHKLYLHDKKRNDNYPIMKAILDQFHKKFIASALEQFEVGDKGVTWETLALAYQENKRSRTFQKLQEEMRGKIHKAFTEHEWWPYNASYPKLIGTLIKQKVEEDYDFVESIKDSNPKMDLDRKKMLQAIDTFNNFSVYFGNYQANRNNMYSEKDQTTSVANRIVNENFPKFLDNIVVYNRLKDSCNNELKAIEDNLNAVLNGLLLDDIFTPKYYNKCLTQDGIETYNWVLGGCPNEGVLGINSVGNEYLHHHPDSQLKLRSLKMTQLHKQILSDRVRISFLPEQFNSEEELIQSVSAFFEEFESNNLFERIQETLSILKDSDTDLNKVYVQGKNLSRLSTLLYGKWDVLGEKLRSVMVTGNTKTAQKEKDKEIEAWIENKCFSLAQIKAVENELMELSSRPLSLMELLTDLTLWKYDSENRTWSKNSLLKLCKDARITEFNALTDEYRQGKLTIKTDAAKEVLKSVLDLYMELFHVIELLRLGKKSPYLEKDDFYIPYEQLFESTDDTVLVSHIVPLYMKVQSYLTRKLADEGKMLLKFDSPTLADGWDANKERANNATILIKDGKYFLMVVNPYNKPNISEGLCETGTYLKIVYHQIADASTDIPNLMVENGITVRKTGRKDPDGINRKLEAEKDRLLPPEINRIRKSGSYLKSSITFNKVESQIYLAYYMQRIIEYKGKEIEFSFKRPNEYGCYQDFIDDVSKQKYSLSLIPFSEYVVEAWRQNGKVFLFEITNKDFRDKSSGTANLHTLYWKELFSKQNLIEPVFKLNGEAELFFREKTNSMSFAHKKGSILVNKTFSDGTPIDAELYKKLLRHFNGLDVDLKPEEVNLLPMVRTKKAQFDLMKDKRYYEHKFFLHVPITINFKASAISQKQFNERTLNILRNNKESLNIIGIDRGERNLIYVSVINQRGENLIAPRHFNLIETKTFDGKERKFDYLTKLKQTEKNRDEARKNWTTQERIKDLKSGYLSQVVHEIAKLVVQYNAVIVLEDLNFGFKRGRFNVERQVYQNFEKMLIQKLNYLAFKKDAPSEEYGTIQSGLQLTAPFTSFKELGKQSGWLFYVPAGYTSKIDPSTGFVNLFNMNKPANSLREFFEAFDDITYRDGLFYFTFDYSKVVFNKVKRDYTNHWTLASHGSRIVGKGKELKDLTAEFVKFFEKEAKIPLEKVSVKSISVLDESKLQTLWGLFKLLLKMRNSNDDIDYVISPVAGDSPFITGEGNSMQIVDADANGAYNIALKGLYWLYNDFPMEQGYLKYIKDEDWFRFIQTKPYRQD

SEQ ID NO: 1134 - protein, 1320 aa, unidentified
  REGION 1..1320: note = Cas Enzyme sequence
MRYTEFTNLYSLQKTLRFELIPIGNTGQKIEELQEGEENTLLGRDTDRATHYKKAKKMLDAYHRFHIEAALPMVDFEKLDLKKDLEFIQKSLSNREEFASTEEKEKALAALTKAQANLRKEIVAILKGSVGKKTQEKYSKKEVSSIEAIKERYAFFGKKELFDPEKNSEFRNVAVEADFTPGEFEEAISSFKGFTTYFKGFHENRENMYSEEAEGTAIANRCINENLPKFLNNIRVFEKIKTELSKEFKQVEKDLCDGKKLASIFQLDGYQNHLNQKGIEFYNLILGGKFNKDTKEKVQGLNEKINLYNQSHPEERLPFLKPLYKQILAKTNSDSFRPEPFESDVELLGAIEDFWEKHIQKPEYPAGTIFPVLKNFQKISKKIASMKNEELSGIFVDAKRLSALSHQAFGDWGLLKTALRTKYDSDNSTLSESARERGANSFFARDYFTLLELEEALDFYFKNVKTHEETRSDRTSLKAFFSEIKFVETLSHQVKGEIQTEELEKDLVEVIEESYRSIEPILQEKGGDTLHQDKGKGGRVEKIKQFLDSLKTLQRHLAYLHVEGDASETNGDFYYVWDGCYEALQPLTQLYNKVRNRLTRKPSSEEKMKLNFDSTTLLDGWDISKETANLSVILEKEGLYYLAIMDKKHNRLFKDIPEHKEKGRYRKINYKQISNPSRDLPHKIFSATGVNSFNPSQKILDVYNNGTFKQGDSFSLKDLYLLIDFYKEAIAQNNDWEVFQFQFKPTKEYGNISEFYSEVESQGYKIWFTNVNADLIDSWVSEGKLYLFKIYNKDFSSYSKGKPNLHTIYWKNVFDPANLKDVVFKLNGEAEIFFRPATIKYSDEERKKGHHAKELKGKFDYPILKDRRYSLNKYQFHVPITLNFHSQKDEYVNLRVLDFIKSSKQINAIGIDRGERHLLYLSLIDAKGKIIYQDTLNTVKNEAAKTEIDYHEKLDQKEKERKAARENWDVIENIKELKEGYLSQVVHRIAELMVEHQAILIMEDLNFGFKRGRFKVEKQVYQKFEKMLIDKLNYLVFKGNKPTEPGGSLNAYQLTSKFESFQKLGKQTGMIFYVPASYTSKVDPVTGFYDFLKPKATTISNNQNFFQKFDSIRFNAEKGYFEFHATYGKFNQAVNPEGKSRKKGKTDDALLTELAGQTWTICSHEAERFRIRRTKNGSVSYSMVDCNQEFKDHLQKAKISFEDGTELRDAIAASKDTTFLKGMIDTLRTLVALRYNNGKRGADEKDYILSPVADSRGQFFNSLESDGTLPKDADANGAYHIAKKGLLLVDKIKEFDSDGKKKYPDLSLSNHEWFYSLWKE

SEQ ID NO: 1135 - protein, 1320 aa, unidentified
  REGION 1..1320: note = Cas Enzyme sequence
FDIFTRRIGDPAIRDYAASTVLHFLELKGPYFVLPSLEDEDAQISSKPTDDKPLVNEATGWLCDNWGSGVKSDKGGISEKLAAFAGAELTIFIGKSGTSLLREFCRLTNSALTNVEDDSSLMKSLCSSIGWKGRKSAGRMAIESATASKILTEDEIKRLSEKLIRESSEKLAESKRTIPAWMPAERAHLEKLIGMPYRTEKDNTFEFAVMLDHALRKISGAHSGIKNAEAMRRQFEADAQRIGNVPPAALAWLESYCLDRAKCSGAIESYRIRKRAVDGWEQVVERWSRGDCKTSEDRIAIARALQDEIEKFGDIQLFESLAADDAECVWKPSGTPSAQPLKDFVFATDATAKKLRFKVPAYRHPDPLRHPVFTDFGNSRWDIEFSAHRASTELDSLTQKVAKLTASLAEHQEKRTTVKEAKRESLNEKIIGLQTDLEESQQQHASMADRHHVALRLWNGKTVETAPLRWSSKRLIADLALNPSNGAQEESVISVTRADRLGRAAAGVGEAARVSIARLFDEGDWNGRLQAPRSQLDAIARCVEKKKPGWEAKSLAMMQGIKWLLSFSAKLTPQGPWTTFAERLGLKPDPQYWPHAETNKKRQGHGRLILSRLPGLRILSVDLGHRFAAACAVWEAITAGQIQDACRTAGVTAPSTDAMYLHLKGKNARGRDSTAIYRRIGPDVLADGSVHPAPWARLDRQFLIKLQGEDKAARKASPDEIHAVEQFEAWAGRLRGIADPPRRLGVDALMSETVRTARLAIARHLRRARIARNLVAMTESQRGNNQPKPLTDDARLKLLVDTFLDWYSLATDDRWDDSAARRMWNEQMATLANSFGVQQHQSSPMGSGPSKADRKKEEQSLRNRLEPLAKALAAAPQLRQELHDEWAANWQHDDREWYKKLKWLSRWLMPRHLSRIVEVVKKNGQHIKRRKPIREAIASASNVGGLSLIRLGTLTEFRRKVQIGFFTRMKPDGSREELGPRFGQSTLDAIEKLKDNRVKQLASRIVEAALGVGIERHSANCRDLQRPRERIKDPRFEPCHAVVIEDLTHYRPEETRTRRENRATMDWKSAETRKRLENACQLHGLHLRDVNPQYTSRQDSRTGAPGLRAVEVEVKAFLSSAVWRKQVAQAQRKRQDKKGDAREALLLRLYEQYKQADGPTMTQRLCIPLKGGSLFVSSNSCSPAAAIQADLNAAANIGLRALMDPDFAGKWWYVPCDPKTMTPKTEKVKGGLVDGAGILAPASTDDGKPRKKSEKGSKAKTREIVNLWREPSAMPIGGAGNGDQWMDTNTYWNSVQTRVVRALSRASPDDPVLASEDLPF

SEQ ID NO: 1136 - protein, 1321 aa, unidentified
  REGION 1..1321: note = Cas Enzyme sequence
MKDKDIFSNFTNQYQLSKTLRFELVPLRETEKFIKEKGLLKQDKKRADDYKEAKKLIDEYHRDFIEKALSGKKLSNQQLKDYLNEFIKPERDNKVLGQISEALRKEIAGWLKDNPTKDGKKLIEEKVPEFLKEQGKNEEAKLVSCFKGFTTYFGGFNDNRENIYSDKEQSTAIAYRIVHENLPKFIANIRAFQNSKDYKIDFSEVQEQMKEQLDGNKLKDVFSLDYFNNCLTQSGIDRYNTILGGKTSFKGIKIQGVNEKINLFRQQNNLTGKQVSIMAPLYKQILSDRVSASYLPEIFESPDVCLNAIKAFYEKDIKAFASPVWGNKVKNVIDELETLFTKKLNAENDLSKIHIRNNFITAVSQQIFGSYPVIADALRSHFQKGKKQTKKLEDETNKYLKKSYFNISEIETALKVYLQETEIDNEEKRAEILKQKNPVLQYFNSLTSNIEIAKDKKEKTNVIKHFRQKHEDKSVQTVLNRKYKSNSELIQDKKAVGAIKDYLDSYLHILHFIKPLYVVPPKKENGEIPDKDNSFYAEFDELFRQLNSVIPLYNRVRSFLTQKPHSTEKIKLNFENKGNFLGGWVDSHTEDSDNATQSGGYLFRKKNPIGEYDYFLGISNDKKLFRSHLQNEVMDKSEYERLDYYQLKTASVYGNSYVGKNSYSKDKERLVEAILSFSKSQDESFVSELNKYLEKETPTPSGCFSLIREKFPDSFEKLIGYKEFLTANNEVVENLKETLGSLKRVPSAQKYASKNYVFFSEVITDIEKLAKEKSCSYFQVSQKELDEVLNRSEKPLLIFKITNKDLSYAEQFLKGKRKSRGNENLHTMYFKALLSGEQDGFDIGTGEVFFRKKSLNYNEKTLKQGHHIEKLKDKFNYPIISNRRFAFDKFQFHLSVILNYTKPDSKSNEFNDKVNRALKENSKVNVIGIDRGERHLVYYTIINQNGEIINDDKGNVLQGSFNEIKNEHNGKIYNTDYQDKLKRREEERDKARKSWDTIGKIKELKEGFLSQVVHKIAQLMIKHNAVVVLEDLNFGFKRGRMKVERQVYQKLEKMLIDKLNYLVFKDREAGEPGGVLNAYQLTAPFTSFKDMGKQTGFIFYVPAANTSKIDFATGFVNFLYPKYENEKQAKEFFGKMEDIRYNKARDYFEFDVDCNKFRTDKAEQLKKSRWTICTYGEERYHYQLSKREYNKVNVTEGMKGLLRKQGIEFDKGNDIRKAVIAVDNAQFLKDMIFYLKLTLQMRYTDGNDRDFILSSVADEKGVFFNSEKAADIEPKDADANGAYHIALKGLLQLQKIRVGEKKLAISNKEWHDFVQERAYRK

SEQ ID NO: 1137 - protein, 1322 aa, unidentified
  REGION 1..1322: note = Cas Enzyme sequence
MTGIFKDFTHLYELQKTLRFELIPVGRTKELLEKNHVFEKDEKIAENYKDVKKYFDRLHKEFIKDAFSHTNLPENLLEGYEQKYFSHKLNPSRASRIDLEKIAKRLRTILLKSFNTEADQWKNRYLKNIEQTLKNKNEKQQKKELEKKLKKIKEGTKGIELFFKVEVFDFLKYKYPEAQINGKSIFDPFNKFGCYFKKFHETRINFYKDDGTSTAIPTRIINDNLSIFLENKKIFESKYSKKHKSVFAKNELRIFVLFYFNNCFSQKQIDGYNNTIALINSNVNQLRQNNPEVSKKDLPFFKRLFKQILSQPSKQEIEQDSFIEIFQDEDVFPTMQKFINENKICIPKAKSIFKKFISSQKVKSDEYNISQIYVAKRFINTISNKWFSNWNTIRNLLIPKDKKNIPDFISVTSLKAALQKTQNIVEVNDLFRKEYRDILEEGSDFYQIFLKIWEKEFEKATDIYLNETKEIEKMITEDKKYLPNKKGRLKSGKKGSIQKEKFLDYTQSVFDIYLMMKYFSLEKGKERVWNPEALDEDAIGGFYEKFKEYYENINTWKYFNVFRNYLTKKPYNSEKIKLNFECSSLLSGWSKNYDSYGALIFEKNEKYYLGIINGTKFTKDEIEQLYLDIRNNNISLRLVYNYQKPDFKNFPKLFIRSSGSNFAPAVKKYNLPIDSVLNIYDKGLFKTSNKSSQNYHESLKKIIDYFKLGISQHESYKGFSFKWQETSEYDNISDFYKDATRSCYKVTWENINFSKLYELIESGRLYLFQIYNKDFELDENIAPKGYNFKDKNGRRNLHSIYWKALFSNTNFKKTILKLNGGAELFYRKLTKNLTKDPIITVKNQIKIIKKNNNIFHKKRFTQNKIYFHCPVSINFTENDWKINTKICNTIRNNSKVKIIGIDRGEKNLAYYSVIDHQGNILETDSFNEVQEREDREPTDYQKKLDQIQKERDWQRKSWQEISSIKEMKKGYISQVVHQICKLIRKYEAIVVFEDLNIGFKRGRFAIEKQIYQNLELALAKKLNYMVFKDAKEEETGHFLQAYQLTPPVINFQDIGKQCGIIFYVPASYTSAICPACGFRKNISTFVEKIEKNIDLINKFNIVYDPDKDRFCFRYKRSDFIKSEKEKEDDSKVKLYSNTKLPDDFTFYSNVERFKYIRDQNNRGGKVELKYPNDSLKKLFHENGINFQNFSNISQLIKTRNFENENFYKPFIYIISLILQLRNTTIEINQNENNEKYRDFISCPHCYFHSENNLITLTKRYKGKKPFEFNGDANGAYNIARKGILILQKINKAKRLEEIEYGGLTVTQQEYDKYLALVSSKKA

SEQ ID NO: 1138 - protein, 1322 aa, unidentified
  REGION 1..1322: note = Cas Enzyme sequence
MTGIFKDFTHLYELQKTLRFELIPVGRTKELLEKNHVFEKDEKIAENYKDVKKYFDRLHKEFIKDAFSHTNLPENLLEGYEQKYFSHKLNPSRASRIDLEKIAKRLRTILLKSFNTEADQWKNRYLKNIEQTLKNKNEKQQKKELEKKLKKIKEGTKGIELFFKVEVFDFLKYKYPEAQINGKSIFDPFNKFGCYFKKFHETRINFYKDDGTSTAIPTRIINDNLSIFLENKKIFGSKYSKKHKSVFAKNELRIFVLFYFNNCFSQKQIDGYNNTIALINSNVNQLRQNNPEVSKKDLPFFKRLFKQILSQPSKQEIEQDSFIEIFQDEDVFPTMQKFINENKICIPKAKSIFKKFISSQKVKSDEYNISQIYVAKRFINTISNKWFSNWNTIRNLLIPKDKKNIPDFISVTSLKAALQKTQNIVEVNDLFRKEYRDILEEGSDFYQIFLKIWEKEFEKATDIYLNETKEIEKMITEDKKYLPNKKGRLKSGKKGSIQKEKFLDYTQSVFDIYLMMKYFSLEKGKERVWNPEALDEDAIGGFYEKFKEYYENINTWKYFNVFRNYLTKKPYNSEKIKLNFECSSLLSGWSKNYDSYGALIFEKNEKYYLGIINGTKFTKDEIEQLYLDIRNNNISLRLVYNYQKPDFKNFPKLFIRSSGSNFAPAVKKYNLPIDSVLNIYDKGLFKTSNKSSQNYHESLKKIIDYFKLGISQHESYKGFSFKWQETSEYDNISDFYKDATRSCYKVTWENINFSKLYELIESGRLYLFQIYNKDFELDENIAPKGYNFKDKNGRRNLHSIYWKALFSNTNFKKTILKLNGGAELFYRKLTKNLTKDPIITVKNQIKIIKKNNNIFHKKRFTQNKIYFHCPVSINFTENDWKINTKICNTIRNNSKVKIIGIDRGEKNLAYYSVIDHQGNILETDSFNEVQEREDREPTDYQKKLDQIQKERDWQRKSWQEISSIKEMKKGYISQVVHQICKLIRKYEAIVVFEDLNIGFKRGRFAIEKQIYQNLELALAKKLNYMVFKDAKEEETGHFLQAYQLTPPVINFQDIGKQCGIIFYVPASYTSAICPACGFRKNISTFVEKIEKNIDLINKFNIVYDPDKDRFCFRYKRSDFIKSEKEKEDDSKVKLYSNTKLPDDFTFYSNVERFKYIRDQNNRGGKVELKYPNDSLKKLFHENGINFQNFSNISQLIKTRNFENENFYKPFIYIISLILQLRNTTIEINQNENNEKYRDFISCPHCYFHSENNLITLTKRYKGKKPFEFNGDANGAYNIARKGILILQKINKAKRLEEIEYGGLTVTQQEYDKYLALVSSKKA

SEQ ID NO: 1139 - protein, 1322 aa, unidentified
  REGION 1..1322: note = Cas Enzyme sequence
MTGIFKDFTHLYELQKTLRFELIPVGRTKELLEKNHVFEKDEKIAENYKDVKKYFDRLHKEFIKDAFSHTNLPENLLEGYEQKYFSHKLNPSRASRIDLEKIAKRLRTILLKSFNTEADQWKNRYLKNIEQTLKNKNEKQQKKELEKKLKKIKEGTKGIELFFKVEVFDFLKYKYPEAQINGKSIFDPFNKFGCYFKKFHETRINFYKDDGTSTAIPTRIINDNLSIFLENKKIFESKYSKKHKSVFAKNELRIFVLFYFNNCFSQKQIDGYNNTIALINSNVNQLRQNNPEVSKKDLPFFKRLFKQILSQPSKQEIEQDSFIEIFQDEDVFPTMQKFINENKICIPKAKSIFKKFISSQKVKSDEYNISQIYVAKRFINTISNKWFSNWNTIRNLLIPKDKKNIPDFISVTSLKAALQKTQNIVEVNDLFRKEYRDILEEGSDFYQIFLKIWEKEFEKATDIYLNETKEIEKMITEDKKYLPNKKGRLKSGKKGSIQKEKFLDYTQSVFDIYLMMKYFSLEKGKERVWNPEALDEDAIGGFYEKFKEYYENINTWKYFNVFRNYLTKKPYNSEKIKLNFECSSLLSGWSKNYDSYGALIFEKNEKYYLGIINGTKFTEDEIEQLYLDIRNNNISLRLVYNYQKPDFKNFPRLFIRSSGSNFAPAVKKYNLPIDSVLNIYDKGLYKTSNKSSQNYHESLKKIIDYFKLGISQHESYKGFSFKWQETSEYDNISDFYKDATRSCYKVTWENINFSKLYELIESGRLYLFQIYNKDFELDENIAPKGYNFKDKNGRRNLHSIYWKALFSNTNFKKTILKLNGGAELFYRKLTKNLTKDPIITVKNQIKIIKKNNNIFHKKRFTQNKIYFHCPVSINFTENDWKINTKICNTIRNNSKVKIIGIDRGEKNLAYYSVIDHQGNILETDSFNEVQEREDREPTDYQKKLDQIQKERDWQRKSWQEISSIKEMKKGYISQVVHQICKLIRKYEAIVVFEDLNIGFKRGRFAIEKQIYQNLELALAKKLNYMVFKDAKEEETGHFLQAYQLTPPVINFQDIGKQCGIIFYVPASYTSAICPACGFRKNISTSVEKIEKNIDLINKFNIVYDPDKDRFCFRYKRSDFIKSEKEKEDDSKVKLYSNTKLPDDFTFYSNVERFKYIRDQNNRGGKVELKYPNDSLKKLFHENGINFQNFSNISQLIKTRNFENENFYKPFIYIISLILQLRNTTIEINQNENNEKYRDFISCPHCYFHSENNLITLTKRYKGKKPFEFNGDANGAYNIARKGILILQKINKAKRLEEIEYGGLTVTQQEYDKYLALVSSKKA

SEQ ID NO: 1140 - protein, 1322 aa, unidentified
  REGION 1..1322: note = Cas Enzyme sequence
MTGIFKDFTHLYELQKTLRFELIPVGRTKELLEKNHVFEKDEKIAENYKDVKKYFDRLHKEFIKDAFSHTNLPENLLEGYEQKYFSHKLNPSRASRIDLEKIAKRLRTILLKSFNTEADQWKNRYLKNIEQTLKNKNEKQQKKELEKKLKKIKEGTKGIELFFKVEVFDFLKYKYPEAQINGKSIFDPFNKFGCYFKKFHETRINFYKDDGTSTAIPTRIINDNLSIFLENKKIFESKYSKKHKSVFAKNELRIFVLFYFNNCFSQKQIDGYNNTIALINSNVNQLRQNNPEVSKKDLPFFKRLFKQILSQPSKQEIEQDSFIEIFQDEDVFPTMQKFINENKICIPKAKSIFKKFISSQKVKSDEYNISQIYVAKRFINTISNKWFSNWNTIRNLLIPKDKKNIPDFISVTSLKAALQKTQNIVEVNDLFRKEYRDILEEGSDFYQIFLKIWEKEFEKATDIYLNETKEIEKMITEDKKYLPNKKGRLKSGKKGSIQKEKFLDYTQSVFDIYLMMKYFSLEKGKERVWNPEALDEDAIGGFYEKFKEYYENINTWKYFNVFRNYLTKKPYNSEKIKLNFECSSLLSGWSKNYDSYGALIFEKNEKYYLGIINGTKFTEDEIEQLYLDIRNNNISLRLVYNYQKPDFKNFPRLFIRSSGSNFAPAVKKYNLPIDSVLNIYDKGLYKTSNKSSQNYHESLKKIIDYFKLGISQHESYKGFSFKWQETSEYDNISDFYKDVTRSCYKVTWENINFSKLYELIESGRLYLFQIYNKDFELDENIAPKGYNFKDKNGRRNLHSIYWKALFSNTNFKKTILKLNGGAELFYRKLTKNLTKDPIITVKNQIKIIKKNNNIFHKKRFTQNKIYFHCPVSINFTENDWKINTKICNTIRNNSKVKIIGIDRGEKNLAYYSVIDHQGNILETDSFNEVQEREDREPTDYQKKLDQIQKERDWQRKSWQEISSIKEMKKGYISQVVHQICKLIRKYEAIVVFEDLNIGFKRGRFAIEKQIYQNLELALAKKLNYMVFKDAKEEETGHFLQAYQLTPPVINFQDIGKQCGIIFYVPASYTSAICPACGFRKNISTFVEKIEKNIDLINKFNIVYDPDKDRFCFRYKRSDFIKSEKEKEDDSKVKLYSNTKLPDDFTFYSNVERFKYIRDQNNRGGKVELKYPNDSLKKLFHENGINFQNFSNISQLIKTRNFENENFYKPFIYIISLILQLRNTTIEINQNENNEKYRDFISCPHCYFHSENNLITLTKRYKGKKPFEFNGDANGAYNIARKGILILQKINKAKRLEEIEYGGLTVTQQEYDKYLALVSSKKA

SEQ ID NO: 1141 - protein, 1322 aa, unidentified
  REGION 1..1322: note = Cas Enzyme sequence
MTGIFKDFTHLYELQKTLRFELIPVGRTKELLEKNHVFEKDEKIAENYKDVKKYFDRLHKEFIKDAFSHTNLPENLLEGYEQKYFSHKLNPSRASRIDLEKIAKRLRTILLKSFNTEADQWKNRYLKNIEQTLKNKNEKQQKKELEKKLKKIKEGTKGIELFFKVEVFDFLKYKYPEAQINGKSIFDPFNKFGCYFKKFHETRINFYKDDGTSTAIPTRIINDNLSIFLENKKIFESKYSKKHKSVFAKNELRIFVLFYFNNCFSQKQIDGYNNTIALINSNVNQLRQNNPEVSKKDLPFFKRLFKQILSQPSKQEIEQDSFIEIFQDEDVFPTMQKFINENKICIPKAKSIFKKFISSQKVKSDEYNISQIYVAKRFINTISNKWFSNWNTIRNLLIPKDKKNIPDFISVTSLKAALQKTQNIVEVNDLFRKEYRDILEEGSDFYQIFLKIWEKEFEKATDIYLNETKEIEKMITEDKKYLPNKKGRLKSGKKGSIQKEKFLDYTQSVFDIYLMMKYFSLEKGKERVWNPEALDEDAIGGFYEKFKEYYENINTWKYFNVFRNYLTKKPYNSEKIKLNFECSSLLSGWSKNYDSYGALIFEKNEKYYLGIINGTKFTKDEIEQLYLDIRNNNISLRLVYNYQKPDFKNFPKLFIRSSGSNFAPAVKKYNLPIDSVLNIYDKGLFKTSNKSSQNYHESLKKIIDYFKLGISQHESYKGFSFKWQETSEYDNISDFYKDATRSCYKVTWENINFSKLYELIESGRLYLFQIYNKDFELDENIAPKGYNFKDKNGRRNLHSIYWKALFSNTNFKKTILKLNGGAELFYRKLTKNLTKDPIITVKNQIKIIKKNNNIFHKKRFTQNKIYFHCPVSINFTENDWKINTKICNTIRNNSKVKIIGIDRGEKNLAYYSVIDHQGNILETDSFNEIQEREDREPTDYQKKLDQIQKERDWQRKSWQEISSIKEMKKGYISQVVHQICKLIRKYEAIVVFEDLNIGFKRGRFAIEKQIYQNLELALAKKLNYMVFKDAKEEETGHFLQAYQLTPPVINFQDIGKQCGIIFYVPASYTSAICPACGFRKNISTFVEKIEKNIDLINKFNIVYDPDKDRFCFRYKRSDFIKSEKEKEDDSKVKLYSNTKLPDDFTFYSNVERFKYIRDQNNRGGKVELKYPNDSLKKLFHENGINFQNFSNISQLIKTRNFENENFYKPFIYIISLILQLRNTTIEINQNENNEKYRDFISCPHCYFHSENNLITLTKRYKGKKPFEFNGDANGAYNIARKGILILQKINKAKRLEEIEYGGLTVTQQEYDKYLALVSSKKA

SEQ ID NO: 1142 - protein, 1322 aa, unidentified
  REGION 1..1322: note = Cas Enzyme sequence
MTGIFKDFTHLYELQKTLRFELIPVGRTKELLEKNHVFEKDEKIAENYKDVKKYFDRLHKEFIKDAFSHTNLPENLLEGYEQKYFSHKLNPSRASRIDLEKIAKRLRTILLKSFNTEADQWKNRYLKNIEQTLKNKNEKQQKKELEKKLKKIKEGTKGIELFFKVEVFDFLKYKYPEAQINGKSIFDPFNKFGCYFKKFHETRINFYKDDGTSTAIPTRIINDNLSIFLENKKIFESKYSKKHKSVFAKNELRIFVLFYFNNCFSQKQIDGYNNTIALINSNVNQLRQNNPEVSKKDLPFFKRLFKQILSQPSKQEIEQDSFIEIFQDEDVFPTMQKFINENKICIPKAKSIFKKFISSQKVKSDEYNISQIYVAKRFINTISNKWFSNWNTIRNLLIPKDKKNIPDFISVTSLKAALQKTQNIVEVNDLFRKEYRDILEEGSDFYQIFLKIWEKEFEKATDIYLNETKEIEKMITEDKKYLPNKKGRLKSGKKGSIQKEKFLDYTQSVFDIYLMMKYFSLEKGKERVWNPEALDEDAIGGFYEKFKEYYENINTWKYFNVFRNYLTKKPYNSEKIKLNFECSSLLSGWSKNYDSYGALIFEKNEKYYLGIINGTKFTKDEIEQLYLDIRNNNISLRLVYNYQKPDFKNFPKLFIRSSGSNFAPAVKKYNLPIDSVLNIYDKGLYKTSNKSSQNYHESLKKIIDYFKLGISQHESYKGFSFKWQETSEYDNISDFYKDATRSCYKVTWENINFSKLYELIESGRLYLFQIYNKDFELDENIAPKGYNFKDKNGRRNLHSIYWKALFSNTNFKKTILKLNGGAELFYRKLTKNLTKDPIITVKNQIKIIKKNNNIFHKKRFTQNKIYFHCPVSINFTENDWKINTKICNTIRNNSKVKIIGIDRGEKNLAYYSVIDHQGNILETDSFNEVQEREDREPTDYQKKLDQIQKERDWQRKSWQEISSIKEMKKGYISQVVHQICKLIRKYEAIVVFEDLNIGFKRGRFAIEKQIYQNLELALAKKLNYMVFKDAKEEETGHFLQAYQLTPPVINFQDIGKQCGIIFYVPASYTSAICPACGFRKNISTFVEKIEKNIDLINKFNIVYDPDKDRFCFRYKRSDFIKSEKEKEDDSKVKLYSNTKLPDDFTFYSNVERFKYIRDQNNRGGKVELKYPNDSLKKLFHENGINFQNFSNISQLIKTRNFENENFYKPFIYIISLILQLRNTTIEINQNENNEKYRDFISCPHCYFHSENNLITLTKRYKGKKPFEFNGDANGAYNIARKGILILQKINKAKRLEEIEYGGLTVTQQEYDKYLALVSSKKA

SEQ ID NO: 1143 - protein, 1322 aa, unidentified
  REGION 1..1322: note = Cas Enzyme sequence
MTGIFKDFTHLYELQKTLRFELIPVGRTKELLEKNHVFEKDEKIAENYKDVKKYFDRLHKEFIKDAFSHTNLPENLLEGYEQKYFSHKLNPSRASRIDLEKIAKRLRTILLKSFNTEADQWKNRYLKNIEQTLKNKNEKQQKKELEKKLKKIKEGTKGIELFFKVEVFDFLKYKYPEAQINGKSIFDPFNKFGCYFKKFHETRINFYKDDGTSTAIPTRIINDNLSIFLENKKIFESKYSKKHKSVFAKNELRIFVLFYFNNCFSQKQIDGYNNTIALINSNVNQLRQNNPEVSKKDLPFFKRLFKQILSQPSKQEIEQDSFIEIFQDEDVFPTMQKFINENKICIPKAKSIFKKFISSQKVKSDEYNISQIYVAKRFINTISNKWFSNWNTIRNLLIPKDKKNIPDFISVTSLKAALQKTQNIVEVNDLFRKEYRDILEEGSDFYQIFLKIWEKEFEKATEIYLNETKEIEKMITEDKKYLPNKKGRLKSGKKGSIQKEKFLDYTQSVFDIYLMMKYFSLEKGKERVWNPEALDEDAIGGFYEKFKEYYENINTWKYFNVFRNYLTKKPYNSEKIKLNFECSSLLSGWSKNYDSYGALIFEKNEKYYLGIINGTKFTKDEIEQLYLDIRNNNISLRLVYNYQKPDFKNFPKLFIRSSGSNFAPAVKKYNLPIDSVLNIYDKGLFKTSNKSSQNYHESLKKIIDYFKLGISQHESYKGFSFKWQETSEYDNISDFYKDATRSCYKVTWENINFSKLYELIESGRLYLFQIYNKDFELDENIAPKGYNFKDKNGRRNLHSIYWKALFSNTNFKKTILKLNGGAELFYRKLTKNLTKDPIITVKNQIKIIKKNNNIFHKKRFTQNKIYFHCPVSINFTENDWKINTKICNTIRNNSKVKIIGIDRGEKNLAYYSVIDHQGNILETDSFNEVQEREDREPTDYQKKLDQIQKERDWQRKSWQEISSIKEMKKGYISQVVHQICKLIRKYEAIVVFEDLNIGFKRGRFAIEKQIYQNLELALAKKLNYMVFKDAKEEETGHFLQAYQLTPPVINFQDIGKQCGIIFYVPASYTSAICPACGFRKNISTSVEKIEKNIDLINKFNIVYDPDKDRFCFRYKRSDFIKSEKEKEDDSKVKLYSNTKLPDDFTFYSNVERFKYIRDQNNRGGKVELKYPNDSLKKLFHENGINFQNFSNISQLIKTRNFENENFYKPFIYIISLILQLRNTTIEINQNENNEKYRDFISCPHCYFHSENNLITLTKRYKGKKPFEFNGDANGAYNIARKGILILQKINKAKRLEEIEYGGLTVTQQEYDKYLALVSSKKA

SEQ ID NO: 1144 - protein, 1322 aa, unidentified
  REGION 1..1322: note = Cas Enzyme sequence
MTGIFKDFTHLYELQKTLRFELIPVGRTKELLEKNHVFEKDEKIAENYKDVKKYFDRLHKEFIKDAFSHTNLPENLLEGYEQKYFSHKLNPSRASRIDLEKIAKRLRTILLKSFNTEADQWKNRYLKNIEQTLKNKNEKQQKKELEKKLKKIKEGTKGIELFFKVEVFDFLKYKYPEAQINGKSIFDPFNKFGCYFKKFHETRINFYKDDGTSTAIPTRIINDNLSIFLENKKIFESKYSKKHKSVFAKNELRIFVLFYFNNCFSQKQIDGYNNTIALINSNVNQLRQNNPEVSKKDLPFFKRLFKQILSQPSKQEIEQDSFIEIFQDEDVFPTMQKFINENKICIPKAKSIFKKFISSQKVKSDEYNISQIYVAKRFINTISNKWFSNWNTIRNLLIPKDKKNIPDFISVTSLKAALQKTQNIVEVNDLFRKEYRDILEEGSDFYQIFLKIWEKEFEKATDIYLNETKEIEKMITEDKKYLPNKKGRLKSGKKGSIQKEKFLDYTQSVFDIYLMMKYFSLEKGKERVWNPEALDEDAIGGFYEKFKEYYENINTWKYFNVFRNYLTKKPYNSEKIKLNFECSSLLSGWSKNYDSYGALIFEKNEKYYLGIINGTKFTKDEIEQLYLDIRNNNISLRLVYNYQKPDFKNFPKLFIRSSGSNFAPAVKKYNLPIDSVLNIYDKGLYKTSNKSSQNYHESLKKIIDYFKLGISQHESYKGFSFKWQETSEYDNISDFYKDVTRSCYKVTWENINFSKLYELIESGRLYLFQIYNKDFELDENIAPKGYNFKDKNGRRNLHSIYWKALFSNTNFKKTILKLNGGAELFYRKLTKNLTKDPIITVKNQIKIIKKNNNIFHKKRFTQNKIYFHCPVSINFTENDWKINTKICNTIRNNSKVKIIGIDRGEKNLAYYSVIDHQGNILETDSFNEVQEREDREPTDYQKKLDQIQKERDWQRKSWQEISSIKEMKKGYISQVVHQICKLIRKYEAIVVFEDLNIGFKRGRFAIEKQIYQNLELALAKKLNYMVFKDAKEEETGHFLQAYQLTPPVINFQDIGKQCGIIFYVPASYTSAICPACGFRKNISTFVEKIEKNIDLINKFNIVYDPDKDRFCFRYKRSDFIKSEKEKEDDSKVKLYSNTKLPDDFTFYSNVERFKYIRDQNNRGGKVELKYPNDSLKKLFHENGINFQNFSNISQLIKTRNFENENFYKPFIYIISLILQLRNTTIEINQNENNEKYRDFISCPHCYFHSENNLITLTKRYKGKKPFEFNGDANGAYNIARKGILILQKINKAKRLEEIEYGGLTVTQQEYDKYLALVSSKKA

SEQ ID NO: 1145 - protein, 1322 aa, unidentified
  REGION 1..1322: note = Cas Enzyme sequence
MTGIFKDFTHLYELQKTLRFELIPVGRTKELLEKNHVFEKDEKIAENYKDVKKYFDRLHKEFIKDAFSHTNLPENLLEGYEQKYFSHKLNPSRASRIDLEKIAKRFKTILLESFNTEADQWKNRYLKNIEQTLKNKNEKQQKKELEKKLKKIKEGTKGIELFFKVEVFDFLKYKYPEAQINGKSIFDPFNKFGCYFKKFHETRINFYKDDGTSTAIPTRIINDNLSIFLENKKIFESKYSKKHKSVFAKNELRIFVLFYFNNCFSQKQIDGYNNTIALINSNVNQLRQNNPEVSKKDLPFFKRLFKQILSQPSKQEIEQDSFIEIFQDEDVFPTMQKFINENKICIPKAKSIFKKFISSQKVKSDEYNISQIYVAKRFINTISNKWFSNWNTIRNLLIPKDKKNIPDFISVTSLKAALQKTQNIVEVNDLFRKEYRDILEEGSDFYQIFLKIWEKEFEKATDIYLNETKEIEKMITEDKKYLPNKKGRLKSGKKGSIQKEKFLDYTQSVFDIYLMMKYFSLEKGKERVWNPEALDEDAIGGFYEKFKEYYENINTWKYFNVFRNYLTKKPYNSEKIKLNFECSSLLSGWSKNYDSYGALIFEKNEKYYLGIINGTKFTKDEIEQLYLDIRNNNISLRLVYNYQKPDFKNFPKLFIRSSGSNFAPAVKKYNLPIDSVLNIYDKGLYKTSNKSSQNYHESLKKIIDYFKLGINQHESYKGFSFKWQETSEYDNISDFYKDVTRSCYKVTWENINFSKLYELIESGRLYLFQIYNKDFELDENIAPKGYNFKDKNGRRNLHSIYWKALFSNTNFKKTILKLNGGAELFYRKLTKNLTKDPIITVKNQIKIIKKNNNIFHKKRFTQNKIYFHCPVSINFTENDWKINTKICNTIRNNSKVKIIGIDRGEKNLAYYSVIDHQGNILETDSFNEVQEREDREPTDYQKKLDQIQKERDWQRKSWQEISSIKEMKKGYISQVVHQICKLIRKYEAIVVFEDLNIGFKRGRFAIEKQIYQNLELALAKKLNYMVFKDAKEEETGHFLQAYQLTPPVINFQDIGKQCGIIFYVPASYTSAICPACGFRKNISTFVEKIEKNIDLINKFNIVYDPDKDRFCFRYKRSDFIKSEKEKEDDSKVKLYSNTKLPDDFTFYSNVERFKYIRDQNNRGGKVEPKYPNDSLKKLFHENGINFQNFSNISQLIKTRNFENENFYKPFIYIISLILQLRNTTIEINQNENNEKYRDFISCPHCYFHSENNLITLTKRYKGKKPFEFNGDANGAYNIARKGILILQKINKAKRLEEIEYGGLTVTQQEYDKYLALVSSKKA

SEQ ID NO: 1146 - protein, 1322 aa, unidentified
  REGION 1..1322: note = Cas Enzyme sequence
MTGIFKDFTHLYELQKTLRFELIPVGRTKELLEKNHVFEKDEKIAENYKDVKKYFDRLHKEFIKDAFSHTNLPENLLEGYEQKYFSHKLNPSRASRIDLEKIAKRLRTILLKSFNTEADQWKNRYLKNIEQTLKNKNEKQQKKELEKKLKKIKEGTKGIELFFKVEVFDFLKYKYPEAQINGKSIFDPFNKFGCYFKKFHETRINFYKDDGTSTAIPTRIINDNLSIFLENKKIFESKYSKKHKSVFAKNELRIFVLFYFNNCFSQKQIDGYNNTIALINSNVNQLRQNNPEVSKKDLPFFKRLFKQILSQPSKQEIEQDSFIEIFQDEDVFPTMQKFINENKICIPKAKSIFKKFISSQKVKSDEYNISQIYVAKRFINTISNKWFSNWNTIRNLLIPKDKKNIPDFISVTSLKAALQKTQNIVEVNDLFRKEYRDILEEGSDFYQIFLKIWEKEFEKATDIYLNETKEIEKMITEDKKYLPNKKGRLKSGKKGSIQKEKFLDYTQSVFDIYLMMKYFSLEKGKERVWNPEALDEDAIGGFYEKFKEYYENINTWKYFNVFRNYLTKKPYNSEKIKLNFECSSLLSGWSKNYDSYGALIFEKNEKYYLGIINGTKFTKDEIEQLYLDIRNNNISLRLVYNYQKPDFKNFPKLFIRSSGSNFAPAVKKYNLPIDSVLNIYDKGLFKTSNKSSQNYHESLKKIIDYFKLGISQHESYKGFSFKWQETSEYDNISDFYKDATRSCYKVTWENINFSKLYELIESGRLYLFQIYNKDFELDENIAPKGYNFKDKNGRRNLHSIYWKALFSNTNFKKTILKLNGGAELFYRKLTKNLTKDPIITVKNQIKIIKKNNNIFHKKRFTQNKIYFHCPVSINFTENDWKINTKICNTIRNNSKVKIIGIDRGEKNLAYYSVIDHQGNILETDSFNEVQEREDREPTDYQKKLDQIQKERDWQRKSWQEISSIKEMKKGYISQVVHQICKLIRKYEAIVVFEDLNIGFKRGRFAIEKQIYQNLELALAKKLNYMVFKDAKEEETGHFLQAYQLTPPVINFQDIGKQCGIIFYVPASYTSAICPACGFRKNISTFVEKIEKNIDLINKFNIVYDPDKDRFCFRYKRSDFIKSEKEKEDDSKVKLYSNTKLPDDFTFYSNVERFKYIRDQNNRGGKVEPKYPNDSLKKLFHENGINFQNFSNISQLIKTRNFENENFYKPFIYIISLILQLRNTTIEINQNENNEKYRDFISCPHCYFHSENNLITLTKRYKGKKPFEFNGDANGAYNIARKGILILQKINKAKRLEEIEYGGLTVTQQEYDKYLALVSSKKA

SEQ ID NO: 1147 - protein, 1322 aa, unidentified
  REGION 1..1322: note = Cas Enzyme sequence
MTGIFKDFTHLYELQKTLRFELIPVGRTKELLEKNHVFEKDEKIAENYKDVKKYFDRLHKEFIKDAFSHTNLPENLLEGYEQKYFSHKLNPSRASRIDLEKIAKRLRTILLKSFNTEADQWKNRYLKNIEQTLKNKNEKQQKKELEKKLKKIKEGTKGIELFFKVEVFDFLKYKYPEAQINGKSIFDPFNKFGCYFKKFHETRINFYKDDGTSTAIPTRIINDNLSIFLENKKIFESKYSKKHKSVFAKNELRIFVLFYFNNCFSQKQIDGYNNTIALINSNVNQLRQNNPEVSKKDLPFFKRLFKQILSQPSKQEIEQDSFIEIFQDEDVFPTMQKFINENKICIPKAKSIFKKFISSQKVKSDEYNISQIYVAKRFINTISNKWFSNWNTIRNLLIPKDKKNIPDFISVTSLKAALQKTQNIVEVNDLFRKEYRDILEEGSDFYQIFLKIWEKEFEKATDIYLNETKEIEKMITEDKKYLPNKKGRLKSGKKGSIQKEKFLDYTQSVFDIYLMMKYFSLEKGKERVWNPEALDEDAIGGFYEKFKEYYENINTWKYFNVFRNYLTKKPYNSEKIKLNFECSSLLSGWSKNYDSYGALIFEKNEKYYLGIINGTKFTKDEIEQLYLDIRNNNISLRLVYNYQKPDFKNFPRLFIRSSGSNFAPAVKKYNLPIDSVLNIYDKGLFKTSNKSSQNYHESLKKIIDYFKLGISQHESYKGFSFKWQETSEYDNISDFYKDATRSCYKVTWENINFSKLYELIESGRLYLFQIYNKDFELDENIAPKGYNFKDKNGRRNLHSIYWKALFSNTNFKKTILKLNGGAELFYRKLTKNLTKDPIITVKNQIKIIKKNNNIFHKKRFTQNKIYFHCPVSINFTENDWKINTKICNTIRNNSKVKIIGIDRGEKNLAYYSVIDHQGNILETDSFNEIQEREDREPTDYQKKLDQIQKERDWQRKSWQEISSIKEMKKGYISQVVHQICKLIRKYEAIVVFEDLNIGFKRGRFAIEKQIYQNLELALAKKLNYMVFKDAKEEETGHFLQAYQLTPPVINFQDIGKQCGIIFYVPASYTSAICPACGFRKNISTFVEKIEKNIDLINKFNIVYDPDKDRFCFRYKRSDFIKSEKEKEDDSKVKLYSNTKLPDDFTFYSNVERFKYIRDQNNRGGKVEPKYPNDSLKKLFHENGINFQNFSNISQLIKTRNFENENFYKPFIYIISLILQLRNTTIEINQNENNEKYRDFISCPHCYFHSENNLITLTKRYKGKKPFEFNGDANGAYNIARKGILILQKINKAKRLEEIEYGGLTVTQQEYDKYLALVSSKKA

SEQ ID NO: 1148 - protein, 1322 aa, unidentified
  REGION 1..1322: note = Cas Enzyme sequence
MPLSRIYQGRATLLELLSSEGEWIEQPDFDAYPKSPLWRHHDIFQRAINYYLVVFARLANLGESQNRVIQDLPKRMESHWEQFPGGPKRSRGLRDSLAGWVPGIGSSTTFEDGLSTISLPEDLVPEHGLLALEALLLDLGKGGDGIVRNTSKDYLPFYCITTHGKNYPRSTAIMRKKEGEKILPSVLWTESLQDGRDRLSKLHMEYFANPDATGRLRKGANLRPLLEEALDEELAIGGIGQQLAGDLRKQIRSISDDQSMPAHIGSSVKGAKKKRLWRLYLLMSQVHPCSELFSLMREVQPRDKVDVLSIAQPDYESRLTKHGQDPVELARGRRGFVFPSFSSLPPWDKAEGGIPSWKDFDIIAFAQALTALNQFKQKTEERETKRNQLESRFQYMTGAVDKWVAPKTNAEEEPESAPRRIEITDLRLAQTLRTKLVEQGEAGFTKAALRGYRDIREAWLKLKQANPDVSRDDLRKVVTDLHREKGDQMGYVALFLELCEEQYHVLWRDEEPADGYARDIVWALSDHDQLVRNLARKQEVINLTPAEPEYSRRLFMFSDLTGKSKVLFGDETIEVSIASPKDGGGRIAAHRARIRYSSPRQLRDGLLGSETSLWLQPMLKALGLPPVAPDKEPAVALMPKVQDIGSTDCIPMLLNFPMTLSPVPLSGTERWKKRFNGTREKNLHLLWENGTPGDGKPFTILSCDLGLRMSSAWALLHCSMAEPDHERYRAFDADGKWFSELKKTGTHRLPGEGGRKKLSNGETITDARGRKATKVETAEAAALEVQLGAVEEDQPRIQEEMATKTFPEQNDRLLWRAGRLLTRLRTYHRWSCAVAHDTSTENLIAELEGYQNPELVKCRKQLSEKGDTHRATFADDMGQNFRELRSKLDRVLLVLAERCIPLRGADWMWQRNPDQPDSTSNYHRLIRQSRPGKDGTKRRGQRGLSIYRIEQMENLRKLFLRLNRAHERTPGETKPIGEDRRGERPGEPCNDLLEKIQRIKNERVNLTAHLILATALGLRLKPTRDAKTPDYVHGEYEKIPGRQPVDFLVMEDLSRYLTTQGRAPSENRQLMRWTHRAVLLKVKELCEPFGLPVVEVTPAYSSKFCSRTGMPGFRCREVASSKQLRGRLGRVWNKQKVEPQKLEADEKSLFDQITKLEEVNSGRKAAKKPLHTLFVPEVGGPLFLPAEGVAKPANADTNAAINLGLKAVASPHCFDIHRRIPSERVAGEIRARRKNKREQSAFDAKKRTIQLAGEPSSKLKSSKNPNFFYDPEAIADGDRAECEGLKLASQVALLSKVRSLELAQCLALNSIRLEQWQDNLPM

SEQ ID NO: 1149 - protein, 1322 aa, unidentified
  REGION 1..1322: note = Cas Enzyme sequence
KLERDKSDFEAASSRVLHSSRATPAQRSAALLQLLSDKGDLNQICVARLPWLATAAGKFTATSKAAASSQESKRQQAVRNFFQWPDKEALNQSATLDLGLFLTQPPKDFVEGEAAAKMLRDYFTKASKKFPALETVKVSFDKFVASQTDALKIPSPGRKPSGLYPVAAVFKFFPALETLAAFRAATKSLAEAKDKELVSDAVADSRVADQPHFDYFTNLALVSGDGDDERDTRAVWFEFDLAAFIEAIKAPRRYFEDTMKREASADRFRQQIAATEGKGREASSTEEDSEPLPGFEGDERVRLLKIIVQDKLKWVAEAEGDASEAGPKEYAIRERTVRGFGEIKRRWRSAVESGNATEKRLLEILAEEQTAHRDDFGSATLYQQLAKPEFHPIWHNEGTQAWHAEDPLTAWLQYKELQADLADKERAIRFTPAHPKYSPRFFIFPKKSEAQPKTANRHPTKPGLLSRHDPGQLSFTGGVILRTEHGLAPTIVRIHYAAPRICRDQLRSSGDTNLYEAPWLQPMMAALGLDKSPERVNFANCRITLQPTNESDIQLTFPVEVNSEKIKAGVSREAVWENQFNLYPDGENFYNASLRWPHEKQRAKPPLPWHEQLNSFRCIATDLGQRDAGAFARMSVLGGSDFGKRPSRFIGEAGGKKWRAALERSGLFRLPGEDAQVWREKSGKDEKNPEDSGKPFDFREELWGERGRPARSWEADDTAELMRLLEVPPEAKELSLLSESWRSLLSFPEQNDKLLVAMRRYQSRIARLHRWCWFLKGDDKQQKSAWDEIADCEDTRLISGEQIAQAKKHDPRLQTELESQLQKRLELAPVLLVRIANRILPLRGRSWHWEKHPASKAQNTLHHLTQNGPKLDSKERPVWLRGQRGLSLERIEQVEELRKRFQSLNQTLRREVGGKPPIRRDESVPDPCRDLLDKLDNLKEQRVNQTAHMILAEALGLRLAPPPADKKTLRQQRDQHGTYEKIPDKSGKWIGPVDFIIIEDLSRYRASQGRAPRENSRLMKWCHRAVRDKLEQLREVFGIPLVETPAAYSSRFCSRSGVPGFRAEEIAPGFENESPWSWIKEKKDDHDQPTAEAAHIQELIQQMAEAQKIPTRSDKPLAMLRTLFAPLAGGPVFIPIVDSIPNAELAPKLVQADINAAINLALRAIADPRLWTIHPRLRSQREGGNKPGKAKMQKAKKEASDAPTEVKLLTREKRKFGESGKPLVIKHASSAKPDDTRQPNFFADLAGLNELAEQLAKKNPREYSWLTKEWTSAEISGENTTPPLVHGKSFWGTVKAKQWERIRAINSARLAAWHSKGDDVSM

SEQ ID NO: 1150 - protein, 1323 aa, unidentified
  REGION 1..1323: note = Cas Enzyme sequence
MSNLNQFIGLYPVSKTLRFELKPIGKTKENIEKNGILERDTQRAAGYKVVKRVMDEYHKAFIERILNDFENKLGEEDRTDWKNSLQEFYGLYLSPVSDNGRKDKLAKVQERLRKQIANVFKKDRQYNRLFADELIHDDLTEFVHAPIFENYIRSQKGNEDISDPEVKTIQETIVQDITCFRDFTTYFDGYNTSRKNMYVADGKATSIAHRMIDDNLPKFIDNVEVFKKIADCAEIGIHFATLYKAMEQYLNVPTINEMFLLEYFPMVLTQKQIDVYNAVIGGKTEADGTKIQGLNEYINLYNQQQKDKSKRLPKLKSLFKQILSERNAISWLPDEFESDDEMLESIESCYQDLRSTVFDGNHSLQSLLSSINDYDLNHIYISNDSSISLISQKQYGGWGVIGNAIIENAKAANPQKRNESNEKYEERISKIQKGIDSYSIGYLNDVLRNKLDDFKPIEDYFLKMGGAVDNETEQKPTFFTRIENAYTEAHTLLTSPYPEGRQLSQDKKNVEKIKNLLDAIKELQHFVKPLLGQGAESEKDNNFYGEFIPFWELLDQITVLYNMVRNRMTQKPYTDEKIKLYFDNNATFLRGWVDSKTESSDNGTQYGGYLFRRQNAIGEYDYYLGVSKDIKLFRRFKEVEESDKSTYERLDYYQLKSKTFYGTLYKGDYEIESSNIKRAIDNVVNSVGSTSIKGKLYNEKSKRQPKTATAIGYLKFIKQQDEELYNILLKDKSFDDSNKAIIASMKSTLLSLNRIPSAKEYTQKNYVLFSAMMDDIDILLQEKLFSYFPVSQRELDEAVERNLRPLYLFKITNKDLSFAENYENGLRKNRGTDNLHTMYFKALMSGAQSVFDIGSGAIYFREHKISYTEEQLKRGHHYEILKDRFSYPIISNKRYAIDKFQFHLSVNLNYNANKNVDINTLVNSYLKESNSTHIIGIDRGERNLLYLSLIDLHGNIVEQYSLNEIVNKYKGNTYCTNYHSLLEAKENQRNEARRSWQEMESIKELKEGYLSQVIHRIVELMVRYNAIVVLEDLNMPFKRGRQKVEKQVYQKFEKMLIDKLNYLVDKKLAITEPGGVLKAYQLTNKFESFQKMGKQNGFLFYVPAWNTSKMDPTTCFVNLFNTRYENMAKAKAFFGKFESIRYNSEKGWFEFAFDYNDFTTKALDTRTRWMLCTHGTRIETKRDPSQTNQFISEEFDLTSRFIELFSQFKIDPNGNLMEQICSQTEAAFYKSILHLLHLTLQMRNSKTRTDIDYLISPVMNSHGEFYDSRHCGKNLPDNADANGAYNIARKGLWIIEQIKQSEDLAHLKMTISNKEWLQYAQKE

SEQ ID NO: 1151 - protein, 1323 aa, unidentified
  REGION 1..1323: note = Cas Enzyme sequence
MTNTKQNSVFQDFTRKYALSKTLRFELRPVGNTREMLDAAGVFEKDRIIKEKYERTKPYFDRLHREFVQESLSDVALTGVAEYLSIFSEWRTDKKDKTKAKQLSDIEKSLRNEVTRFFEETAKIWAEKYSSIKIKKSGIDFLFEEGIFRVLKERYGNEDDAFVEDDAGNRISIFDQWKGFVGYFTKFYETRKNFYKDDGKASRIATRIVDENLKRFCDNIIAFDRLKQVLDLSEVQGHLKDSLTEVFSPRFYDECLLRQGIDRYNTILGGDSMDQNVKGINQYVNKYLQDHKGERLPFLKPLDKQILSEKESFLEGIESDGELLSVLELFQKNAGKKVGIFRSLMEKFVSKNDAFDLSKIYLSKEGFNTISRKWTDNTRDLESSLHKAMKADKPTGLSYDKTEDLYKFPDHIALSYLQEAISAQNQENTVWKERYYKTEENSSGVLFGNESVWEQFLHILSFEISSLYSTETTHTIAEKEDFATALINAERFEEVFSSDSIVRTIQTKVGYDVFEQKMTSVSGPEFGPDEKVFIKNYADSVLRIYQMAKYFSLEKKGVWNEEYELDSFYSEPEHGYLVFHENVREEIVKVYDALRNYLTKKPYSEEKWKLNFENPTLADGWDKNKESDNSAVILRKDGQYYLGVMKKGKTHIFSERNEKEMGIGGGGMSYEKMVYKLFPDPAKMMPKVCFSAKGLEFFNPPADIMEIYEKGTFKKGENFDIGSMRRLIDFYKECLALYPGWKGYDFSNVKESATYVTNIGEFYSDVAKAGYKVEFVAISESYVGEKNEAGELYLFEIHNKDWNLKDSKRKDGAKNLHTLYFESLFSEENVEADFPMKLNGQAELFYRPATATDKLGFKKNADGTDMVGKNGQKVVNHKRYSEDKILFHVPMTMNRGAGNIYRFNDEINELLAGNPAINIIGVDRGEKHLAYYSVINQKGEVLESGSLNTVNGIDYAGKLDERAKGREQARKDWQAVEGIKDLKKGYVSQVVRKLADLAIEYNAIIVLEDLNMRFKQIRGGIEKSAYQQLEKALIDKLSFLVEKGEKDSESAGHLLRAYQLAAPFESFQEIGKQTGIIFYTQASYTSKIDPATGWRPNLYFKYTSAKKAKEDIERFDAIHFRDGYFEFSYDLGKIVNSEKGATIFPERTDWTVGSCVERYRWNRKLNAGKGGYDYYSDLTEDFRSLFTSVGIGEEGDIKAQIAALDSEGNERFFRDFIFFFSLICQIRNTDPDAKDPDKADFILSPVAPFFDSRTPEAFGTKLPKNGDDNGAYNIARKGIIILDKISDYKRANGSCKNLGWGGLYISHAEWDDFARKNALKNSG

SEQ ID NO: 1152 - protein, 1324 aa, unidentified
  REGION 1..1324: note = Cas Enzyme sequence
LQKQNKTGNIMDELKDFKGFYPLLKTLRFELKPVELNEKDTTVLDNIKKSGIFKVEEDTYSLQERQKSDVIKSESYKKVKKIIDDYHRQFISKSLATFSLDEDYLKKYVSLFKNNSKSEKENKEFGTIKSKLREQISNTFDTTHLFNKEFFNKELIQFVNNDKAKEDLIKEFEGFTTYFTGFNDNRKNMYSAEDKASSIAHRIINDNLPKFLNNISSYDTINEIIQKDIQQIEENFKEELNGKKLDDVFKIENYSNCLTQKDITTYNTLIGGKSEGDKKIKGLKEYVNSYNQKNGTKLPKFIALYKQILSSKDSLSWLPEIFEDDAQCIGAIKKVYNDINEKVINTPKDKISIKSLLSNLTDYSSTGIFVQNEAKKELLTSILQSYYGDWAILTKALEIEYLEAHPRKGQKIETYNKNRDTYVKSFKSFSLQRINDLIGEDKPKIEDYFKSCGYKEETISCNKEKDLEKQEQEIIDTFKDDRNIILCTSDIKQEGDNLIVKTPNIFEQIERKYLLVKDILNADYQHSNKALIQDTQSIEKIKLFLDSIKKLQWFIKPLSGCEEEAKRDNNFYSDFDDIWEDLNEITPLYNSVRNYLTQKPYSEEKIKLNFQDSTLLGGWDVNKEPKNLGILLIKDGLYYLAIINKDTKKVFENKHFDSTKKCYQKIDYKQIADAGKDIQNIIRIGDDKYQRFTKNLDALKKKYIPEIYAIKQAESYLQDKSMSTIKTFSSDDLKTFITYYKEAAKQYWTWCNFSFSDEYQNWKSFTDDVNMQGYKITFRDIEEDYINQLVKEGKIYLFQIYNKDFSLYSKGTPNMHTLYWKALFDENNLKDVIYKLNGQAEVFFRKKSFTWNDEVMKNGHHAKELKGKFTYPIIKDKRYTEDKFLFHVPITMNFKAVGTNNINSKVNEFIKDNGIKHIIGIDRGERNLLYLTLIDLQGNIVRQFSLNTITNVYMNKDGKEEEKSFNYHNKLDNIEKDRQEARKNWQTIENIKELKEGYLSQVIHKITQMMIEYKAIVVLEDLNSIFMRGRQKVEKSVYQKFEKMLIDKLNYLVDKKKDPNEEGGLLNAYQLTNKFESFEKMSKQNGFLFYIPAWKTSKIDPVTGFTNYIYTKYENEEKAKELLSKFADILYNEEEKYFEFVISDYTKFNPKADETRKEWTICTYGKRIKTFRNKAKNNQWDNETINLTEALKTLFNSANIDYKTNLKDSILNQGEKAFFEELLNLLKLTLQMRNSNPNTDEDYILSPVADSNGVFFDSREHKGETASLPQDADANGAYNIARKGLWAVRQIQNADDGSKVSLAMSNKKWLNFVQNKEYLDDKDK

SEQ ID NO: 1153 - protein, 1324 aa, unidentified
  REGION 1..1324: note = Cas Enzyme sequence
MKNLNDFTGLYPVSKTLRFELKPTEDFNWETFLESTIFKHDQERTEAYPIVKVMLDQFHKWFIEDALNKSTINWDALYEAYIAPKNEINSDTLRKEQDKIRKEIVDNYFKKHDWWKYISKDHSKLFKIELPALLSDDAFIEGITDKYPNYTREVLTNALEKFQNFSVYFGGYFKNRDNMYKSDAQGTSIANRIVNENFTKFADNIRIYNRLKENCLSELQKVELNLIDELNGLTFDKIFSPSYFNKCLTQKGIERLNLYIGGKTGKNKDDKVFGINRVGNEFLQLNKESKLKLKDLKMVKLYKQILSDREQPSFLPEQFSNENELIKSIEDFHNLITEQKLFERLLSLMGRLKNGECEDLNKIHIVGSSLTQLSKVLYSNWEVLGIALRNKFQTDKTKKDKLEKEKDIQEWIERKSFSLAQIIEVESSLQDDKSIKVIDLFTTFNVWQKVNEKSQLVDLIKLCKDDFQTRFKAVKDLIEKGEKMQGNESAKEEIKTVLDNYQNLLHVVKLLNLGKKESYLDKDETFYNEYKEILSSTESDNVCLEDIIPLYNKVRSFLTRKLGDVGKMLLKFDCSTLADGWDVGKESANNSTILIDNSKYYLIISNPENKPDLSNAITSNTNNVYKKIVYRQIADPTKDLPNLMVIDGKTQRKTGNKDDDGINRVLDQLKDKYLPQEINRIRKLGSYLKTSEYFNKKDSQVYLAYYMQRLIEYKQGEMEFSFKNPEEYDSYSDFLDDITKQKYSLSFVNVSKEIIRQWLSEGKLFLFQIYNKDFEEKATGMPNLHTLYWKELFSEENLKDVVYKLNGEAELFYRKKTEGKPFTHNKGDVLVNKTFEDGSPVEPKLYKEYVEYFTGKVIENQLSKEAKNKLHLVKTNKAKLDIIKDKRYFQHKLLFHVPITINFKSEGVTKFNDYTLNYLRGNKEDINIIGIDRGERNLIYVSVINQKGENICPPKHFNIVESDMFGMEDKKRKFNYLEKLKQKEGNRDDARKNWSKIETIKDLKIGYLSFVVHEIAKLVIEHHAIVVLEDLNYGFKRGRFNVERQIYQNFEKMLIEKLNFLVFKNNSFSPDYGNILNGLQLTAPFGSFKELGKQSGWLFYVNASYTSKIDPQTGFANLFNMKDAKKDTKSFFEKFTEIKYEDGMFKFKFDYRNGFSIVQTDYKNIWTVCTNDKRILVSKDDISGKFKHEYVDITESIKKICIKNDVTDYHLISKEIILSIKEKKFFDDLFFYFKLTLQMRNSIPNSDVDYLISPVQINGKPFFDSRISNNINIADADANGAYHIALKGLYLIKNDFPTEKKGKSEYLKKISNEEWFEFAQKRSL

SEQ ID NO: 1154 - protein, 1324 aa, unidentified
  REGION 1..1324: note = Cas Enzyme sequence
MNRIYQGKVTNVEILKGKDGKPEPFDADPKLARQKWQDALWQHHQLFQDAVNYYLAAFATLIPADCNDEVWMDYRAAIVRSWNCYTGRQGSWNNPFGAACHVCGCAEDASFDTFQRKLLSLTGSKASEEQRFAALKQAFESATDAVQKLTDPDQPVEESLKGKGKDLFGEVLVALCAQRTKLTPRNVKGEQRSIANESTKKVNDGKRLEWADVFYFKTDTSRAAWPREEASAEIKQTLEDLIAALRKRVKKAKTEEQRGKLTDLVNRLAGQKESLATWCNDAASAIPEMKPTRKGSGGYDLKTAMLFALRPDADGFRDAFLLLNQARLKETTTTTIGIDAAYEARMAGGNHSRIFPFFCDLWSGRLNDAKVGQAVWPDFEKQAFIEVFTKIGQFILRERKFELRLDAAERTIERIRKQKETDPRLQAVEHLAADMANGAVDDNGQPRLYSIRERTLKAWPKVRMAWRDLIAKRPDTTAEMLLKEKNRLQERNREKFGSAALFDRLAEQRDIWNHTDEDPLRTWAAYVEAVEEKAHLESERLFAPAHRVHSPRFFRWSETNNKEHLPTNSDGAPFRFEADGLDLVAKKKTKLLIHFRSPRLLRDSLRKAGEKLNKDEPDQEWLPPVLRAFVKSRNWPCDKQTFAGASVRLAPPSEDNIQLVFEPELTATVLAKKWGEEFPFTPLRAKIENEWVDVGLRWPKSEAERLPWFERGEVKCLAVDLGLTNSAAWQVLQATIGDSSPVKQRLRHRLNPDAASPAWYAASLANGITRVAGENRWVFRRINEQDRKSGDRGVKKALEEAGANGTHAFLPELSGSAGRNATPEETDEAAQLFAKFKTRGYDIDERRPDWKVCRSFPEQNDDLLWGMKRVRGQLFRLNRLAEQFSTDHESNPFQSALATVEKLRKGDPLLELKAFSHDIATLRERIGKLAGDYLACFRDVLPQVADRILPVRRGQWDWRARDDGWHEMQLDRSKPRQDALLAGQRGISLARLSQLRDLRQLAQSLNHLCRHKAGERYQIRFGELVPEPFEDCRQALEDARKDRAKQIAHEIFAAALGVELAPPPADKKDRRRTESLHGVYRCLDRGPVNFIVLENLVRYRTSAKQGRRENRQLAAWAHRQIHKILRELCELVGMPIVLAPPEWTSHFSAKDHSAGFRAEEVRRNDPRLAFWREKAEEDSTSWWAEFVPMLDRLPEKASLLLPKRGGEVFVPLKDGSPLHNADLNAAYRLGLRALSHRDRSELIGTHWVKKKPYLVDVAGVLPGSTLRDGILTNTKSERTWEYVYEKLAWHRCREINRSRLKDWGVVVETKPVGVCLDEEDNIPY

SEQ ID NO: 1155 - protein, 1325 aa, unidentified
  REGION 1..1325: note = Cas Enzyme sequence
MSTSPVKNVFENFTNLYSLSKTLKFELRPIGNTQKILEEEKISEQDRIRREKYLQTKPFFDTLHREFINECLKDKEISNLEKYYAALERLQKNPKDKQVKKDFKKISQELRTELNSHFKANALFATIFSEEVFDELKKRYGAQDDAFLKDESGNFVLDDKKRKISLFDDWKNFTGYFIKFQETRKNFYKDDGTSTAVATRIIDQNLKRFCENLQLFTLIKNKINFEEAESNFSVKLDKIFSLNYYNSCLLQSGIDAYNRILGGEVKTNGEKIKGLNEIINKYRQDSGQKIDFFKLLDKQILSEKEEFFETIKNDDDLLDYLKDFLASAEEKIGYLKKLLDNFFENPGQYDLDKIYLSKEALNTILYKWMSDEGRSEFQKASFEQYKKDKTVTFDKDNSTYKFPDFVPLSLINNVLEEDLNSDLWKEKYLSDNTGGRIRKDGSKFDQFIDIFKYEFDSLFDHKRVETVEGGEREIRSGYDIYRTAFEKIVDKNTASFSVSSDEKLAIKNFVDNTLWIYQMGKYFALEKKRGWIDEYEIDSDFYYHADYGLKNKFYDNAFDKIVKQRMLIQSYLTKKPFNTEKWKLNFENPTLADGFDKNKEADNTAVILRKDGRYYLAIMKKNCNKIFDDRNRDKFTAKVNEDCYEKMVYKLLPGANKMLPKVFFSKKNIGYFQPSEEIMAIRNHASHTKSGEPQKGFEKKEFNIDDCHKIIDFFKQSIEKHEDWKQFGFQFSPTARYKDTSDFFREVEDQGYQVKFEAVSESYIQEKNNNGELFLFKIHNKDWNLKDGKRKEGNKNLHTMYFEELFSEENMRNDFVFKLNGQAELFFRPETPPVKLGKKRDKSNKDVINHKRYAENKYFFHVPITINRTAREEKRFNQKTNEFLADNPDINIIGIDRGEKHLIYYAGIDQKGNLLKDKDKKPVLGSLNIINGIDYSNLLEERAKTREKERQDWQDIEGIKDLKKGYISLVARKLADLMIEHNAIIILEDLSMRFKQVRGGIEKSVYQQLEKALINKLNFLVNKNEMDPQKAGSLLRAYQLTAPFTSFKDMGKQTGTIFYTQASYTSKTCPVCGFRPNVNWSNEDAIQKINISYQDNGFVIFYHLSDLIKDKKNKSKSKRGNILYQDKKAKDLFVIKTHGAVRYKWFLRNKPAAEMLSGIEKMPGGTQTGITLKYDITECLKNLFKKEGIDYTKDIKSEMNNNARTKKFYKDLSFLLYLLSNTRSTISGQDVDIINCPCCNFDSDKGFQECDFNGDANGAYNIARKGIMILEKINQFKRENGSLEKMTWGDLFIDIEEWDKFTQNPEYVDSKIAPVKTTPVSMANA

SEQ ID NO: 1156 - protein, 1325 aa, unidentified
  REGION 1..1325: note = Cas Enzyme sequence
MSTSPVKNVFENFTNLYSLSKTLKFELRPIGNTQKILEEEKISEQDRIRREKYLQTKPFFDTLNREFINECLKDKEISNLEKYYAALERLQKNPKDKQVKKDFKKISQELRTELNSHFKANALFATIFSEEVFDELKKRYGAQDDAFLKDESGNFVLDDKKRKISLFDDWKNFTGYFIKFQETRKNFYKDDGTSTAVATRIIDQNLKRFCENLQLFTLIKNKINFEEAESNFSVKLDKIFSLNYYNSCLLQSGIDAYNRILGGEVKTNGEKIKGLNEIINKYRQDSGQKIDFFKLLDKQILSEKEEFFETIKNDDDLLDYLKDFLASAEEKIGYLKKLLDNFFENPGQYDLDKIYLSKEALNTILYKWMSDEGRSEFQKASFEQYKKDKTVTFDKDNSTYKFPDFVPLSLINNVLEEDLNSDLWKEKYLSDNTGGRIRKDGSKFDQFIDIFKYEFDSLFDHKRVETVEGGEREIRSGYDIYRTAFEKIVDKNTASFSVSSDEKLAIKNFVDNTLWIYQMGKYFALEKKRGWIDEYEIDSDFYYHADYGLKNKFYDNAFDKIVKQRMLIQSYLTKKPFNTEKWKLNFENPTLADGFDKNKEADNTAVILRKDGRYYLAIMKKNCNKIFDDRNRDKFTAKVNEDCYEKMVYKLLPGANKMLPKVFFSKKNIGYFQPSEEIMAIRNHASHTKSGEPQKGFEKKEFNIDDCHKIIDFFKQSIEKHEDWKQFGFQFSPTARYKDTSDFFREVEDQGYQVKFEAVSESYIQEKNNNGELFLFKIHNKDWNLKDGKRKEGNKNLHTMYFEELFSEENMRNDFVFKLNGQAELFFRPETPPVKLGKKRDKSNKDVINHKRYAENKYFFHVPITINRTAREEKRFNQKTNEFLADNPDINIIGIDRGEKHLIYYAGIDQKGNLLKDKDKKPVLGSLNIINGIDYSNLLEERAKTREKERQDWQDIEGIKDLKKGYISLVARKLADLMIEHNAIIILEDLSMRFKQVRGGIEKSVYQQLEKALINKLNFLVNKNEMDPQKAGSLLRAYQLTAPFTSFKDMGKQTGTIFYTQASYTSKTCPVCGFRPNVNWSNEDAIQKINISYQDNGFVIFYHLSDLIKDKKNKSKSKRGNILYQDKKAKDLFVIKTHGAVRYKWFLRNKPAAEMLSGIEKMPGGTQTGITLKYDITECLKNLFKKEGIDYTKDIKSEMNNNARTKKFYKDLSFLLYLLSNTRSTISGQDVDIINCPCCNFDSDKGFQECDFNGDANGAYNIARKGIMILEKINQFKRENGSLEKMTWGDLFIDIEEWDKFTQNPEYVDSKIAPVKTTPVSMANA

SEQ ID NO: 1157 - protein, 1325 aa, unidentified
  REGION 1..1325: note = Cas Enzyme sequence
MSQNNIFEKFTNQYALSKTLRFELKPDPRTLAHMRGHLQFDESLQTFLDDQEIEDAYQILKPVFDKIHEEFITASLESKAVSEIDFLDYFVTYEKKEDVSRLETKLRQMFDGAYIAQAEIFKQKAGKDDKDKEILKKKGIKILTEKGILDYVARNVDMFSEINSKTEIEKAVEHFRGFFTYFAGFNQNRENYYTTKDSKATAVATRIVDENLPKFCDNIIAFKKVKDDYLNAFNYLKEKGNLLLDKDDKQLYTIDADIFEISHFNQSLSQTQIEEYNQKIGNANFVINLFNQAVKSEGGAKKLSYFKTLYKQIGCGERDAFFFTLTYDTKAEAEENKDKVLKPYSVEQLIKDVKTAGEKYFKGKTETDEIKTTKDFTSYILNRENYIGIYWSKIAVNTISSRYFADWHMLKDKLVESKVFTKGPKGDETNVKIPDAIELKKLFDVLDAVTDDWKDEGTFFKKGLTEVLKENEANKKYSDKNERRLKIITNSEKPSQALLQLIFDDLNQHVTAFLTQSDDVHKIKNYTEKDSKEVIKSWIDHTLSITSILKYFKVKEAKVTGESVDSVITQGLDFLLPSEDANWFKFYDALRNYLTKKPQDDIKKNKLKLNFENSTLADGWDVNKESDNFCIILQNELGRRYLAILKNDNKKIFEKELVEGKGKNKTTSLNILYAGDNLSWKKMEYKLLPGPNKMLPKCLLPKSDRKKFGATDEILKIYEEGGFKKNEPAFTKEKLVKLIDFYKLALAQYEDWRCFDFVFKDSVQYADISQFYSDVEKQGYKLNFVGINKVVLERLVEEGQIYLFEIKNQDSNNSKKSGHKNNLHTIYWNAIFESVVNKPKLNGSAELFYRKALATDKLEFITDKNGKEVIKNYRFSQEKFLFHVPITLNFCKKNYKLNDIVNRNISLSKDVNFLGIDRGEKHLAYYALVNQKGEILSQGSFNEINGQNYNEKLEILSGNRMQARKNWQTIGTIKELKDGYISQVVRKIVDMAVDKKRETPSFIVLENLNVGFMRGRQKIEKSVYQKLELALAKKLNFLVDKNVQNGELGSVTSALQLTPPVDNFVDIENKQQLGIMLYTKADYTSQTDPTTGWRKSVYLKKGSEEFIKEKVINAFSNFGFDGEDYHFDYVDSNNKLWKLYSGVKGISLDRYRGERNIDHNQWESTPQNIVKILDGVFKDFDHNRSYHDQIVGDGLNPKKINEHTGWESLRFAIELIQQIRNTGASDRDNDFLMSPVRSDKGEHYDSRIYLDIESNSGITKLPSSGDANGAYNIARKGIIMNEHIKMGLNPFIRDEEWDAWLAGEEVWKAWMDKNKKILEYKNKIT

SEQ ID NO: 1158 - protein, 1326 aa, unidentified
  REGION 1..1326: note = Cas Enzyme sequence
MAVELNRIYQGRVNHVYIFDENQNQVSVDNGDDLLFVHHELYQDAINYYLVALAAMALDSKDSLFGKFKMQIRAVWNDFYRNGQLRPGLKHSLIRSLGHAAELNTSNGADIAMNLILEDGGIPSEILNAALEHLAEKCTGDVSQLGKTFFPRFCDTAYHGNWDVDAKSFSEKKGRQRLVDALYSLHPVQAVQELAPEIEIGWGGVKTQTGKFFTGDEAKASLKKAISYFLQDTGKNSPELQEYFSVAGKQPLEQYLGKIDTFPEISFGRISSHQNINISNAMWILKFFPDQYSVDLIKNLIPNKKYEIGIAPQWGDDPVKLSRGKRGYTFRAFTDLAMWEKNWKVFDRAAFSDALKTINQFRNKTQERNDQLKRYCAALNWMDGESSDKKPPVEPADADAVDEAATSVLPILAGDKRWNALLQLQKELGICNDFTENELMDYGLSLRTIRGYQKLRSMMLEKEEKMRAKTADDEEISQALQEIIIKFQSSHRDTIGSVSLFLKLAEPKYFCVWHDADKNQNFASVDMVADAVRYYSYQEEKARLEEPIQITPADARYSRRVSDLYALVYKNAKECKTGYGLRPDGNFVFEIAQKNAKGYAPAKVVLAFSAPRLKRDGLIDKEFSAYYPPVLQAFLREEEAPKQSFKTTAVILMPDWDKNGKRRILLNFPIKLDVSAIHQKTDHRFENQFYFANNTNTCLLWPSYQYKKPVTWYQGKKPFDVVAVDLGQRSAGAVSRITVSTEKREHSVAIGEAGGTQWYAYRKFSGLLRLPGEDATVIRDGQRTEELSGNAGRLSTEEETVQACVLCKMLIGDATLLGGSDEKTIRSFPKQNDKLLIAFRRATGRMKQLQRWLWMLNENGLCDKAKTEISNSDWLVNKNIDNVLKEEKQHREMLPAILLQIADRVLPLRGRKWDWVLNPQSNSFVLQQTAHGSGDPHKKICGQRGLSFARIEQLESLRMRCQALNRILMRKTGEKPATLAEMRNNPIPDCCPDILMRLDAMKEQRINQTANLILAQALGLRHCLHSESATKRKENGMHGEYEKIPGVEPAAFVVLEDLSRYRFSQDRSSYENSRLMKWSHRKILEKLALLCEVFNVPILQVGAAYSSKFSANAIPGFRAEECSIDQLSFYPWRELKDSREKALVEQIRKIGHRLLTFDAKATIIMPRNGGPVFIPFVPSDSKDTLIQADINASFNIGLRGVADATNLLCNNRVSCDRKKDCWQVKRSSNFSKMVYPEKLSLSFDPIKKQEGAGGNFFVLGCSERILTGTSEKSPVFTSSEMAKKYPNLMFGSALWRNEILKLERCCKINQSRLDKFIAKKEVQNEL

SEQ ID NO: 1159 - protein, 1327 aa, unidentified
  REGION 1..1327: note = Cas Enzyme sequence
MSQKNIFEGFTRKYALSKTLRFELKPVGNTLQMLEDENVFEKDRVRKEKYKQTKSFFDRLHRQFIIESLTGKTIDGLDKYFTLLKKLEKDKKDKALQKEFKTLSEELRTQLNNHFQTEALFGVSVFEELKKRYGKEEGSFLKDKKDELVLDEEGNKISIFDEWKGFTGYFDKFQETRKNFYKDDGTSTAVVTRIIDQNLKRFCENTQLFKDIKYKIDFSEVEKTLSVDLGVVFSLEYYNSCLLQDGIDTYNKILGGEVVKDTNEKLKGLNEIINKYRQDHKDEKISFFKLLDKQILSEKEDFIENIEDDKELLQRLREFYISAEEKTEVLKTLLGDFFLHEEEYELDKVFLSKEGLNTILHRWMTDNGRDEFQKVIYEQTKKDKIVKFEKSDNSYRFPDFIALSLIKNALAKSFEEEKLWKDKYLKNEEDSKSKGFLSGEEPKWEQFIKIFESEFNSLFENEYQELIGGEERQVKKGYNVYKKDFEEIINRNESDFSVSSEDKLTIKNFVDSTLWIYQMGKYFALEKKRQWVGDEYDIDTKFYHHPDFGFKKKFYDDAYGKLIKVRMLLQSYLTKKPFSTDKWKLTFENPTLADGWDKNKEPDNSAVILRKDGRYYLAVMQKGHNKVFDDGNIQASGTDSYEKMVYKSISDPVKDIPNLMVIDGRTVRKTGRKDKKTGINHRLEELKDEHLPKEISDIRKSSSYLKTSENFNQEDSQKYLAFYMQRLIEYKKGEFDFEFKKPEEYGSYAEFLDDVGNQGYKIDFVGVSSEYIKNKNTSGELFLFEIHNKDWGSGPKDKNRKRTKNLHSMYFDTLFSKENAESNFPFKLNGEAELFYRPKTDEEKLGYKVKNTKTGKWKNIVVKKSESVPEEAVVDHKRYLKNKTFLHVPITLNRTADDSHYFNQKVNEFLLNNPEINVIGLDRGEKHLIYYAGIDQKCNLLKDKNGNTALGSLNEINGVNYHKLLEERAKGREKARQDWQNIENIKDLKKGYISLVVRKLADLIIEHNAIIVFEDLNMRFKQIRGGIEKSVYQQLEKVLIKKLNFLVNKGEKDPQKAGHLLRAFQLTAPFITFKDMGKQTGVIFYTQASYTSKTCPECGFRPNVKWDQDGLMEKINITFTENNFKIAYKASDFLKQKNSSKRGNRLYADKKGKDEFILSTKNAIRYKWFSRNKKDFELKKGEERMLEQTENGITIKYDITECLKGLLEEQDIDYKNNIVKQISEKVATKKFFTELAYYLYLLSNTRSSVSGTNIDQINCPHCGFHSDKKFNGVDFNGDANGAYNIARKGVMILEKINQYHNVNKTLDKMNWGDLFIDIEEWDKHTQD

SEQ ID NO: 1160 - protein, 1327 aa, unidentified
  REGION 1..1327: note = Cas Enzyme sequence
MASLLEFTDKYSKQLTIKNELIPVGKTLENIQKDCLVEKDYVLNDNYKKTKKIVDDFLRDFINRCLSNFQINEWNELAEAIKKDDDDKLKKVQEKLRALVISRFENFDLTSAYSLTLEKSINDEVEDEDLVLDANKKESAFKYIFNKNLFKIVLPSFLKSDPEKLKLISSFDNFFTYFSGFFENRKNIFSKKDISTSIAYRIVHDNFPKFLENINCFNTCKNECPQVIENAEKSLKSNRVIDENRSLSDYFAVESYNNYLSQEGIDSYNKVICGLPAVAGQEKIQGLNEYINLASQKDKDLKVKLKNKKSLKMATLFKQILSDKETFLFDVFESDDQVIDSVKQFCISQWNKDSGLAVILNLVKSIQIMSEDELSGIFIQGKHLNYLSKLVYGGSRWSKIRNDFEIYLACEDADKEVKKKFKRNQGDVDKTVNGLEFSLKDLNSIVKKEENSDEIFSIMLSKKVFSDFESLVKINDGEWPTDLKNSESKQKIKAPLDGLLNIYNELEIFQSNSYSKSNNFYADFDKEMYELSSIVPLYNKSRNYCTKKEYSDEKFKLNFNSPQLGNGFSYSKEKDHLTILLKKNRFYYVGILNKGTKIDFESEKALASKQDDYYEKVKYYLIPQAIKYLPKNSLLSSKKVKEHFKEASDDYVVNNEKFVKPLVISKHIFNIYHQKTYIKDYNNTDNEYRTPLKELISFLVDFLHSYKSTSVFSFCKIKNPGYYTDIEEFYRDVDNLGYQIDFSNIKTSFIDEAVANGDLYLFRINNKDFAQKSTGTKNLHTMYFEAIFDKKNLSNTVIKLNGGAELFYRKASLNNKEITHKKGSILVNKICKNGETLPDKIRNEIYQYENKFIDTLSEESKQVLHNQVIIKQATHDITKDKRFTTDKFFFHCPITINYKEGSTNDFNKQVLSFLRNNSDINIIGIDRGERNLIYITVINQKGEIIDSISFNSVKNRSGKIEQTVDYEEKLAIREKERIEAKKSWDSISKIASLKEGYLSAIIHEICLLMVKYNAIVVLENLNTGFKRIRGGISEKSVYQKFEKMLINKLNYFVSKKESDWSKPCGLLKGLQLSDPFQSFEKLGIQSGFILYVPAAYTSKIDPTTGFANVINFSKVRNVESIKNFFSTFNNISYVNKEGLFKFSFDLDALSKNGFNSFVKFKKTKWDVYTYGERLTHQKNDQGKIDDKKINLTENMKNLLNKFKVSFDLENNLIPSLTKSDLDAKFWESMFDIFKKTLNLRNSTTNGKEDVLISPVKNAKGEFFVSGEKDKSLPQDCDSNGAYHIALKGLMILERNNLVKNEKEIKKIMAISNVDWFDYVQRRCGSLK

SEQ ID NO: 1161 - protein, 1327 aa, unidentified
  REGION 1..1327: note = Cas Enzyme sequence
MKDMNQFVGIYPVSKTLRFQLKPIGRTIENIEKNGILERDNKRAVGYKSLKKVIDEYHKAFIEQMLDDFELNLPDNENLDSLEEYYALYHQPSSTPKKKENITKVQDSMRRMISERFTKSEQYKRLFGKELIREDLAQFVTTPRFEAYIRSQKGNENLSDDEVHQIQDEIVQEISQFKEFTTYFSGFYENRKNMYVSDDKSTSIANRMIMENLPKFIDNMDVFERIKESEIASHFDTLYKEMEEYLNVNSIPEMFQLDYFSTVLTQKQIDVYNAIIGGKTLKDGTKIQGLNEYVNLYNQHQKDKSNRLPKLKPLFKQILSERNAISWLPEEFANDNEMLENIEQCYQNLREKVFEGENSLKKLLKEIADYDLEHIYLSDDIQLTNIAQKQYGNWGVIKKAFEESIMAENPKRRNETADKYENRIEKLMKANEYFSLAQINRLMKNHQGEEVTPIETYFATMGAENTENSQKPNIFIRIENAHTEAMTLLTTSYPEDRNLSQDKDNVEKVKKLLDAIKDLQHFVKPLLGNGAEGEKDSQFYGEFTPLWEILDQITPIYNMVRNRMTQKAYSDEKIKLFFDNNGSFLNGWVDSKTESDNATQYGGYLFRKQNSIGEYDYYLGVSANTKLFRSFNPVEVYDRSCFERLDYYQLKGKTFYGSLYKGDYEKESANIKQAIDNVVYHAGSKLLKERINAERAKKQSKVATATGYLNFVKQIEPELYDKLLQDELFEKGNQAIITSIKVTLQSLDRIPSAKEYAHKNYTLFSEMMDDVEIMLQGKVFSYFPVSQRELDDAIDRTTKPLYLFKITNKDLSFAETHAKGLRKSRGTDNLHTMYFKALMNGNQDVLDIGSGSIFFRKHKIVYTEEQLQRGHHHEMLKDKFSYPIISKRRYAFDKFQLHLSVTMNYNSDKNKDINPIVNAYLKESNATHIIGIDRGERHLLYLSLIDLHGNIVEQYSLNEIVNEYKGNTYSTNYRDLLDAKEKQRDEARRSWQTIENIKELKEGYMSQVIHKIANLMVKYNAIVVLEDLNLGFMRGRQKVEKQVYQKFEKMLIDKLNYLVDKRLEFNDQGGVLKAYQLTNTEKMFSQQYRNNKNTLGKQCGFLYYIPAWNTSKMDPTTGFVNLLDTRYENMAKAKAFFAKFRSIRYNAIKGWFEFTFDYDDFTTKASGTRTKWTLCTYGTRIETKRDPKQNNNFTNEEFDLTDRFKEFLAKYHIDFGGNLMEQICSQDDVTFFKELLHLLHLTLQMRNSITGTDVDYLISPVINANGDFYDSRKCGKNLPQNADANGAYNIARKGLWIIEQIKQSKDLSKLKLAIGNKDWLRYAQRLT

SEQ ID NO: 1162 - protein, 1327 aa, unidentified
  REGION 1..1327: note = Cas Enzyme sequence
LALILKLERDKSDFEAASSRVLHSSRATPAQRSAALLQLLSDKGDLNQICVARLPWLATAAGKFTATSKAAASSQESKRQQAVRNFFQWPDKEALNQSATLDLGLFLTQPPKDFVEGEAAAKMLRDYFTKASKKFPALETVKVSFDKFVASQTDALKIPSPGRKPSGLYPVAAVFKFFPALETLAAFRAATKSLAEAKDKELVSDAVADSRVADQPHFDYFTNLALVSGDGDDERDTRAVWFEFDLAAFIEAIKAPRRYFEDTMKREASADRFRQQIAATEGKGREASSTEEDSEPLPGFEGDERVRLLKIIVQDKLKWVAEAEGDASEAGPKEYAIRERTVRGFGEIKRRWRSAVESGNATEKRLLEILAEEQTAHRDDFGSATLYQQLAKPEFHPIWHNEGTQAWHAEDPLTAWLQYKELQADLADKERAIRFTPAHPKYSPRFFIFPKKSEAQPKTANRHPTKPGLLSRHDPGQLSFTGGVILRTEHGLAPTIVRIHYAAPRICRDQLRSSGDTNLYEAPWLQPMMAALGLDKSPERVNFANCRITLQPTNESDIQLTFPVEVNSEKIKAGVSREAVWENQFNLYPDGENFYNASLRWPHEKQRAKPPLPWHEQLNSFRCIATDLGQRDAGAFARMSVLGGSDFGKRPSRFIGEAGGKKWRAALERSGLFRLPGEDAQVWREKSGKDEKNPEDSGKPFDFREELWGERGRPARSWEADDTAELMRLLEVPPEAKELSLLSESWRSLLSFPEQNDKLLVAMRRYQSRIARLHRWCWFLKGDDKQQKSAWDEIADCEDTRLISGEQIAQAKKHDPRLQTELESQLQKRLELAPVLLVRIANRILPLRGRSWHWEKHPASKAQNTLHHLTQNGPKLDSKERPVWLRGQRGLSLERIEQVEELRKRFQSLNQTLRREVGGKPPIRRDESVPDPCRDLLDKLDNLKEQRVNQTAHMILAEALGLRLAPPPADKKTLRQQRDQHGTYEKIPDKSGKWIGPVDFIIIEDLSRYRASQGRAPRENSRLMKWCHRAVRDKLEQLREVFGIPLVETPAAYSSRFCSRSGVPGFRAEEIAPGFENESPWSWIKEKKDDHDQPTAEAAHIQELIQQMAEAQKIPTRSDKPLAMLRTLFAPLAGGPVFIPIVDSIPNAELAPKLVQADINAAINLALRAIADPRLWTIHPRLRSQREGGNKPGKAKMQKAKKEASDAPTEVKLLTREKRKFGESGKPLVIKHASSAKPDDTRQPNFFADLAGLNELAEQLAKKNPREYSWLTKEWTSAEISGENTTPPLVHGKSFWGTVKAKQWERIRAINSARLAAWHSKGDDVSM

SEQ ID NO: 1163 - protein, 1328 aa, unidentified
  REGION 1..1328: note = Cas Enzyme sequence
MNNLEMFTGLYQKSKTLRFELIPVGKTMENIEKNGILEKDAALAESYKRMKKTIDCFHKEFIDKRLALLSDNKTFETSLQKYFDLEAASPEQKKEDSYSQALKATMKDLRKCIADSFGSEKKTQSKDFKILFDKELIQKVLPAWALENKQYYDNAFKSFTTYFFGYHENRKNMYTSEEKATAVSYRLINENLPRFLNNARIFLKLEQVGFSEQFAAVMRDMEPWINYNSLQDMFAPNAYVNTLNQSQIEAYNTVIGGRLAGGKKYQGLNEYINLYNQTHPDAKLPRLKQLYKQILSDRESASWLPAEFDNAEEAIKAVYTFYDSLFCLQGAQEKTIVEMLQDCLAELPDTDLGGIYINGKSLSLTSQAVFGKYSFLRDAMERWYLTKISPNYEERYKKAKNDASRDKIEKEKDKFTSGTVSLAVLCDAVKEYAAALDGEEYLEAKTRAENGALLNHFSDIRKELCAIDAAKDAAEYLFSALDSDIRQTDTDKIKALLDALMKLLHKIKPLYTEDNSAIQKDDYFYGAFDRVYESFAELPKLYDKVRNYFTKKAFKTEKIKLFFENKGNFLGGWVESKTDNSDNGTQAGGYLFRKKNGIGEYDYYLGISSDAKLFRFSNEVAQDDRSDFERLNYYQPKDQTVYGAGYKGNRTYAEDKQILKEAILYEVRALDAQEAVAALDAYYDNNQSSPSGALAILHDGFPMIYQNVICGKEFQKQNQALIDALKLTLSKYYRLPGAAEAAQKDYTLFTEIMDVITTLCANKVYSYCAVSAKEMDEVLNREGKGLYLFKISNKDLSYAETYLAGKRKSRGKENLHTMFFKALMSGSQSVYDLGSAEVFYRKHSIEYKEPTHRAGTPLSAKNPNRHGASVFGYDLYKDRRYSVDKFQLHFSVIANYSCASKYHEMQKKTADYLRNNPNVNIIGIDRGERHLLYLSMIDRNGNVVRDENGKLIQYSLNTITGSYRDKDGNEVEFETPYRDLLDKKEEARKQAREAWGTIESIKELKSGYLSQVIHHISKLMVKYNAVVVLEDLNSGFKNGRKRVEKQVYQNFEKALIEKLNYLVLKDAEEDAPGGLYHALQLTEPFKSFREMSQQNGFLLYVPAWNTSKIDPVTGFVDLLKPRYRNIPEAKEFFRRFTGIVYDAGEDAFRFVFDYEKFTEKAEGTRTVWTISTQGKLRYSFSKTANNGKGAEIRVDVTDNLKRLFSAYQIAFEDGEDLRNAICSQDSAEFFAKLIKALQTVLAMRYSSAEDGKDFILSPVADENGKYFCSESADCNTLGLPGDADANGAYNIARKGLLVLRKLDLTGRINTHLTNREWLAFAQSGAVDE

SEQ ID NO: 1164 - protein, 1328 aa, unidentified
  REGION 1..1328: note = Cas Enzyme sequence
MQTTKEELQAKLTEKEIKKGSVFEDFTRKYALSKTLRFELKPVGKTRENMAKNLEYDDTLQTFLADQKIEDAYQILKPVFDKIHEEFITKSLESAKAKEINFSEYFNLYKKQKAEQDKDERKKLDKPIGDEEKRLRKEFEKPFEEYGKIFKQNINGVDEDNEETEEVEDEKKRGFRKLLKAKFVLDYLARKVENEKTNKVKIGTENFDKEVIKNALITFKGFSTYFSGFETNRLNYYVTKDEKATAVATRIVSDNLPKFVDNILDYEKYRNDYNKVFTKLKENGKDLKIKNSKWDGKDKETEFIPAYDIKTDKTSFEITNFVNCLSQSEIDAYNAKVANVNYLVNLYYQQTKTKLPKFKVLFKQIGCGEKKEFLKVIKDNKELKDVLTKAKVLGEEYFIDGKDKDTVKTFIDYFLSLNNFENIYWSDKAINTISGKYFGNWGDLKEKLLKEKVFNKDKNTGEAKIPQAVQLSDLFKVLDAEKDWREEGVLFRENFKENNEEKQNIINNAQTPHEALPKMICEDIKVLAKNFVDGADEILKIEEKDYQKDDNKEKIKAWLDNALFAGQILKYWKVKARYSVDSDFTDIFDNVKVSEVVEDYDVIRNYLTQKPQDNIRENKLKLNFENGSLLGGWPDGQEKVKGAVILQKEEKYYLGILKQRNIFDTSKKDNPIYQNTDNIYKRLFLINLSYKTLAGRGFVSEFGQKYSDMARTNQKEAIRSLKKIIKDRYVAKYPLLQKILDKEYGNDKKTFDSEIQEVLRDSYVCEFCPVNSKIINENIENGNIYLFEIKCNPNKIQWNYWKNILSENSPHQLAGQGKIFYRPAGLEKKVKKGYEGKSWVIKNKRYTEEKFLYHQATKRNYKSPSYSKITSLVNKSVAGNKNQLFLGIDRGEKHLAYYSLVNLKGEILEQDTLNLPFAKPIKTEKWFEDKNKSENDKDRWYKKEVECKDYNDLLDARASNRDMARKNWTTIGNIKDLKDGYISQIVRKIVDLAIYNGGRREKGFRETPAFIVLENLNIGFKRGRQKIEKSVYQKLELALAKKLNFLVGKNAKDGEISSVQNALQLTPPVANFSDIEKANQFGIMLYTRAAYTSQTDPLTGWRKTIYLKRGSKNYIKDQIIGNKKEKIEPAFSEIGFDGKDYYFIYKDKKIGKTWTLFSGHKGKKLDRFCSKNSKGVWAPEAQDVNGILDGVFDDKFNKKKSLLGQIKSGAEITDWESLRFAIDLIQQIRNSGLAECDNDFILSPVRDEKGNHFDSREVKNEKLPINGDANGAFNIARKGIIMNEHIKRGLKLFIRDEEWDAWLAGKEIWEKYIKQNMKDLKSFSRIRS

SEQ ID NO: 1165 - protein, 1328 aa, unidentified
  REGION 1..1328: note = Cas Enzyme sequence
MEEIFTEITNKNAFSLQKTLRFELKPMVLNEEENQLQPISESDSYLKNFNSGYLEKLKQIIKHDEERAEDYQEIKVYIDELHKQFIDRVLPEIKSLEIDFKKAFEMYELTKKRYAKSSSDKEEEEQSKEKKNNLKAWQDFQKEARKKISNFLKKQPEYENLFEKELFSDLIPKSNYSKQLGEKSPNDLAKSFSGFTTYFQGFHENRKNIYADEGSTSLAHRIINENLPKFFTNILQYVILNKDHNLLVGQFKENYSDEELTELFNPNSFVSFLNQSGVDRYNEIIEAKKGIETAKSKDGLKQLANKYKQAKQIKNLPNFTPLYDQILGKRGLDQNDESILRAGVTDDKNLLNSLKDFNKNIQPSVFELINICSELNKANAEEIFIMGSSLESLSSSVFGDYSVLSRVMKHHYIESRISASRTTEKKLEKDSEAYLKQETYSLQEIQSAIDYYIEKGNELESKSLFDYFTACKYNSNHTLSEEIKIAWDNLQPILELEQIDKDRAIPKTQEEQGGKGFQQVEKIKLFLDSYMQLLHFAKPLHLVKKRNPVTISKKDEAFYAIFDKNYTNLEAELIPVYNQTRNYLTKKPYSLEKFKINFEKGTLLNGWDLNKEKDNLGVLFLKNNNYYLGIMSNNKIFDFQKQNIKKEALSLSGQQDGYHKVIYKYLAGPNKMLPKVFFAKSNLEKFSASEEILRIRNTSSFTKNGEPQPSYKKAEFNLNDCHAMIDFYKQSLASHEDWSQFGFQFLETSQYSDISQFYEDVAKGGYKISFVNISDNYINEKVKAADLFLFQIYNKDFSEQKKGKDGKPNLHTMYWNAAFRPWLDRSESNVKLNGEAEIFFREHSIERKITHRSGESIDKKNPNNSGKSLFSYDLIKDKRFTSDKFFFHVPITINYKNKKERNNKQFNDVVNSVIKNNRDVNIIGIDRGERNLLYYTVIDQDGRILEQNSFNEISSQCSTSEKSSTFDYHKKLDEKEDERKQARKSWGTIENIKELKSGYLSHVIHKLAKLILKYNAVVCLEDLNAGFKRGRMKIEKQVYQKFELALIHKLNCLVLKDREEGEFGSYTNPYQLSSKITSYQDIFSQTGIVFYVNPAYTSKICPKTGFVNFLDLRYENLEKAQSLMGSFNSIRFNNHENYFEFDLDYKKIPQTQNKECGEKTQWTVGTYGNERFSYNPKTKGYDTYNVTEKLAHLFKKHNIGYEDGSDLREKILASTQDAVSFFKELLFLLRLTMSLRHVNENHDCILSPIKHPELGFFDSRDVKDSIEAEEPRDADANGAYHIAMKGLQIFAEKISSENPKLSIKKEDWFRFIQNHHESKWKEKSLSPI

SEQ ID NO: 1166 - protein, 1328 aa, unidentified
  REGION 1..1328: note = Cas Enzyme sequence
FTNRYSLSKTLRFELKPIGKTREMLEENEVLRKDKIVHEKYQQTKPFIDRMHRDFVAEALENKLGGLDEYWQALRDWQTDKKDKVLQNNLHKIQRKLREQIVTFFNIQATVWHQKYPGTKKNTTEILKEKDVFTTILKQRYGEDKDSFLVDKNGEFILNQQGDKISIFDGWKNFVGYFDKFFQTRENFYKSDGTTTAIATRIIDQNLKRFCDNITTIQNIKDKVKFLEVENNFDLKIQDVFSLNFYNNCLLQPGIDRYNEFIGGKTLDNGQKLRGINELINEYRQNNKNEKIPFLKKLDKQILSEKDQSVSDELQDDNDLYSILISFIEVADKKVDILRHLFTDFVENNQQYDLDKIYFSKEAFNTITRRWTSETDSFETEVYQTISQKNTKDFYESLRRDKDDSVIKKEKDSYKFPSFISLGHIKQALDRIEAGGMYASKVNEEKSEKYFWKDVYIVKIASLKDKTIWQQFLAIYLFEFNSLLERDITVQKKTSEGKIVQDKIQAGLNVFAKDLKDKLNNFKKEDTKIAIKNYADEVLHIYQMAKYFAVEKKRLWLDHYDLDPLFYNHAQYGYQLFYDGAYEEIVLVYNKLRNYLTKKQFNQEKWKLNFENATLADGWDKNKERDNTAIILRKNTRYYLGIMKKEFNNLFIDEKEKEFLASNDEKNVYEKMVYKFFPDPSKMFPKVCFSAKGLEEFQPSEEIYKIYKNEEYKKGDRFSVNSLHKLIDFYKNCLNKYEGWKSYEFKHLKPTEDYQDNIGEFYQDVATDGYSISFQKISQNYIDKQNQAGKLYLFEIYNKDWSDKATGTKNLHTLYFESVFSNENRDLNFPMKLNGQAEIFYRPKTKNLEKKQIVTQKNEITLTKGDKAWQKKRYLEDKIFFHMPMTLNRIPNHSTNFNAEINNFLSGNDDINIIGVDRGEKHLAYYSVINQKGEILDTKSLNMIVNKKTKEKVDYAGKLEARAKNREQARKDWQTVEEIKDLKKGYISQIVRTLADLAIEYNAIIVLEDLNMRFKQIRGGIEKSIYQQLEKALIDKFNFLIDKEEADPQKAGHLFNAYQLTAPFKSFKDMGKQTGIIFYTQASYTSKIDPLTGWRPNLYLKYVNAEKAKELIGKFSSIVFNENKNRFEFTYDLENFSSNIKEKPEKTEWTVCSCVERIRWNKKLNENKGGYDYYENLTDGGLLNKNASEENISNFKELFRKIGIDYRVDILSQIKQLESKNNEKFFRNFIFLFNLMCQIRNTDQDKEGDENDFILSPVEPFFDSRRAKQFGENLPQNGDENGAYNIARKGIIILNKITKYKQTNGDDQKMSWGDLYVSNQDWDNFASK

SEQ ID NO: 1167 - protein, 1328 aa, unidentified
  REGION 1..1328: note = Cas Enzyme sequence
RLALILKLERDKSDFEAASSRVLHSSRATPAQRSAALLQLLSDKGDLNQICVARLPWLATAAGKFTATSKAAASSQESKRQQAVRNFFQWPDKEALNQSATLDLGLFLTQPPKDFVEGEAAAKMLRDYFTKASKKFPALETVKVSFDKFVASQTDALKIPSPGRKPSGLYPVAAVFKFFPALETLAAFRAATKSLAEAKDKELVSDAVADSRVADQPHFDYFTNLALVSGDGDDERDTRAVWFEFDLAAFIEAIKAPRRYFEDTMKREASADRFRQQIAATEGKGREASSTEEDSEPLPGFEGDERVRLLKIIVQDKLKWVAEAEGDASEAGPKEYAIRERTVRGFGEIKRRWRSAVESGNATEKRLLEILAEEQTAHRDDFGSATLYQQLAKPEFHPIWHNEGTQAWHAEDPLTAWLQYKELQADLADKERAIRFTPAHPKYSPRFFIFPKKSEAQPKTANRHPTKPGLLSRHDPGQLSFTGGVILRTEHGLAPTIVRIHYAAPRICRDQLRSSGDTNLYEAPWLQPMMAALGLDKSPERVNFANCRITLQPTNESDIQLTFPVEVNSEKIKAGVSREAVWENQFNLYPDGENFYNASLRWPHEKQRAKPPLPWHEQLNSFRCIATDLGQRDAGAFARMSVLGGSDFGKRPSRFIGEAGGKKWRAALERSGLFRLPGEDAQVWREKSGKDEKNPEDSGKPFDFREELWGERGRPARSWEADDTAELMRLLEVPPEAKELSLLSESWRSLLSFPEQNDKLLVAMRRYQSRIARLHRWCWFLKGDDKQQKSAWDEIADCEDTRLISGEQIAQAKKHDPRLQTELESQLQKRLELAPVLLVRIANRILPLRGRSWHWEKHPASKAQNTLHHLTQNGPKLDSKERPVWLRGQRGLSLERIEQVEELRKRFQSLNQTLRREVGGKPPIRRDESVPDPCRDLLDKLDNLKEQRVNQTAHMILAEALGLRLAPPPADKKTLRQQRDQHGTYEKIPDKSGKWIGPVDFIIIEDLSRYRASQGRAPRENSRLMKWCHRAVRDKLEQLREVFGIPLVETPAAYSSRFCSRSGVPGFRAEEIAPGFENESPWSWIKEKKDDHDQPTAEAAHIQELIQQMAEAQKIPTRSDKPLAMLRTLFAPLAGGPVFIPIVDSIPNAELAPKLVQADINAAINLALRAIADPRLWTIHPRLRSQREGGNKPGKAKMQKAKKEASDAPTEVKLLTREKRKFGESGKPLVIKHASSAKPDDTRQPNFFADLAGLNELAEQLAKKNPREYSWLTKEWTSAEISGENTTPPLVHGKSFWGTVKAKQWERIRAINSARLAAWHSKGDDVSM

SEQ ID NO: 1168 - protein, 1328 aa, unidentified
  REGION 1..1328: note = Cas Enzyme sequence
MNSKTSIFDFSNIFGRDITLRFKLTPVTINSKGEVKDANGADPYRPYLSADEELQEQYELLKTAIDAYHQMYIDKKLKHILCLPLTEKGKDGVEHDTAKSKFVKSCLAYIKDYGEKDKKRQTADLRTFISRVFADDNISSLPPYKVKSDFITKTLRQWLEQPDTKVEKKEAILDLIEKNGSKLYANCQGLLEARQRLYEKDGKSTSVPYRCIDRNLPRFSKDYHLFEKILGDCSDVFDFEQLDKDFSEELKGIARLSGIRVESVREVFQPLLYLAYLNQEGIQYLNTIIGTKKEKGTSALGLNEYINQYNQKQGIKKKKDGIPMLNKLNNQILFGDEVFIETLAEHKEAIPVIKKVVSSLGKLGAFDGECHENKLYQFLLSLSSYAGNIYVNTKVVAQISSSLWGDYSILYDAVKHDKNGRLIQKSVTLGELNEKIERLKLEDNRDAFEYFRRSQVKDVVHGSSNVGVFEQLKNCYNDFVEKKILKCSFFSEDQVLVIQRLFDSILSLQRIFKVFCPSLYEVDSDGLFVAKFSDYWNVLRGFDKDYDLLRNLFKRKPYSTDKIRVHFGLSNLMDGFVDSWTDKKDKGTQYNGYILRQAHSFVDENTSKELQEFQRYNYYLVISGNVRLFREKGNALVCEKKKEKLVASDEFSGFERFDYYQSSINNFNREFKRLTGRDRKSFTDEILQNEGKKELKSTYIENLIKVAKSMKRLTALQNLVSDEKVRKYSENLDYETLSAEIGQILATGRERKYVPVSTNEMKNLLKSSKNNKGEEVRTFMFRISNKDLSYAETMQKGERKSHGAENMHTMYFRALLDTLQNTFDIGTGTVYFRKASDKRKMKYDEKNPTHRKGDELAFKNPYNKGKKKSVFGYDLIKDRRYTKDSYLFHLSITQNYQKKGNAEDLNAMVRDYIRTQEDLRVIGIDRGERNLLYATMIDGEGHILAQKSFNVIGYQGTTASGESFQVETDYHQLLNEKAEKMRSLQREWKEMDKIQDMKDGYLSVVVHELAKMVVENNAIIVMEDLNMGFMESRQSQLANVYQKFEEKLRNKLQFYVDKRKRNDEPSGLYHALQLAGTETKDNQNGFIFYIPAWNTSKIDSVTGFVNLFNLKYTNIKDAKAFFSTFEKIEKNVETGHYDFTFSYSSMARKKMAKRMDGTRDSWTISTHGSRIVREQKGNYWEYREIESLTSEFDALFEKYSIDTRCRLKEAIDKCGEAEFFKELIRLMKWTLQLRNYDDRGNDYIVSPVCYRGNEYYCSLDYDNEEGMCISKIPCQMPKDADANGAFNIARKGLMLCERLKKGEKIGVIKGTEWLQYVQNMSERYVGMV

SEQ ID NO: 1169 - protein, 1329 aa, unidentified
  REGION 1..1329: note = Cas Enzyme sequence
MGTKKEFKSFGDFTNLYEVQKTLRFELKPVGNTPKMLEEDDVFGRDKIIKEKYQQTKPFIDRLHREFVDESLEGVSLSGLKNYFKILEHWRNNKKDKKKERLRKEIVKCFNDTAKSWAIEKYKNLGLKKKDIGILFEEGVFDLLKEKYGNEDDSFVKDEDGNFLKNKKGEKLSIFDEWKGFVGYFTKFQETRKNFYKGDGTETALATRIIDQNLKRFCDNLEDFKKLKNKIDFSEVEKNFGKTISDVFSLDFYNQCLLQKGIDSYNEIIGGKTLENGEKLKGINELINKYRQDNKGEKLPFLKLLDKQILSEKEKFSIGIENDDKLIEALKSFYKTAEEKTKILRDLFSDFVSHNENYDLSKTYLSKEALNTIAYKWASDTRKFEECIFEVINQKEIREWYDSFRKDKKDPKIGKDENGYKFPNFITLRHIKNGLENISSDERFWKGKYYKNDENKNDKRFLVGNENIWDQFLQIFKFEFDQLFDSNGEEVKMGYNIFKKDFENIINKKKFKNDENSKIAIKNFADSVLWIYQMAKYFAVEKKRNWNDSYELSEFYTNPKNGYLLFYKNAYDEVVKTYNNLRNYLTKKPYSEEKWKLNFENPTLANGWDKNKEPDNSAVILLKDGKYYLGLMRKGNNKIFDDRNKAEFAKNIENSVYEKMVYKLFSDPKKDFPHVCFSKKGLDFFKSSEEIVKIYENEEFKKGNNFSVVKMQKLIGFYIDCLSKYDGWKCYDFASVKKPKKYTENISEFYRDVSQNGYKIFFQDISKTYIDQKNQNGELYLFEIYNQDFAEGKTGKKNLHTLYFENVFSPENIAKNFPIKLNGQAELFFRPKTEEAGLGYKIWDKKEKKWVKVNNRENGSVVDRKRYSEDKIFFHCPITLNRETGSIYRFNNYVNNFLSENGINIIGVDRGEKHLAYYSAIDQKGKILDSGSFNEIDKVNYAEKLEKRAGDREKARQDWQKVEGIKDLKSGYISQVVRKLADLAIEHNAIIVLEDLNMRFKQIRGGIEKSIYQQLERALIDKLSFLVEKSEKDPNKAGHLLKAYQLAAPFTSFKDMGKQTGVVFYTQASYTSKTCPECGFRKNNNKFYFVNVEKAKEVLRKLKSFEYDGKNKCFGLQYRLSDILSEDETNNSKSQKRNNILYSEKERKDEFNLSTKNAIRYKWHDKNTERGRIISDGESVYEENQSEEVKQTKRGIVKKYDITKCLTGLFERAGLNHKQNLLEKLASEKLDSDFYRNLFNYLNSLFEIRNSISGTKIDYISCPECGFHSDDKSAIVKNADENGAYNIARKGIMVLEKIKQYKNQNGGLDKMNWGDMFIGIEEWDKFTQK

SEQ ID NO: 1170 - protein, 1329 aa, unidentified
  REGION 1..1329: note = Cas Enzyme sequence
MNSKTSIFDFSNIFGRDITLRFKLTPVTINSKGEVKDAKGAGPYRPYLSADEELQEQYELLKTAIDAYHQMYIDKKLKHILCLPLTEKGKDGVEHDTAKSKFVKSCLAYIEDYGEKDKKKQTEDLRTFISKVFADDNISSLPPYKKVKSDFITKTLRQWLEQPDTKVEKKETILDLIEKNGSKLYANCQGLLEARQRLYEKDGKSTSVPYRCIDRNLPRFSKDYHLFEKILGDCSDVFDFEQLDKDFSEELKGIARLSGIRVESVREVFQPLLYLAYLNQEGIQYLNTIIGTKKEKGTSALGLNEYINQYNQKQGIKKKKDGIPMLNKLNNQILFGDEVFIETLAEHKEAIPVIKRVVSSLGKLGAFDGECHENKLYQFLLSLSSYAGNIYVNTKVVAQISSSLWGDYSILYDAVKHDKNGRLIQKSVTLGELNEKIERLKLEDNRDAFEYFRRSQVKDVVHGSSNTGVFEQLQRCYNDFCETKILKCSFFSEDQVLVIQRLFDSILSLQRIFKVFCPSLYEVDSDGLFVAKFSDYWNVLRGFDKDYDLLRNLFKRKPYSTDKIRVHFGLSSLMDGFVDSWTDKKDKGTQYHGYILRQAHSFVDENTSKELQESQRYNYYLVISGNVKLFREKGNALVCEKKKEKLVASDEFSGFERFDYYQSSIKNFDLKFKRLTGRDRKSFTDEILQNEGKKELKSTYIENLITVAKSMKRLTALQNLVSDEKVRKYSENLDYETLSAEIGQILATGRERKYVPVNTNEMKNLLKSSKNNKGEEVRTFMFRISNKDLSYAETMQKGERKSHGAENLHTMYFRALLDTLQNTFDIGTGTVFFRKASDKRKMKYDEKNPTHRKGDELAFKNPYNKGKKKSVFGYDLIKDRRYTKDSYLFHLSITQNYQKKGNAEDLNAMVRDYIRTQEDLRVIGIDRGERNLLYATMIDGEGHILAQKSFNVIGYKGTTASGESFQVETDYHQLLNEKAEKMRSLQREWKEMDKIQDMKDGYLSVVVHELAKMVVENNAIIVMEDLNMGFMESRQSQLANVYQKFEEKLRNKLQFYVDKRKRNDEPSGLYHALQLAGPETKENQNGFIFYIPAWNTSKIDPVTGFVNLFNLKYTNIKDAKAFFSTFEKIEKNVETGHYDFTFSYSSMARKKMSKRMDGTRDSWTISTHGSRIVREQKGNYWEYREIESLTSEFDALFEKYSIDTRCRLKEAIDKCGEAEFFKELIRLMKWTLQLRNYDERGNDYLVSPVCYRGNEYYCSLDYDNEEGMCISKIPCQMPKDADANGAFNIARKGLMLCERLRNGEKIGVIKGTEWLQYVQNMSERYVGMV

SEQ ID NO: 1171 - protein, 1330 aa, unidentified
  REGION 1..1330: note = Cas Enzyme sequence
MEQFTNLYNVQRTLCFELEPVGVLPEKVQELLAIDKERNLLAPQVKEMMNELHKSFITRTLRNIMLIKDDEEEDISNAKSLIKIKDLLHSTCQLYAIPAKNDKDKDELEQKQAEFRNIISLLFTKDDFYAKLFGKDILDELHNHFTNDEGKLEILDKFKGFLGYFDTFRTNRKNMYVDAENETAIPFRIVNQNLPKFCDNLVAYQRLKSSDLAKCIATVYSDFEDMLNVESLDEYFCVDNYLNCLCQTDIQTYNYIIGGREQEGTKQLLKGLNQHINEFNQTHSKAERLPLFKPLFKQILSDKEKVSWLSEEFKTDRDMLQAIDQCYQDLAIILMGNEECSLPVLLKNISSFNQDGIYISNGKALNLISKRLYSGYSVITDALKQVWKANHERGRRESEENYEKKCNDTIKKTSSFSLSAINQALGITTGDGTNTIATYFAKFGSERECGKTYVQELSELYNEALSALHTKDKDIVNDDEKVGAIKALLDHLKCIQHFIEPLHMKNVEENADAEFYNIFDDIYEQLDNKLTGLYNRVRNRMSRKPYNDDKFQIFFENNSQVLRGWMDSKTENSDNGTQYGGYLFRKINEIGEYDYFLGVSKNVNLFRRFNEVAVADYSEYQRLNYCQLKSETFYGACYKSAVGNDFEQDKSRLTDMILKLCYKHGSENLQDAINKERRKSDPKKSKLSSPKSLLELIEKKDSECYEKILKNKSFLELDALVIESIKKTMASVNVKYLQNLANNDYDSFIQAMEVVDKGCKFGKIFDYFTISQSELDAALEDESKRLYLFKITNKDLSYSKNYKQRKSRGTDNLHTMFFKALMEGGYGTYDIGTGSLYYREMTPGLAKYKPTHPQNIPIDKKSDFFRKRGKQSVFEYDIQKDKRFTRNMFKFHLSINANYTCGNANKIMLNMLNTKVIDAIRNGRFKHIIGIDRGERHLLYVTVINLNGDIVEQFSMNIMESEKLIDGEPVVTNYKSLLDAKMNLRTEQKRTWRRQESIKDLKEGYLSQAVHKLTKLIVDKYQAIVVLENLSKGFMQTQIESAVYAKFEQMLITKLNLYIDKQKDKNAIGGLYHPLQLTSPYKSKSTASIQNGIIFYIPAWCTSKIDPVTGFVNYIRPKYENIQAAREFLSKFDDIRYNPEHDYFEFHIKDYTAFNPKAKSSRQDWIICTNGDRIRNFRDPNNNEWTSEKINLTREFKKLFESYKIDYNCNLLALILIQDKKDFFYNSNVKEPSLFPLLQLTLQLRNSFIKSDVDYILSPVADKNGCFYDSSKCGACLPNNADANGAFNIARKGLILVNRILSTPINEKLSLAISNEDWLNYAQSQQLSND

SEQ ID NO: 1172 - protein, 1331 aa, unidentified
  REGION 1..1331: note = Cas Enzyme sequence
MVNKQNERGDFDDLTNLYEISKTLRFELVPVGETDRMLKEENVFKVDENIKRKYQQTKLFFDRIHREFAKEALSVEGILSELEEYLAIFIEWRKDKKIHEKTLNQKEKELRKQVVSAFNAMANKWIERYGDVNLKKKNVEFLFEEGIFRVLKERYGEEDGSTITASDTGEVFSIFDSWKGFTGYFAKFFETRKNFYKDDGTATAIATRIVDENLRRFCDNLIVAQRLTENIDFSEVENNFQIKIKEVLFMEFYNKCLLQDDIDFYNKVIGGETLKTGEKLKGINELVNLHRHKTGEKLPFLKTLDKQILGRKEQFLDEIESEEELLEKLKDFQNVATKKIKVIKSLFGDFVENNENYDLEKIYISKKAFNTISRKWTGETEQFEKLLFESMKSDKPAGLKYDKKENNYKFPDFIAVSYIKDALENFSGEQKFWKDRYYIELELDNQVVWKQFLDIFYWEFSSLFKRSFVNKETGEISEVGCDIFEKKFINLIDDFEYNQKSKILIKDFADSVLSVYQMANYFSLEKKRKWSTEFETDSKFYDDSEIGFRNCFYEDVFEGIVQVYNKLRNYLTKKPFSEEKWKLNFENPTLAAGWDKNKEKDNSTVILRKDEKYFLAIMKKGNNVIFDDRNKALFSQNLEHGKYEKVVYKFAKDVTLGIPKSTTQTKSVIAHFKNSDEDYQITNGSAVGDFLEPLVVTKRIFELNNKIYSKNNLGKVLYRSEVSKDKQKEYIKLFQKKYLVLGGNKNLYRDAVKEWIDFCKSFIKVYPSYKYFDFSLLKEAVEYNSVDEFYKELNSYGYAISFQDISCDYIEEKNKNGELYLFQIKNKDWNKGSTGMKNLHTLYFESLFSEENIKNNFVTKLNGGAEIFYRPKTSKEKLGRKKIVRNGQEVFVVNHKRYSEDKIFFHCSIALNRGKGKLLKFNARINDLLANNPDINVIGVDRGEKHLAYYSIIDQKCKILDSGTLNEVGAKVDYHEKLSNRAKKREDGRRDWGWGQIEDIKNLKKGYVSQVVHKLAELIIKYNAILVFEDLNMRFKQIRGGIEKSIYQQLEKALIDKLNFLVKKGEKDSKSAGHLLKAYQLAAPFETFDKMGKQTGVIFYTQASYTSKIDPITGWRPNLYLKHSNANDSQKKIAKFSRIEFINDRFEFEYDLKKFIEMKEVPENTKWTLCSCVQRYRWNRKLNANKGGYDSYNDLTKNFKALFESVGIDIKKNIKEQIVKMEIKGNEKFFKSFIFYWQLLCQIRNTDELKKGDDNDFILSPVEPFFDSRKKNGDDLPKNGDDNGAYNIARKGVIVLNKISEFSKQNGNCEKCGWKELYVSAKDWDDFVQAK

SEQ ID NO: 1173 - protein, 1331 aa, unidentified
  REGION 1..1331: note = Cas Enzyme sequence
MGTTMFKEFINQYPVSKTLRFELLPIGQDGKRLEAKDAAKLLAKILEQDRKIKDAYVALKPVMDKIHEEVINESLASEEAKKMDFSEYLDKYKQKKDIQSEEESLRGKIVKTYNTGAQSIKAKSGNDSKGKPVLKKEGVKCLMEAGILKYVQKVISELKDEKEKKELEAHLETFKKFFTYFSGYNQNRENYYAKEEKATAVATRIVHDNLPKFCDNCIQFSDGKVQKKKKKKSDTAEESVTRKDEYLNAYQYLKNANRITQIKDAETKKMIEAYPVDEKMFEMTKFSEHLSQAGIEEYNRIIGHYNLLINLYNQASKDEVGFKKLLPFKTLYKQIGCGEKKALFYALKYDTRQQQDAKEKTNETLNLEETLIKISEIGEKYFKNSSEATDVITIHGFVNWLKQTEDWDGIYWSKTAVDKISDIYFANWYLIKDRLKGNKACVYIDKNKEVQINDAVELSGLFEVLNQEKETGWSKNLFKNSVLEDRQSLIDEKLSPSQNLINLICADMEDLAKDFCDKAADILKITDYRNEENILKIKKWLDTAQSMIWIIKYFDVKESKVKGSAINPELTNMLSALLRTNDAQWFDWYDAVRNYLTQKPQDGAKENKLKLNFKNPILLGGWSDGQEKSKGSVLLKNDNKYYVGILNERSIFDTTKKKNPIYDAADESAGRLILKNLAFKTLAGKGFVRDYKVKYGDLGKRDPQEAINQLQSFIKEQYIDQYPLLKQVAEKKYTDKKEFDKEVQNVLTECYKCNFTPVNWNLVLQYVADEKLYLFEIYSKDFGERSTGTPNLQTKYWEHTFQDNSTIQLCGGGEMFFREKAITDDKKFVHPAHQPIYRRSDGKTESRFSHPIIKDKRFTTEKYFFHIPIKINYQAPEQSFINGKVNLRLHNTINEKVNDLFTQAEDIQFLGIDRGEKHLIYYSLADAKGNIIEQNHFDVINKKDYLQEINEAARKRRAKQENWQQKGNISNLKDGYISLVIHEIIQKIKDKDGKFKPTFIVLEDLNKGFKRSRQKFEQQVYQKFELALAKKLNYLVDKNVPVGEIGSVAKALQLTPPVANYQDIENRKQLGIMLYTRANYTSVTDPVTGWRKTIYLKKGKEKDVEDQILETFSEIGVDGRGDYFFQYADANPGKIWKLWSGKNGKSLERYRARRGKDKNEWIVDSYAAKEMLDQLFADFDKNQSLLEQIKNGKTLSKIDDKNTAWESLRFVIDIIQQIRNSGDAAQGQDGNFLLSPVRNEHDVHFDSSEYQSLQNPDLPKDADANSAYNIARKGIVMYEHIRQWIKEGKPKFKKTTDLDLFISDKEWDLWVANNEQWRKDLKIFASKQQKA

SEQ ID NO: 1174 - protein, 1331 aa, unidentified
  REGION 1..1331: note = Cas Enzyme sequence
  VARIANT 379: note = X can be any amino acid
  VARIANT 429: note = X can be any amino acid
  VARIANT 923: note = X can be any amino acid
  VARIANT 928: note = X can be any amino acid
  VARIANT 976: note = X can be any amino acid
  VARIANT 1153: note = X can be any amino acid
  VARIANT 1171: note = X can be any amino acid
  VARIANT 1323: note = X can be any amino acid
MGTTMFKEFINQYPVSKTLRFELLPIGQDGKRLEAKDAAKLLAKILEQDRKIKDAYVALKPVMDKIHEEVINESLASEEAKKMDFSEYLDKYKQKKDIQSEEESLRGKIVKTYNTGAQSIKAKSGNDSKGKPVLKKEGVKCLMEAGILKYVQKVISELKDEKEKKELEAHLETFKKFFTYFSGYNQNRENYYAKEEKATAVATRIVHDNLPKFCDNCIQFSDGKVQKKKKKKSDTAEESVTRKDEYLNAYQYLKNANRITQIKDAETKKMIEAYPVDEKMFEMTKFSEHLSQAGIEEYNRIIGHYNLLINLYNQASKDEVGFKKLLPFKTLYKQIGCGEKKALFYALKYDTRQQQDAKEKTNETLNLEETLIKISEIGXKYFKNSSEATDVITIHGFVNWLKQTEDWDGIYWSKTAVDKISDIYFANWXLIKDRLKGNKACVYIDKNKEVQINDAVELSGLFEVLNQEKETGWSKNLFKNSVLEDRQSLIDEKLSPSQNLINLICADMEDLAKDFCDKAADILKITDYRNEENILKIKKWLDTAQSMIWIIKYFDVKESKVKGSAINPELTNMLSALLRTNDAQWFDWYDAVRNYLTQKPQDGAKENKLKLNFKNPILLGGWSDGQEKSKGSVLLKNDNKYYVGILNERSIFDTTKKKNPIYDAADESAGRLILKNLAFKTLAGKGFVRDYKVKYGDLGKRDPQEAINQLQSFIKEQYIDQYPLLKQVAEKKYTDKKEFDKEVQNVLTECYKCNFTPVNWNLVLQYVADEKLYLFEIYSKDFGERSTGTPNLQTKYWEHTFQDNSTIQLCGGGEMFFREKAITDDKKFVHPAHQPIYRRSDGKTESRFSHPIIKDKRFTTEKYFFHIPIKINYQAPEQSFINGKVNLRLHNTINEKVNDLFTQAEDIQFLGIDRGEKHLIYYXLADAXGNIIEQNHFDVINKKDYLQEINEAARKRRAKQENWQQKGNISNLKDGXISLVIHEIIQKIKDKDGKFKPTFIVLEDLNKGFKRSRQKFEQQVYQKFELALAKKLNYLVDKNVPVGEIGSVAKALQLTPPVANYQDIENRKQLGIMLYTRANYTSVTDPVTGWRKTIYLKKGKEKDVEDQILETFSEIGVDGRGDYFFQYADANPGKIWKLWSGKNGKSLERYRAXRGKDKNEWIVDSYAAKEXLDQLFADFDKNQSLLEQIKNGKTLSKIDDKNTAWESLRFVIDIIQQIRNSGDAAQGQDGNFLLSPVRNEHDVHFDSSEYQSLQNPDLPKDADANSAYNIARKGIVMYEHIRQWIKEGKPKFKKTTDLDLFISDKEWDLWVANNEQWRKDLKXFASKQQKA

SEQ ID NO: 1175 - protein, 1331 aa, unidentified
  REGION 1..1331: note = Cas Enzyme sequence
MNRIYQGRVSKVEIPDGKDEWKKLDDGESALWQHHQLFQDDVNYLLAAFAALVPTSCEDDIWKDYQAAIERSWESYTGRQGIWDRPFENACVIVGCKKDASFKEFRRKLNSLTGSKASEKQKFEALKQLFEPATEAAKKLKKHDEPVEESLKGKAKDLFGSTLVNLCAQKTKVTPRDVIAKQRNRASECTKKVNEGERLKWADVFYFKTDTSAAKWSREDAAKNIIQFLDKLLGEVEEKEKDAKTSDQKKKMADLAERLEKQKKPLAAWCNNSKTDLPTTEPTRKGSGGYDLKAAVLFSLQPDLDGFRDAFLLFNQARLKEEFATTEKGDAAYIARMAGGVARPVFPFFCDVWAGKVNDEKIGQGIWPDFEKQAFSEVFTKIGQFIVRGRKFELRLAIADQIIAKIETQKKSDARLQAVERIAEDLADELPDTAVDENGQKRPYGIRERTLKGWRKVRPAWREALKKTPNLTAEDLIKQKNRMQERQREKYGSASLFDRLAKEPEIWNHDDKEDAVETWADYVENLEEKAHLETERLFAPAHATLSPRFFRWSETNNKEHLEASSPDVPFELKADALDLSKKEKSQIKIHFWSPRLWRDGLRGKKENLDKDEPDQNWMPPVLRAFVKARKWPCDKQSFAGASVRLAPRCKENIQLVFEPELHTEILSAKWKENFPFSPAKNKESESVGLFWPRTKEDKVLWFDKGETRCLGVDLGLTNSAAWQILQATNKDATAKAPRLRHRLNPDSEKAAWFAHSITNGIVRVAGEDCWGWRKFAPDEKAKLRAELKKPAGKRNALCRKFLSLNREIEFETATHSFLPELSGSGGRNPTDDETKEAAEFFSTLKTKGFDITDRQPSWGKNLSFPKQNDELLWGLKRVRAQLFRLNRWSEQLGKERDSKPYQSAIEIIGNLRSDDPLIELATLKSEPKRLKSRIAELAGEYLDCFKTLLPRIADRILPWRRGHWSWKPCDNDWHRMELDASKPRPEALLAGQRGISLPRLNQLKDLRQLAQSLNHLCRRKQIKRNETVPEPFEDCRQAMEDAREDRAKKIAHEVFAIALGVELAPPPPDKQERKQTESLHGVYRCLERGPVNFIALENLGGYNPSAKQGRRENRQLSSWLKGRIHKILGELCEMVGMPIVLVNAEYTSRFSAKDHSPGFRAEEVQTDDSRRSFWQRKAKEEPSGWQNEFLCWLNKVPDGKSLLLPKKGGEFFVPLGEGTSLYHADLNAAYRIALRALAHRDRAELLGQTWIEKKPYLVDVAGVFPDSILRNGCAFKTISSSERLWEKVNGDLAMQRCREINLARFASWKIALPQQIISEALPPDEEDDIPM

SEQ ID NO: 1176 - protein, 1331 aa, unidentified
  REGION 1..1331: note = Cas Enzyme sequence
MNRIYQGRVSKVEIPDGKDEWKKLDDGESALWQHHQLFQDDVNYLLAAFAALVPTSCEDDIWKDYQAAIERSWESYTGRQGIWDRPFENACVIVGCKKDASFKEFRRKLNSLTGSKASEKQKFEALKQLFEPATEAAKKLKKHDEPVEESLKGKAKDLFGSTLVNLCAQKTKVTPRDVIAKQRNRASECTKKVNEGERLKWADVFYFKTDTSAAKWSREDAAKNIIQFLDKLLGEVEEKEKDAKTSDQKKKMADLAERLEKQKKPLAAWCNNSKTDLPTTEPTRKGSGGYDLKAAVLFSLQPDLDGFRDAFLLFNQARLKEEFATTEKGDAAYIARMAGGVARPVFPFFCDVWAGKVNDEKIGQGIWPDFEKQAFSEVFTKIGQFIVRGRKFELRLAIADQIIAKIETQKKSDARLQAVERIAEDLADELPDTAVDENGQKRPYGIRERTLKGWRKVRPAWREALKKTPNLTAEDLIKQKNRMQERQREKYGSASLFDRLAKEPEIWNHDDKEDAVETWADYVENLEEKAHLETERLFAPAHATLSPRFFRWSETNNKEHLEASSPDVPFELKADALDLSKKEKSQIKIHFWSPRLWRDGLRGKKENLDKDEPDQNWMPPVLRAFVKARKWPCDKQSFAGASVRLAPRCKENIQLVFEPELHTEILSAKWKENFPFSPAKNKESESVGLFWPRTKEDKVLWFDKGETRCLGVDLGLTNSAAWQILQATNKDATAKAPRLRHRLNPDSEKAAWFAHSITNGIVRVAGEDCWGWRKFAPDEKAKLRAELKKPAGKRNALCRKFLSLNREIEFETATHSFLPELSGSGGRNPTDDETKEAAEFFSTLKTKGFDITDRQPSWGKNLSFPKQNDELLWGLKRVRAQLFRLNRWSEQLGKERDSKPYQSAIEIIGNLRSDDPLIELATLKSEPKRLKSRIAELAGEYLDCFKTLLPRIADRILPWRRGHWSWKPCDNDWHRMELDASKPRPEALLAGQRGISLPRLNQLKDLRQLAQSLNHLCRRKQIKRNETVPEPFEDCRQAMEDAREDRAKKIAHEVFAIALGVELAPPPPDKQERKQTESLHGVYRCLARGPVNFIALENLGGYNPSAKQGRRENRQLSSWLKGRIHKILGELCEMVGMPIVLVNAEYTSRFSAKDHSPGFRAEEVQTDDSRRSFWQRKAKEEPSGWQNEFLCWLNKVPDGKSLLLPKKGGEFFVPLGEGTSLYHADLNAAYRIALRALAHRDRAELLGQTWIEKKPYLVDVAGVFPDSILRNGCAFKTISSSERLWEKVNGDLAMQRCREINLARFASWKIALPQQIISEALPPDEEDDIPM

SEQ ID NO: 1177 - protein, 1331 aa, unidentified
  REGION 1..1331: note = Cas Enzyme sequence
MSLSRIYQGRVNRLELKSQDGDWVIQNEADRPIACPVWIHHATFQRAINYYLLAFARLAKLGKSENRVIQDLPSRIGSHWDSFPGAPLRSKGLRSSLKGWVPGISGNTDFDTGLQAINLPDDLDPAHGLLALESLLADLGGDGKIQKGSKTYFALFCEASSKANFPRSRVGLLKDEGKYLVPTLLAGDTADSAVLASIRERLQFEYFANPNESAEPLTDESSHKRLAEAIAGARKTEPALGDAVWMPIEQTLENLNEPPAIPRYFFGGAGPEIRKRRLDLYLLIKHLQAPRPIFDALRSCFSEPPKNAPQITDTEQHLRSLGDDPILLARSDRGFVFPAFTALAPWNTDDLGKPSWRNFDIMAFAQALTALNQFKLKTDEREDEKKKLQARFDFMTGVSEKFDAPKPSEDDEVERAPNRIRSSDLELAAELREKLVKVGEFGFTKAALRGYRDVRDAWLELEKQGNNPTQKELRTIVSEHHSQQGERFGSVPLFQALCEDQYRPLWRNDEVEDGYPNDIVWALSDLDQLVRDLERKQEIINLTPAEPEYSRRLYMFSDQTGGTKTIIGDGTVEVSLAAPLEGGGRFGPIRARLSYTAPRMLRDGLMGENGNGWLQPMFAALGLPPLKPDKDPACALMPKVEEISRSGTAPMLLNFPVTLSPKPLANVERWNVKGKKFFNGTNEKNLHMLWNDGAPSDGQPFTFLSCDLGVRMSSAWALMHCGREKPEHDRWRMVDSGDGQWIASWSKTGTHRLPGERGVISLPNGKKVHDSRGRRADGIETAAAVKMELRLGGVEESREDIQRKMNAKTLPEQNDRLIWRAGRRLSRLRTYHRWSCATVHDTSPENLRDELKGYSDSDLTPWKDRLDAGDNDARDAFAKAMGEKFESLRSELGRVLTELAERCVPLRGADWVWERNPDQPEPTANYHRLVRSARLGKEGTRRRGMRGLSMDRIGQLENLRKLFLRHNRSFDRGPGETKEIGTARKGERPGEPCRDLLNKIDRMKNERVNLTAHLILANALGLRLKAPTTDKDDYVHGEYERIPGRNPVDFIVMEDLSRYLTAQGRAPSENRQLMRWSHRAVLLKLKELCESFDLPVVEVVPAYSSKFCARSGVPGFRCREIASGEQLRGAQARLWRDWNDETKAKLAGEAGSLFRQIETLEKINKDRLESKKPPHNLFVPEIGGPLFMPASGDLLPSNADTNAAINLGLRTVANPKCFDIHRRIPSERNGQQLKARRNNKREKEAFDANQRTIEMVDEPSTNLAKSPRPNFFYDPEGISNTDRARCGDLNLTSQVALLGKVRASELTRCIALNEARLNRSGWRNDQDEIPM

SEQ ID NO: 1178 - protein, 1331 aa, unidentified
  REGION 1..1331: note = Cas Enzyme sequence
MTARTQNLFSEFTNLYSLSKTLRFELKPVSETEELLKKTNLQGKTPIQVDQEIDELYHKEMKPLFDKLHEKFISEALTKVTFKITDLEQLEKKYLELKSLNKDKKNNSAKIKKLIDNKTGEIPKLENRLREIIVEQFDKLGEAWKEKYREINLNDVGSKILTNAKILDVLLILYPEKSEFIEKFQGFFTYFSGFNQNRENYYTKDSKVTGVANRIINKNYFTFLENKQKFKEIVKKIPDLIKYKRYFELENYQNYLTQEGIENYNEIIGGIILENGEKQQGVNEKVNLFCQQENQNFPKSDKKIFLPHLVKLQKQIGCRTKQQKGQEDSGKSIYPEYLEKVGLGFQITKNEAGKYQIWEALEHITKKLKPKLEKLQDNYHDFFKNWQEYKLDEIWFRKESINTISSRWFGGDKWAVFAKALDYLGTGKIEKGEYKTPPFINLQDLKNAVEALEVGINFDIKRSKRRNNHETSIKDIKKFSYTAENLFRDCYKPYFKTCLFETLLAVWQHEINCKFMQILDGYTDEDGKFAPAFLKVFEKQRKEPFDKNQKDTEKSIHVEVVKNLVEEGYLRLFQLTKYHNLEKKGETDVRPVENKFYNVLNEFWEENQIVIYHKAFQSTLTKKPYSEDKIKLNFENGSLLGGFSDGQEKNKAGVILQKGDKHFLGILLDRGFFRTDKANSIYRTENNAWQRLILTNLKFQTLAGKGFLGKYGISYGDLGKTNPMEAVRLLQEFIKDRYLHEYPQLQSVANKHFQSKKNFDVEIKKGLIKCFTMNFVPISKDNLQQGLKENKLYLFEITNKDFSSKTIGKNKNIHTLYWQQLFQNENLLEPILALNGGAEVFFRKGQKEKLDKKIDKSGKEVLNNKRYGEDKYFLHVSITINYGKPKNIKYRELVNQKIKTNLNNIKIIGIDRGEKNLLYYSVVDTDGRLIDQGSLNRIRVSDLVDEKEVKAEYENGDIKSVEFINTRRKVNYIDYQVLLDYFEKKRILARKSWEVIGRIKDLKEGYLSQAIHRIYQLIIEHNAIVVMEDLNREFKAKRTAKVEKSVYKKFELALARKLNHLILKDKKPNESGSVLNAYQLTPYIEAGKIGNFEKAKQWGILFYIRANYTSTTDPLTGWRKHKYVPNSETEKKIQEFFKPDDGVQINYDLNKKCFKFSYKDENRTFWHLFTFNGLERFYWNNKDRKMERYNLYEKFEELFSGLDKSKNINKQIYNKDFNWKRLVFLWNLLNQIRNIDREKTGNDNDFLQSPVWLEKHQQSFDSRKIRKKNLPENGDANGAYNIARKGAMLLHRIKNCPDVSKFGNGNNGKNPENSYYIYDLDWDKYVLQASF

SEQ ID NO: 1179 - protein, 1332 aa, unidentified
  REGION 1..1332: note = Cas Enzyme sequence
MPQEKTFKSFDDFTNLYELQKTLRFELKPTEKTRELIKKNKVFEKDQTIDDSYNQAKFYFNEMHREFINNSLANISPGIVNPLIYAFAEKERQEQMGNKKDSNGLWEKARKSFCLEIAKIFVAEDKKIKEEYDKKTEESIVESGNEKIKVKFLLSAKVLGYLKEKFPEAKNDEFINKKWPSLYVDDLEYAGQKKYVFSSFEKFTTYLGKFQATRKNLYVTDDKATSVASRILDNFVIFQGNKNKFENKLNKLSIFSEEERSVFKQKFYVNCFIQNGIDKYNEIVGGLNKKIKESRDKEATKAKRDKLEFKKNNYPLFVVLDKQILGQVEKEGEIIEKEDDLKKVFLDFITDNNQMFKQARKLVNELCGGNFIEEYEKIYLQKKVLNTISRKWFSDANSFELLLPQTSGKKDDKNTASIKKYTSLANIKIALEKEENANGLSGDVFRDKYYDDKDGLKLKRGESLGKRFGQFLKIWKFEFDNLFRDKELSNCRGYDFCLEEAEKINWAGLSRKDRKEVERVKQYSDISLDIYQMIKYFFLGSGKDVPLGSELFYGEFNAFYQIFEFIRYYNALRNYITKKAFNPDKIKLNFENPQLLGGWDKNKEKEKFGIVIRKNGVYYLAVLTDQYKKIFEKIEADTTGDFYEKMNYKFFPDPKRMIPKIAFATKNISVFKLTEEIKKIKREYENFQKDKKDTANWEKSFNKGKCSKLIRYYQDCLEIGGYKKEFGLTWKKPEEYSGVGSFNDHIEKQNYKVFFQKVSTKCIDDYVDNGKMYLFQIYSKDFSERSCGKGKNIHTLYFTNLFSPNNLNNPILKLSGGAEIFHRTLSISKKEKIITQKNQKILEKGEKAFRLNRYSEDKIFIHIPIKINRGETRLFNQKLNSAVLFNNKSINIIGIDRGEKNLLYYSVINQKGEILDQGSLNEINGINYFAKLHWRAKEREADRKSWNQVEQIKDLKKGYLSAVVHKICVLIIEYNAIVVLEDLNMRFKQIRGGIEKSVYQQFEKSLIDKLGYMVFKDREPEEVGGVLKGYQLAARFESFEKMYKQTGILFYTQADYTSVTDPVSGFRKNIYIGNSWSQEKIKKSIDRFESIKWDSEIGSYAFTYDPADFIFENYKKSKKRPQEIISREWTVYSKTSRIERFKNESGYWEYGSIDLNKEFEKLFQLWDFDPRGDILSQIREKESVNQLIGYKLIDKKERDFYHRFIYLFNIILQLRNSFSKKAVKDKNGNEILIGDDIDFIASPVYPFFQMEARSEKEGIISKLNLAGFDKRIISGNKDKIIKTLDADANGAYNIARKGIITLGKIKKNPEKPDLFITKNEWDKFTQKDWQEK

SEQ ID NO: 1180 - protein, 1332 aa, unidentified
  REGION 1..1332: note = Cas Enzyme sequence
MRTIDEFCGQKNGYSLSKTLRFELKPQGKTLENINKAGLVKVDEQRAKDYQDVKKLLDNYHKYFIDDILKNASEKDLDWKPLKDAVEEYQKDKTKDEQLKKEQDKMRSSIVKCFSADKKRFDHLTAATPYDLFKTELPEWLSKNSFPNLNNKAVETFKKFSTYFTGYQETRKNIYSAEAISTAVPFRIVHDNFPKFLQNLSIYKWINEKCPEVIKNAQNEIGSILAGKKLEDFFTLNSFNIFLTQTGANEQRGIDFYNQLIGGVKQQNIQIKGINQCINEYWQQHPEFAKENRRVKMVPLYKQILSDRSTLSFVIESIENDKELFDAVTKFNESITLIKDTETEKTSVLENISTLIKNISDFDANHVFVNAKDLAGISLVLFGKWDALQIRMNEFAKATFSTKQERSRWVKNLEENSTTKRKGVFSFAELDRVLAFSSEEINATEISIKDYFDTQYKKFFDAEKNEVVVTKEVTVLSVDDLLISIQSKWNSLQKVVNNSTTENQLKENTENVAILKDYLDCVNELFTRLKVLNVDKSEARDTSFYSVYDEVMETLSEIMPLYNKVRNYITKKSFDIGKYKLNFDNPTLASGWDLNKEDANTCVILEKDGNYYLGVMNAKNKPKFSAIQPDDSVPCYKKMVYKLLPGPNKMLPKVFFSTKGIATFNPPKEILEGYNAGKHKKGDTFDLNFCHKLIDYFKSAINQHPDWKNFNFKFSDTSTYKDTSDFYKEISEQGYKLSFVNVPVSIIDSWVDEGKLYLFQIYNKDFSPNSTGTPNMHTLYWRNLFSKENLDDVVLKLNGEAELFYRGVGIKNPVVHSVGSKVVNRTTKDGKTIPEAIHDEIYKYVNRKIPELSQETKKLYENGLVVVKTIQKNHELIKDKHYTQEKFLFHVPITINYKASGNSYINENVRQFLKNNPDVNIIGLDRGERHLIYMSLIDQKGNIIQQKTFNTVERKKNGATVSVDYHEKLDQKEKERDAARKNWQTIGKIAELKEGYLSAVIHELVTLMIEHNAIIVMEDLNFGFKRGRFHVEKQVYQKFEHMLIDKLNYLVFKDRGLKESGGVLNGYQLAGIFESFQKLGKQSGFLFYVPAGYTSKIDPATGFANLLDMTNLTNVQKKRDFFAKFDSICFDEEKQMFAFTFDYKNFNRKDAQEMSRTKWTVYSNGKRIQFCGKGKASKHIENLTEEFKTLFREFDYQNGNNILDSILEVGAALKAGEKPAKEIADFWDKLLVLFKLVLQIRNSDAKTGDDYIISPVMSEDGIFFDSREQEKLGNNAKLPKDADANGAYHIALKGLYLLKVFDKTPEDQLKKVDMKISNADWFRFAQEKEYSK

SEQ ID NO: 1181 - protein, 1333 aa, unidentified
  REGION 1..1333: note = Cas Enzyme sequence
MNKSVFKNFIDLYSLTKTLRFELKPVGNTQKMLDENEVFSKDKLIKDKYIKTKLYFNRLHREFIEDALFGITLSDLSDYRTALNNWNKDRKNKEYETCLKVEEKRLREEIVEFFNNKANDWAENRYKHIGLKNKNTEILFEEAVFSILGDRYGKRKDTEIKDEVNNKTVSVFDSWKRFTGYFIKFQETRRNFYKSDGKETAIATRIINQNLKRFCDNLEIYESIRDKVNFSVIEKELSISLKNVFSLEYYNKCLLQVGIDKYNEIVGGRTEKNGEKKKGLNEYINKYKQDNKSERLPFLITLDKQILSEKEKFIDEIEDEKELLVVLRKFYRTSEEKTKILKNLITNFVLANDRYGLEEIYISKEAFNTISQKWTGETEAFEKALYDSMKINKPTGLSYNKKENNYKFPDFIALNYIKKALEQIQTEKFWRERYYKSDNNSNGLFENDSELSWRQFLDIFEYEFASNFERNVQYSIDKERDFKKELEAVDKFEIVLSVKEKERKIIAKAGYEIYKNKLEELLESGDIKITQDIKTIIKNFADQILLIYQMAKYFAVEKKRAWVDLYDLDDVFYNNPENGYLKFYENAYEGIIHAYNHLRNFLTKKLFSEYKWKLNFENPTLADGFDKNKEPDNSTVILRKENRYYLGVMKKGYNHLFSDRNEKKFTFQTGREGYKKMIYKQIANPAFDIHNLAITEKGVQRFTKLKNKEKYWPAEITRIKQEKLYAKENFDRSDFETFIDYVKKCAIGYWPDFKFNFSDTRKYKNIADFTNEIEKSGYKISFIDISENYIVEKNQNGELYLFEIHNKDWNLKDRKIKTGKKNLHTTYFESIFSAENIENNFPIKLNGQAELFFRPRTETDKLDKKLDKKGNKVFDHKRYSENKIFFHCPITLNRCKNNTYQINPKINNFLANNPDINIIGIDRGEKHLVYYSVIKQNGEIIKSGSLNTVNNINYAEKLGEKAKNREHARKDWQDIEGIKNLKKGYISQVVRKIADLAIENNAIIVFEDLNMRFKQIRGGIEKSIYQQLEKALIEKLNFLVNKNEKNPQKAGNLLKAYQLTSPFKTFKNMGKQTGIIFYTQASYTSKIDPVTGWRPNLYLKYSNAENAKKDILKFLDIKFNQTKNRFEFTYDIKNFKNGEKEYPEKTKWILCSCVERYRWNKRMNNNQGGYEHYINLTDGKVENKDQKSEKIDNFKELFEKYKIDVNKDIKNQIEKIDTNNIKYKKFFEDFIFLFNLICQIRNTNEKVKDENGKDFIFSPVEPFFDSRNLKKFDSNLPQNGDDNGAYNIARKGICILKKISKYYNRNKDCKKITWNDLHVSNSDWDNFTQSNLK

SEQ ID NO: 1182 - protein, 1333 aa, unidentified
  REGION 1..1333: note = Cas Enzyme sequence
MNKSVFKNFIDLYSLTKTLCFELKPVGNTQKMLDENEVFSKDKLIKDKYIKTKLYFNRLHREFIEDALFGITLSDLSDYRTALNNWNKDRKNKEYETCLKVEEKRLREEIVEFFNNKANDWAENRYKHIGLKNKNTEILFEEAVFSILGDRYGKRKDTEIKDEVNNKTVSVFDSWKRFTGYFIKFQETRRNFYKSDGKETAIATRIINQNLKRFCDNLEIYESIRDKVNFSVIEKELSISLKNVFSLEYYNKCLLQVGIDKYNEIVGGRTEKNGEKKKGLNEYINKYKQDNKSERLPFLITLDKQILSEKEKFIDEIEDEKELLVVLRKFYRTSEEKTKILKNLITNFVLANDRYGLEEIYISKEAFNTISQKWTGETEAFEKALYDSMKINKPTGLSYNKKENNYKFPDFIALNYIKKALEQIQTEKFWRERYYKSDNNSNGLFENDSELSWRQFLDIFEYEFASNFERNVQYSIDKERDFKKELEAVDKFEIVLSVKEKERKIIAKAGYEIYKNKLEELLESGDIKITQDIKTIIKNFADQILLIYQMAKYFAVEKKRAWVDLYDLDDVFYNNPENGYLKFYENAYEGIIHAYNHLRNFLTKKLFSEYKWKLNFENPTLADGFDKNKEPDNSTVILRKENRYYLGVMKKGYNHLFSDRNEKKFTFQTGREGYKKMIYKQIANPAFDIHNLAITEKGVQRFTKLKNKEKYWPAEITRIKQEKSYAKENFDRSDFETFIDYVKKCAIGYWPDFKFNFSDTRKYKNIADFTNEIEKSGYKISFIDISENYIVEKNQNGELYLFEIHNKDWNLKDRKIKTGKKNLHTTYFESIFSAENIENNFPIKLNGQAELFFRPRTETDKLDKKLDKKGNKVFDHKRYSENKIFFHCPITLNRCKNNTYQINPKINNFLANNPDINIIGIDRGEKHLVYYSVIKQNGEIIKSGSLNTVNNINYAEKLGEKAKNKEHARKDWQDIEGIKNLKKGYISQVVRKIADLAIENNAIIVFEDLNMRFKQIRGGIEKSIYQQLEKALIEKLNFLVNKNEKNPQKAGNLLKAYQLTSPFKTFKNMGKQTGIIFYTQASYTSKIDPVTGWRPNLYLKYSNAENAKKDILKFLDIKFNQTKNRFEFTYDIKNFKNGEKEYPEKTKWILCSCVERYRWNKRMNNNQGGYEHYINLTDGKVENKDQKSEKIDNFKELFEKYKIDVNKDIKNQIEKIDTNNIKYKKFFEDFIFLFNLICQIRNTNEKVKDENGKDFIFSPVEPFFDSRNLKKFDSNLPQNGDDNGAYNIARKGICILKKISKYYNRNKDCKKITWNDLHVSNSDWDNFTQSNLK

SEQ ID NO: 1183 - protein, 1335 aa, unidentified
  REGION 1..1335: note = Cas Enzyme sequence
MKTIDDFCGQKNGYSRSITLRNALIPIGKTEENIQKLKLLDKDVERSKAYVEVKKLIDDFHRTFIEEVLSKTKLEWGLLYKQFELYQNEKDKQKKNKIKKQLEQLQSGMRKDIVKQFKKDERFDKLFKKELLSDFVPTVIKNDESGTISDKQAALDAFKGFATYFTGFHQNRQNMYSEEAQSTAISNRIVNENFPKFYANVKLFEYLQKEFPEIIKETEDSLSNFLNGKRLAEIFSENGFNAVLSQNGIDFYNTVIGGISDEAGSKKLQGLNEKINLASQQLPKEEKYKLKRKMTVLYKQILSDRSTASFIPVGFETSEEVYESVKQFKEQNFDKVVSLVKKLSSKTDYDLNQIYVPAKEVTEFSLKLFGNWSILHDGLFLLEKDNAKKNFSEKQMETLRKEIAKRDCSLAELQKVYEELCSYNGEQLGINEKGYLVKKTYNDKDKIELNVRDNFFRFTELRLDENTKEKSFVEILKEVNKNYLKIDFDKQENLIKEKESSTPIKNFLDEVQNLYHYLKLVDYRGEEQKDSDFYSELDKILLELSEIVPLYNKVRNFVTKKPNEIKKVKVMFDCSSLLNGWGTDYGTKEAHIFIDSGKYYLGIVNNKLDKEDVESLKVVGEHMISKVIYDFQKPDNKNTPRLFIRSKGDSYAPAVSKYNLPITDIIDIYDKGLFKTEYRKINPEEYKKSLEKIIDYFKLGFSRHDSYKHYNFSWKKTTDYADIADFYSDTIKSCYQLKFEKVNYGNLVSLVDSGKLFLFQIYNKDYSTGKDGGNGSTGNKNLHTLYWENLFSEENLRDVCLKLNGEAELFWRDANQNVKDVCHKKGSVLVNRTMTDGSTIPEDIYQEIYKFKNKKSESLSDKAKELLDSGKVVCKEARFDITKDRHFTKQTYLFHCPITMNFKASEISNKDFNSKVQTLLKNNSDVKIIGLDRGERHLIYLSLINQKGEIELQKTLNLVEQVRNDKTVKVNYQEKLVQKEGDRDKARKNWQTIGNIKELKEGYLSNIVHEIAKLMVENNAIVVMEDLNFGFKRGRFAVERQVYQKFENMLIEKLNYLVFKDKKLTESGGVLNAYQLTNKSANVSDVGKQCGWIFYIHAAYTSKIDPKTGFANLFYTAGLTNVEKKKEFFDKFDSIRFDSKTDSFVFSFDYSNFSDNADFKKNWDVYSRGERLVYSKAERTAVCVNPTENLKALFEKQGINWNTEDNFIDQIQAVQAERENCSFYDGLYRSFMAILQMRNSKPNSSNQEDDYLISPVKAEDGTFYDSRVEAAKGKDSNGRLISKLPVDADANGAYHIALKGLYLLKNDFNLNDKGYIENISNADWFKFAQEKDYAE

SEQ ID NO: 1184 - protein, 1335 aa, unidentified
  REGION 1..1335: note = Cas Enzyme sequence
MNNNFYQFTNRYSLSKTLRFELKPIGKTREMLEENEVLRKDKIVHEKYQQTKPFIDRMHRDFVAEALENKLGGLDEYWQALRDWQTDKKDKVLQNNLHKIQRKLREQIVTFFNIQATVWHQKYPGTKKNTTEILKEKDVFTTILKQRYGEDKDSFLVDKNGEFILNQQGDKISIFDGWKNFVGYFDKFFQTRENFYKSDGTTTAIATRIIDQNLKRFCDNITTIQNIKDKVKFLEVENNFDLKIQDVFSLNFYNNCLLQPGIDRYNEFIGGKTLDNGQKLRGINELINEYRQNNKNEKIPFLKKLDKQILSEKDQSVSDELQDDNDLYSILISFIEVADKKVDILRHLFTDFVENNQQYDLDKIYFSKEAFNTITRRWTSETDSFETEVYQTISQKNTKDFYESLRRDKDDSVIKKEKDSYKFPSFISLGHIKQALDRIEAGGMYASKVNEEKSEKYFWKDVYIVKIASLKDKTIWQQFLAIYLFEFNSLLERDITVQKKTSEGKIVQDKIQAGLNVFAKDLKDKLNNFKKEDTKIAIKNYADEVLHIYQMAKYFAVEKKRLWLDHYDLDPLFYNHAQYGYQLFYDGAYEEIVLVYNKLRNYLTKKQFNQEKWKLNFENATLADGWDKNKERDNTAIILRKNTRYYLGIMKKEFNNLFIDEKEKEFLASNDEKNVYEKMVYKFFPDPSKMFPKVCFSAKGLEEFQPSEEIYKIYKNEEYKKGDRFSVNSLHKLIDFYKNCLNKYEGWKSYEFKHLKPTEDYQDNIGEFYQDVATDGYSISFQKISQNYIDKQNQAGKLYLFEIYNKDWSDKATGTKNLHTLYFESVFSNENRDLNFPMKLNGQAEIFYRPKTKNLEKKQIVTQKNEITLTKGDKAWQKKRYLEDKIFFHMPMTLNRIPNHSTNFNAEINNFLSGNDDINIIGVDRGEKHLAYYSVINQKGEILDTKSLNMIVNKKTKEKVDYAGKLEARAKNREQARKDWQTVEEIKDLKKGYISQIVRTLADLAIEYNAIIVLEDLNMRFKQIRGGIEKSIYQQLEKALIDKFNFLIDKEEADPQKAGHLFNAYQLTAPFKSFKDMGKQTGIIFYTQASYTSKIDPLTGWRPNLYLKYVNAEKAKELIGKFSSIVFNENKNRFEFTYDLENFSSNIKEKPEKTEWTVCSCVERIRWNKKLNENKGGYDYYENLTDGGLLNKNASEENISNFKELFRKIGIDYRVDILSQIKQLESKNNEKFFRNFIFLFNLMCQIRNTDQDKEGDENDFILSPVEPFFDSRRAKQFGENLPQNGDENGAYNIARKGIIILNKITKYKQTNGDDQKMSWGDLYVSNQDWDNFASK

SEQ ID NO: 1185 - protein, 1336 aa, unidentified
  REGION 1..1336: note = Cas Enzyme sequence
MTNETKNKSIFDNFTNLYEVQKTLRFELKPVGNTQKMLDEADVFGKDKIIKDKYQKTKPFIDKLHREFVDEALGRVFLPGFKNYFKALENWKNNKKDKEAVKGLKKEEERLRKEVVKCFDNTAKNWTTEKYKNLGLKKKNIEILSEESVFDLLKEKYGNEDESFLKDEKGIFLENEKGGKLSIFDEWKGFTGYFTKFQETRKNFYKSDGTETALATRIIDQNLKRFCDNIEDFKKIKNKIGFSEVEKNFNKVIVDVFSLDFYNQCLLQKGIDSYNEILGGKTLNNGKKLKGINELVNEYRQKNKGEKIPFLKLLDKQILSEKEKFLIGIENDENLFETLNSFYKTAEEKTKILKTRFSDFVSHNENYDLSKTYISKEAFNTISHKWTNETLKFEELLYGAMKSDAPVGLSYGKRDDGYKFPDFIALNYLRNGLGNIASSARFWKEKYYKNDENKSDKGFLIGKENTWDQFLQIFDFEFNQLFNSEIFDKKGKEIKIGYDNFKKDFEVIIGRKDFINSEDSKITVKNFADSVLWIYQIAKYFAIEKKRGWNDEYELSEFYTNPDNGYLLFYKNAYEEIVQKYNDLRNYLTKKPYSEEKWKLNFENPTLANGWDKNKEADNAAVILLKGGKYYLGLMRKGKNKIFDDKNKFEFVKNIEGGVYNKVVYKLFPDPAKMMPKVCFSEKGLSFFGPSKNILQIYKNEEFKKGDKFSVAKMQELISFYIDCLSKYDGWKCYNFANVKKPKEYRDNIGEFYKDVSKNGYKISFVPVSESYVDQKNQNGELYLFEIYNQDFARGKKGNKNLHTLYFENVFSPENIAKNFPIKLNGQAELFFRPKSIEPKKEKRNFPREIINKKRYSEDKIFFHCPITLNRGADSIYRFNNYVNNFLSENDINIIGVDRGEKHLAYYSVIDKNGKKIDGGSFNEINKVNYAEKLEKKAGDRERGRKDWQNIEGIKDLKKGYISQVIRKLADLAIEHNAIIVLEDLNMRFKQIRGGIEKSIYQQLEKALIDKLSFLVKKGEKDSSRAGHLLKAYQLTAPFASFKDMGKQTGIIFYTQASYTSKTCPKCGFRKNNNKFYFENNIGKAKDALEKLRAFEYDSKNQCFNLSYCLSDFVSRDDIERNKNKKRNNILYSKLDKKDLFNLSTKDAIRYRWHDKNTERGRNILGGESIYKEGQAEEVKNTKRGVVKKYDITKCLVGLFEKTGVDYKQNLRDKLVSEKLDSNFYKNLFNYLNLLFEIRNSVSGSEIDYISCPECGFHTDESEDIKNGDDNGAYNIGRKGTMILEKIKQFKSKNGNIDKMNWGDLFIDIEEWDKFAQIVGTRNKNGTVYPNLKNKR

SEQ ID NO: 1186 - protein, 1336 aa, unidentified
  REGION 1..1336: note = Cas Enzyme sequence
MIDNGFGKFTNRYSLSKTLRFELKPIGKTREMLEENEVLRKDKIVHEKYQQTKPFIDRMHRDFVAEALENKLGGLDEYWQALRDWQTDKKDKVLQNNLHKIQRKLREQIVTFFNIQATVWHQKYPGTKKNTTEILKEKDVFTTILKQRYGEDKDSFLVDKNGEFILNQQGDKISIFDGWKNFVGYFDKFFQTRENFYKSDGTTTAIATRIIDQNLKRFCDNITTIQNIKDKVKFLEVENNFDLKIQDVFSLNFYNNCLLQPGIDRYNEFIGGKTLDNGQKLRGINELINEYRQNNKNEKIPFLKKLDKQILSEKDQSVSDELQDDNDLYSILISFIEVADKKVDILRHLFTDFVENNQQYDLDKIYFSKEAFNTITRRWTSETDSFETEVYQTISQKNTKDFYESLRRDKDDSVIKKEKDSYKFPSFISLGHIKQALDRIEAGGMYASKVNEEKSEKYFWKDVYIAKIASLKDKTIWQQFLAIYLFEFNSLLERDITVQKKTSEGKIVQDKIQAGLNVFTKDLKDKLNNFKKEDTKIAIKNYADEVLHIYQMAKYFAVEKKRLWLDHYDLDPLFYNHAQYGYQLFYDGAYEEIVLVYNKLRNYLTKKQFNQEKWKLNFENATLADGWDKNKERDNTAIILRKNTRYYLGIMKKEFNNLFIDEKEKEFLASNDEKNVYEKMVYKFFPDPSKMFPKVCFSAKGLEEFQPSEEIYKIYKNEEYKKGDRFSVNSLHKLIDFYKNCLNKYEGWKSYEFKHLKPTEDYQDNIGEFYQDVATDGYSISFQKISQNYIDKQNQAGKLYLFEIYNKDWSDKATGTKNLHTLYFESVFSNENRDLNFPMKLNGQAEIFYRPKTKNLEKKQIVTQKNEITLTKGDKAWQKKRYLEDKIFFHMPMTLNRIPNHSTNFNAEINNFLSGNDDINIIGVDRGEKHLAYYSVINQKGEILDTKSLNMIVNKKTKEKVDYAGKLEARAKNREQARKDWQTVEEIKDLKKGYISQIVRTLADLAIEYNAIIVLEDLNMRFKQIRGGIEKSIYQQLEKALIDKFNFLIDKEEADPQKAGHLFNAYQLTAPFKSFKDMGKQTGIIFYTQASYTSKIDPLTGWRPNLYLKYVNAEKAKELIGKFSSIVFNENKNRFEFTYDLENFSSNIKEKPEKTEWTVCSCVERIRWNKKLNENKGGYDYYENLTDGGLLNKNASEENISNFKELFRKIGIDYRVDILSQIKQLESKNNEKFFRNFIFLFNLMCQIRNTDQDKEGDENDFILSPVEPFFDSRRAKQFGENLPQNGDENGAYNIARKGIIILNKITKYKQTNGDDQKMSWGDLYVSNQDWDNFASK

SEQ ID NO: 1187 - protein, 1336 aa, unidentified
  REGION 1..1336: note = Cas Enzyme sequence
MIDNGFGKFTNRYSLSKTLRFELKPIGKTREMLEENEVLRKDKIVHEKYQQTKPFIDRMHRDFVAEALENKLGGLDEYWQALRDWQTDKKDKVLQNNLHKIQRKLREQIVTFFNIQATVWHQKYPGTKKNTTEILKEKDVFTTILKQRYGEDKDSFLVDKNGEFILNQQGDKISIFDGWKNFVGYFDKFFQTRENFYKSDGTTTAIATRIIDQNLKRFCDNITTIQNIKDKVKFLEVENNFDLKIQDVFSLNFYNNCLLQPGIDRYNEFIGGKTLDNGQKLRGINELINEYRQNNKNEKIPFLKKLDKQILSEKDQSVSDELQDDNDLYSILISFIEVADKKVDILRHLFTDFVENNQQYDLDKIYFSKEAFNTITRRWTSETDSFETEVYQTISQKNTKDFYESLRRDKDDSVIKKEKDSYKFPSFISLGHIKQALDRIEAGGMYASKVNEEKSEKYFWKDVYIVKIASLKDKTIWQQFLAIYLFEFNSLLERDITVQKKTSEGKIVQDKIQAGLNVFAKDLKDKLNNFKKEDTKIAIKNYADEVLHIYQMAKYFAVEKKRLWLDHYDLDPLFYNHAQYGYQLFYDGAYEEIVLVYNKLRNYLTKKQFNQEKWKLNFENATLADGWDKNKERDNTAIILRKNTRYYLGIMKKEFNNLFIDEKEKEFLASNDEKNVYEKMVYKFFPDPSKMFPKVCFSAKGLEEFQPSEEIYKIYKNEEYKKGDRFSVNSLHKLIDFYKNCLNKYEGWKSYEFKHLKPTEDYQDNIGEFYQDVATDGYSISFQKISQNYIDKQNQAGKLYLFEIYNKDWSDKATGTKNLHTLYFESVFSNENRDLNFPMKLNGQAEIFYRPKTKNLEKKQIVTQKNEITLTKGDKAWQKKRYLEDKIFFHMPMTLNRIPNHSTNFNAEINNFLSGNDDINIIGVDRGEKHLAYYSVINQKGEILDTKSLNMIVNKKTKEKVDYAGKLEARAKNREQARKDWQTVEEIKDLKKGYISQIVRTLADSAIEYNAIIVLEDLNMRFKQIRGGIEKSIYQQLEKALIDKFNFLIDKEEADPQKAGHLFNAYQLTAPFKSFKDMGKQTGIIFYTQASYTSKIDPLTGWRPNLYLKYVNAEKAKELIGKFSSIVFNENKNRFEFTYDLENFSSNIKEKPEKTEWTVCSCVERIRWNKKLNENKGGYDYYENLTDGGLLNKNASEENISNFKELFRKIGIDYRVDILSQIKQLESKNNEKFFRNFIFLFNLMCQIRNTDQDKEGDENDFILSPVEPFFDSRRAKQFGENLPQNGDENGAYNIARKGIIILNKITKYKQTNGDDQKMSWGDLYVSNQDWDNFASK

SEQ ID NO: 1188 - protein, 1336 aa, unidentified
  REGION 1..1336: note = Cas Enzyme sequence
MNRIYQGKVTAVEIPDGKDEWKKLDDGESALWQHHQLFQDDVNYLLAAFAALVPTSCEDDIWKDYQAAIERSWESYTGRQGIWDRPFENACVIVGCKKDASFKEFRRKLNSLTGSKASEKQKFEALKQLFEPATEAAKKLKKHDEPVEESLKGKAKDLFGSTLVNLCAQKTKVTPRDVIAKQRNRASECTKNVNEGERLKWADVFYFKTDTSEAKWSREDAAKNIIQCLDKLLKEVQEKESDAKTSDQKKKMADLAERLEKQKKPLAAWCNNPKTELPTAEPTRKGSGGYDLKAAVLFSLQPDLDGFRDAFLLFNQARLKEEFATTEKGDAAYIARMAGGVARPVFPFFCDVWAGKVNDEKIGQGIWPDFEKQAFSEVFTKIGQFIVRGRKFELRLAIADQTIAKIETQKKSDARLQAVERIAEDLADELPDTAVDENGQKRPYGIRERTLKGWRKVRPAWREALKKTPNLNAEDLIKQKNRMQESQREKFGSAALFDRLAKEPEIWNHDDKADAVETWADYVENLEEKAHLETERLFAPAHAKLSPRFFRWSETNNKEHLTASSPDVPFELKADALDLIKKEKSQIKIHFWSPRLWRDGLRGKNEILDKDEPDQNWMPPVLRAFVKARKWPCDKQSFDGASVRLAPCCKENIQLVFEPALNNDVLSKVWAEKMPFTPRMEKINDEWLASGLRWPKSEAEKLPWLETDGIKCLAADLGLTNSAAWQILQATNKDAIKKITRLRHRLNPDSEKTAWFAHSITNGIVRLAGEDCWCWRKFAPDEKAKLRAEIKKPAGKRNALCRKFLSLNREIEFESATHGFLPELSGSGGRNPTDDETKEAAEFFSTLKTKGFDITDRQPSWKKHLSFPKQNDELLWGLKRVRAQLFRLNRWSEQLGKESDSKPYQSAIEIIGNLRSDDPLVELATLKSEPKKLKSRIAELASEYLDCFKTLLPRIADRILPWRRGHWSWKPCDNDWHRMELDASKPRSEALLAGQRGISLARLNQLKDLRQLVQSLNHLCRRKQIERKETVPEPFEDCRQAIEDAREDRAKKIAHEIFAIALGVELAPPPADKQERKQTESLHGVYRCLERGPVNFIALENLGSYNPSSKQGRRENRQLSSWLKGRIKKILTELCEMVGMPIVFVNAEYTSRFSAKDHSVGFRAEEVRKDDLRRSFWQRKAKEDPSCRQSEFLSWLDKIPDGKSLLLPKKGGEFFVSLGKDSALYHADLNAAYRIALRALSHRNRAELLGQTWIEKEKKYYLVDTANVFPDSVLRDGCPFKTISSNERLWEKVNGDLAMQRCREINLARFADWKIALPQQIISKGLPPDEEDDIPM

SEQ ID NO: 1189 - protein, 1336 aa, unidentified
  REGION 1..1336: note = Cas Enzyme sequence
MIDNGFGKFTNRYSLSKTLRFELKPIGKTREMLEENEVLRKDKIVHEKYQQTKPFIDRMHRDFVAEALENKLGGLDEYWQALRDWQTDKKDKVLQNNLHKIQRKLREQIVTFFNIQATVWHQKYPGTKKNTTEILKEKDVFTTILKQRYGEDKDSFLVDKNGEFILNQQGDKISIFDGWKNFVGYFDKFFQTRENFYKSDGTTTAIATRIIDQNLKRFCDNITTIQNIKDKVKFLEVENNFDLKIQDVFSLNFYNNCLLQPGIDRYNEFIGGKTLDNGQKLRGINELINEYRQNNKNEKIPFLKKLDKQILSEKDQSVSDELQDDNDLYSILISFIEVADKKVDILRHLFTDFVENNQQYDLDKIYFSKEAFNTITRRWTSETDSFETEVYQTISQKNTKDFYESLRRDKDDSVIKKEKDSYKFPSFISLGHIKQALDRIEAGGMYASKVNEEKSEKYFWKDVYIVKIASLKDKTIWQQFLAIYLFEFNSLLERDITVQKKTSEGKIVQDKIQAGLNVFAKDLKDKLNNFKKEDTKIAIKNYADEVLHIYQMAKYFAVEKKRLWLDHYDLDPLFYNHAQYGYQLFYDGAYEEIVLVYNKLRNYLTKKQFNQEKWKLNFENATLADGWDKNKERDNTAIILRKNTRYYLGIMKKEFNNLFIDEKEKEFLASNDEKNVYEKMVYKFFPDPSKMFPKVCFSAKGLEEFQPSEEIYKIYKNEEYKKGDRFSVNSLHKLIDFYKNCLNKYEGWKSYEFKHLKPTEDYQDNIGEFYQDVATDGYSISFQKISQNYIDKQNQAGKLYLFEIYNKDWSDKATGTKNLHTLYFESVFSNENRDLNFPMKLNGQAEIFYRPKTKNLEKKQIVTQKNEITLTKGDKAWQKKRYLEDKIFFHMPMTLNRIPNHSTNFNAEINNFLSGNDDINIIGVDRGEKHLAYYSVINQKGEILDTKSLNMIVNKKTKEKVDYAGKLEARAKNREQARKDWQTVEEIKDLKKGYISQIVRTLADLAIEYNAIIVLEDLNMRFKQIRGGIEKSIYQQLEKALIDKFNFLIDKEEADPQKAGHLFNAYQLTAPFKSFKDMGKQTGIIFYTQASYTSKIDPLTGWRPNLYLKYVNAEKAKELIGKFSSIVFNENKNRFEFTYDLENFSSNIKEKPEKTEWTVCSCVERIRWNKKLNENKGGYDYYENLTDGGLLNKNASEENISNFKELFRKIGIDYRVDILSQIKQLESKNNEKFFRNFIFLFNLMCQIRNTDQDKEGDENDFILSPVEPFFDSRRAKQFGENLPQNGDENGAYNIARKGIIILNKITKYKQTNGDDQKMSWGDLYVSNQDWDNFASK

SEQ ID NO: 1190 - protein, 1336 aa, unidentified
  REGION 1..1336: note = Cas Enzyme sequence
DAVWVDRSAAFDAAGDLPGLTRAHAQDVLEYFHGPIGAFLSLPRTDADNEISEPQNGELEKSFAQKASGWLSFNCGEGKKSDKATIARRLRLILQDLNRLEGRPGEALLEHALSVLGMKSCGDRAGKLDLLRKGVGWRPASPSKALRAIRDASQREILEATDLELLKQKLREEALTRDNEAAQSPVPWAAALRRHIENVVGFEYRKARFTVLLDHALRRFSSTHSWMKRAEAKRRTFDADVAKLDTLRATNPEACNWLDTFCNRRSQSTGVAADNQYRIRKRALGGRKALAWKAVLEAWSQEDCRTREDRIDAVRRVQSYWDDEEKFGHADLFEELASEEDVCVWKKNGRTSPQILIDYVAGCEAVTNRIRYKVPMYRHPDALKHPVFCDYGESRFAIHFQAQRSGRPQEGKKLLKHTDHRALTLQVLANGTVSTIPLMWACKRLEKDLAMKAPQRTENASPVSRADRLGRAACGSHDPVEVMNVYGRKHWNGRLQVPRHQLERLASLSRDPVRAESLRRRLHWFITFSPQLQPQGPWLDYARSRGLLSIRRGEVEISPRDSDKDAWRGLAYPVQHPANEKGRKGLAKHILSRLDGLRILSVDLGHRFSAACVVWETLTKKEFETQFQEAQAKQEDGWITFRSDLYAMVMGPEQPSHNGRSRRFRPTTVYRRIGPDVLPDGTPHPAPWARIDRQFFIKLQGEECPARYASHQEMKLVEGFAERYGLRLHDDDRRRCRVDKLMARIIRNAKLALRRHAQAAKIAWALSPNTSSIPTTGGGEIAFQAGDDNHVKLLTDTLLEWYRLATDSKWDDQEARRLWNREIASLPEGFPIQDAIDRNASCETPRQQHREAEDDLRAKLESLARALARKDRSELHRKWRTRWELEDGQPAGDFDRKTTIDRKNRRVSYTVPRTPATGWHAELRWLTDWIMGRRFPDTTSKCWPRRLGGLSLTRVSTIRALYQLHIAFSMRPTPDQPKGAPEKGDSNAGIAARLLKALERLREQRVKQLASRIAASALGLGGHWKPIEVPHHVPSGKPTKKTRWVWVEDTEPRYPACQAIVIESLTNYRPDERRTRRENRQLMSWSSAKVKKYLAEACQLNGLHLREVSPAYTSRQDSRTGAPGIRCADVPIDEFLSVPWWRKRVRQAYSKSEKERTPLDLHLVQLEQKWSQTAQSERKERCIRIPVRGGDLFVSAWEPPGVATNPLRAIHADLNAAANIGLRALMDPDWSGRWWYIPCNAKDGKPAKNKVAGVPPTVIPDAPLSPPASRDQRRSKKRRDEDIVNRWRDPSAGAICEGEDWRGTKDYWHDVEARVVQILARRQWTNCQEEVDNSVF

SEQ ID NO: 1191 - protein, 1337 aa, unidentified
  REGION 1..1337: note = Cas Enzyme sequence
MNLFKKFTNQYALTKTLRFELKPIGKTLENMRDHFRYDKKLQTFLKDQEIEDAYQTLKPKIDDIHEKFITDSLESEEAKKIHFSGYLDVYKNRKDNWEKLGEQEKKLRSQIGNTYKEGGKKLKEKYPSLKWKKGTNEVIGTKMLASPDILEAVKKEYSEEEKIEKALKTFKGFFTYFGGFNQNRENYYITTDEKATAIATRIIHENLPKFCDNILIFEKEIEVKNKQKGTKEEIKEKRKLQDEYLNAYKFLKDQGRSTKIKDAESGEMIEAKPITKDIFEIIHFPEYLSQPQIEKYNKVIGHYNLLINLYNQAKGYKKGQKLSQFKTLYNQIGCGKKDPLFFSLTHDTEKQAKENKEKYQKPYSVEQVLEQARKAGKKFFNQETKNNYDEIDTVFDFTKWLKNNQEWEGVYWSKAAVNTISNKYFANWHEIKDKLKNDKTVVSYNKKREEQIKINDAVELAGLFMVLDEGERKEGWSKYFFKPSVLEDRNIDEAKSPSQNLINLLSEDIEENAKLFNENATKALNLKEYKSEKSKKTVKAWMDYALAVNRMIKYFLVKPNKIKGAVINAELTNALDKLLDNRKEADWFKWYDSLRNYLTKRPQDDAKENKLKLNFECPSLLGGWSDGQEKVKKSVILKNDGKYYLGVLKKSSIFDTTKDNNLIYTEQNKGSGRLILANLKFQTLAGRGFIRDFSESYGEMGRKNPLKAVKCLQKLISRQYVQKYKKLKQIVQKEYQDKKEFDKDIQQALKDCYLCEFAPINWSQIIKEINEGNLYVFEIFSKDWSKESTGRANLQTLYWKNIFEKGSHHQLNGGGEIFYRKKAIKEKKVKEGYKSKPWVIEGKRFTENSELEKDQKNGNNGKSFFLHCPIKINYKAKSYGQPKYAIGEINQYVNQNFSEQEDIYFLGLDRGEKHLVYYSLVDKNGKIVDQGSFNKINGHNYQEKLAEKEKNRDEARKNWQTIGNIKNLKEGYISQVVHEIVKIVTDKPTYIVLEDLNTEFKRGRQKIERQVYQKFEVALAKKLNFIVDKTVKDNEVGSVTNALQLTPPIQNYQDIENKKQAGIMLYTRANYTSQTDPVTGWRKTIYLKKGSEKDIKDQIAQKFSDIGFENGDYFFEYTEENIGKKQRLWSGKNGKSLLRYRGKRGEDKNEWIIEQIDIVKMLDKIFDGFDKNRSFWTQIFDGKKQIKKCDEKFTAWESLRFAIDLIQQIRNSGDISKGQDDNFLLSPVRDKNENHFDSRKVTKEDRMPVNADANGSFNIARKGILMNEHIKIWTKNGKPKYDKNSSDLDLFISDKEWDLYLKNRKEWESKLSVFSSRKKMEENRKKFAKKETTTETS

SEQ ID NO: 1192 - protein, 1337 aa, unidentified
  REGION 1..1337: note = Cas Enzyme sequence
MKKQSVFKNFTNLYELSKTLRFELRPVGKTTNLLKKNEVFEKDKTIDNAYQQAKFYFDKLHQRFIEKSLQNIKLDFSEYEKLFFKKRELQRQKNNSKEIQNKTKKLYREMDKLRIQIAGGKIDKKEIIGKFNETGEEWKKDYQGKELGFNKSDLKQKGYNFILSSGVLKILKYEFPKKKDQEFQNEGYPSLFIRESEGSRNQVYIFDKFDGFIGYLDKFQKTRENMYSEKADGTAIANRIINENLQKFLENKIHFKELGKENVDFSKEIEVDLKGKTLNDIFSLEFYNQCLLQDDINFYNKIIGGETKELENGEKQSFKGLNQIINEYRQQHKNDEDFLKSKFYLFKLLDKQILGEIEKEKQLIEVDENGKDNLFDRLKEFIKENKLKIKEADVLFKDFTRGEYNEELGKIYISSKAINTISRKWFQDSYAFEILLPQKSKKDEKGIVKLKDFISILEIKNVLNDEIKSKDIYKKDYQDCIDEQKTNFEKFITIWNRELESLFKDEINKAKKVKRIGYQNALREVEKLSKDFDSKDSKNIEIIKNYADASLRIFQMMKYFALEKEKKKNPENLEAGDFYVEFEKYYNDYQIIKYYNAFRNFLTKKPYSENKIKLNFEKGNLLGGWAESPKGNAQFNAYILRKNQSYFLGVTNFSKVLDTNNAKKYSDEIKNISNGYYEKMNYKQLKSTSIYGSSYEKRYKSKYAGDKNQYSDKELIKRIKEILKLQVKYFPNLKKFINKNYRNKNDLAKDLGNEQFYNINFDEKVSLDYVEKGRYKINRGEKYLYLFQIYNKDFSKDRGEKSKNKKENLHTSYFKMLFDKNNFKKSLFKLSGGGEIFFRPSSIEKIKEKRNFPKEIIRNKRYSDDKYLFHFPIKINSGKGKKGNREFNQETNQKLFKQIDDINIIGIDRGEKHLAYYSVINQNGEIIDQGSFNKINGHDYHKKLDEREKERMDARKSWKSIRNIRELKQGYISQVVRKIADLIIEYNAIVVFEDLNFGFKQGRQKIEKQIYQKLEEALIKKLNFLVNKGEEDPEKSGHLLKAYQLAAPFTTFKDMGKQTGVIFYTTAGYTSTTDPLTGWRKNIYISNSLPIDEPRKGNGKYIKGEIQKFKKIAWDEEKQSYFFEYVPKDFGKSEISKTQTIYANVTRLQGRKNDSGYWEIKPVNPNNLLKDLFQKFNFKLKGDIKKQIEKKEGDGELIENKELDGEKRNFYKSLVYYLNLILQIRNSSSARWIENEKEEIKKEGKEADFIQSPVYPFFATKCKDYNVEENFAGFEEKIILNNKNKKRILEEFNGDANGAYNIARKGILILKAIKKSKEKPNLYISNTDWDNFAQRKK

SEQ ID NO: 1193 - protein, 1338 aa, unidentified
  REGION 1..1338: note = Cas Enzyme sequence
MAKEKSIFDDFTRKYALSKTLRFELKPVGKTLENMREHLRYDAKLQTFLSDQEIEDAYQTLKPVLDFLHEKYINESLESKTLKEVDFSSYLKKYRDRKKLSEKDFEPVCKELREYFKKAFEDTAEGWKTSAGKDKKDKPLLSEDGFKILTEKNILEYIRRNVDTFASLRSKEEIEEALKAFEGFFTYFGGFNKNRENYYETGKEAATAVATRVVHKNLPGFCDNILFFEDKKEDYKGIHSYLGKLGKNLVTKDGKPLVPISENYFRTQHFNSCLSQTGIEQYNGEVIGNANFLINLYNQSRGGEKGFKKLSLFKTLYKQIGCGKRVSLFFTLTHDTKAEAEKDRKEKKSDAFSVEEILDLAEKAGEKYFRGKSDDGTINTVSELLENISSRENYEGVYWSKIALNTISNRYLANWHQIKDKLKDAKIFKQKGKSLEDDIQIPDAIELERLFEVIDSVQGWEKKDIFFKPSLTEEKKDVHEEKKNKKRRQIIANAGKPSRALLKLLFLDIEDHAENFLAQTKIVRQIQKYKDPKSKETIKLWMDHALAVSQMLKYFLVRENKAKGAPLDATIVEALKTILRSDDVDWFGWYDALRNYLTKKPQDDAKENKLKLNFENSTLAGGWDVNKEPDNYCVIFQNSENEQFIGIIAHQENTRGYNKIFERTGNNPLFVEKSQWKKMEYKLLPGPNKMLPKCLLPTTDRKKYGASEEVLAIYDKGSFKKNENNFSPKDLSILIDFFKTAIKKYENWQCFDFAFRPTSQYEDISQFYSEVEKQGYKLDFFGIDKLYLEKLVNDGKVYLFQIKNQDYNDGKKKGHKNNLQTLYWEAVFKETENHPKLNGEAELFYRKPVPADKLVKVKNKEGKEIIKNFRFSKEKFLFHVPVTLNFCHKDNRISHLVNTKLVPKENLLFLGIDRGEKHLAFYSLVDKGGNIKEQGTLNIPFVDKDGKPRTIKAEKRSIKNGKEGVEVVECKDYNELLEARAGDRDYARKNWQTIGTIKELKDGYISQVVRKIVDIAVAHGAFIVLENLNIGFKRGRQKIEKSVYQKLELALAKKLNFLVDKNAEIGEVGSVTKALQLTPPVSNYGDIEGRNQIGIMLYTKADYTSQTDPVTGWRKSIYLKKGSEEDIKRQIADSFSDITFDGKDYCFIYTDKNTRKLWKLYSGESGKSLERFRREQNRNTGEWVSTPQDVTKNLSKLFTSFDLNKSLHSQIVDEGVELVKMDEHTAWESLRFTIEMIQQIRNTGVKKEDSDFILSPVRDENENHFDSRKAKSNEPDSGDANGAFNIARKGMIMNEHIKLGLGLYISDEEWDAWLAGKQVWGKWIIENGEKLKKKSRSL

SEQ ID NO: 1194 - protein, 1339 aa, unidentified
  REGION 1..1339: note = Cas Enzyme sequence
MYFAIRISPWFKALLKLLQIIKYGNYTLLIYFSFIFIGIFIKILTMKNLIDFTGLYSLSKTLRFELIPQGKTLENIEKKGLLKQDEARAEKYKKVKKIIDEYHKDFIEKSLNTIKLEGLEYYYDLYLKTNKEDKEIKEFSKQKERLRKQIANAFKANEKFKTLFLKELIKEDLLSFVSNEEDKADIKEFKDFTTYFIGFHQNRENMYVAEEKATAIAYRLINENLPKFIDNIKIFEKIKNEAPELINQLNQVLSEMEEIVQGKTLEEIFSLNYFNQTLTQTGIDLYNIVIGGRTPEENKTKIKGLNEYINTDFNQKQTDKKKRQPKFKQLYKQILSDRHSVSFMPESFENDNQLLESIENFYTNELLHYSTEGKSISILEAIKNAVGNLSSFNLSKIYLRNDTSLTDISQKVFGDWGVISKALQDYYEKTNPLKPKEKQEKYEERKDKWLKQDIDIQTLQTAIDHYENETVKEKNNGNVINDYFAKFGMNNESKIDLLQNVYQNYNIIKDLLNTPFPESEKLGSNKELVNLIKAFLDSIMNVIHFVKPLSLKDSDKEKDESFYSLYTGLYDQLNHTISIYNQVRNYLTQKPYSTEKFKLNFENSTLMDGWDLNKEADNTTIILRKDNLFYIGIMDKKNNHIFKHIPEMIDYEPHYEKIIYKYFPDASKMIPKCSTQLKTVVSHFESNITDKIIEGKSFDSALKITKRIFELNNFVYDDISKTMVLSEDNEKRPKMFQKKYLEISKDIDGFKDALKDWINFCIDFLNKYESTKHYSFNFKNSELYNSLDEFYGDIDTQTYKITYNNIPVSFIESLVNEGKLYLFQIYNKDFSPFSKGKPNLHTLYWKMLFDEENLNDVVYKLNGQAEVFYRKSSIKESNKVIHNANETLTNKNPDNEKATSKFDYDIIKDKRYTLDKFQFHVPITMNFKADGILNINPKVNEFLKNNHDVNIIGIDRGERHLLYYTLINQQGEILEQDTLNIIENEKQKVDYHNLLDKKEGTRAEARKDWGTIETIKELKEGYLSQVIHKLTTLMVKHNAIIVMEDLNMGFMRGRQKVEKQVYQKFEKMLIDKLNYLVDKSKKANESGGVLRALQLANKFESFKSMGKQNGFIFYVPAWNTSKMDPVTGFVNLFDTRYENLEKAKAFFNKFNSICYNQTKDYFEFEFNYANYTAKAEGTKTNWILCTYQNRIETFRNTAKNSQWDNREIILTNEFVKLFEQHGIDYKNNNELKSAIVMQTEKAFFERLLYLLKLTLQMRNSITGTETDYLISPVANDEGEFYNSRNANNKLPQNADANGAYNIARKGLWCLQQINKTDDLKKIKLAISNKEWLQFVQNNN

SEQ ID NO: 1195 - protein, 1339 aa, unidentified
  REGION 1..1339: note = Cas Enzyme sequence
MKNLKQFVGLYPVSKTLRFELKPVGNTKENIERNGILEKDNQRAVGYKAIKKVIDEYHKAFIEQMLNEFELNLSNDGNLDSLEEFFLLYHLSSNDPTRDNITKVQESLRKKISERFTKSEQYKRLFGKELIREDLAQFVETPRYESFIRSQKGNENLSDDEVRQIQNEIIQEIGQFRDFTTYFSGFYENRKNLYVADDKATSIANRMINENLPKFIDNMDVFEKIAASEVAIHFDTLYKEMEAYLNVKSIEEMFQLDYFSIVLTQKQIDVYNSIIGGKTLEDGTKILGLNEYVNLYNQQQNNKDNRLPKLKPLLKQILSERNAISWLPDEFASDNEMLESIERCYQDLRKQVFEGENSLKELLKGIVDYDLEHIYLPDDLQLTNISQKHYGNWSVIKKAHEEYLRKEMQENLMVNKPQRRNESDENYQERIQELLKTKKYEESIEKQLKVNDSFSLAQINRLMSIYQGEDSKPIELYFATMGAEEIGNEKKPNLFIRIENAYTEVKTLLTTAYPKDRKLSQDKANVEKIKNLLDAIKNLQHFVKPLLGKGTEGEKDNHFYGEFTPLWEALDQITPLYNMVRNRMTQKPYSDEKIKLYFDNNGSFLNGWVDSKTESDNATQYGGYLFRKRNSIGEYDYFLGVSAATKLFRSFNSVEASDRSSYERLDYYQLKGKTFYGTLYKGNYETESANIRHAIDNLVYHAGSISIKEKINAERMKKQPKVSTAIGYLKYIMQQDCELYDILLKDDTFEKSNQAIMASMKATLLSLDRIPSAKEYAQRNYKLFSEMMDDIDMLLQGKVFSYFPVSQRELDETVNRTTKPLYLFKITNKDLSYAETHEKGLRKSRGSDNLHTMYFKALMSGCQDVFDIGSGSMFFREHKLVYTEDQLKKGHHYDMLKDKFNYPIVSKKRYAFDKFQFHLSVTMNYNSNKSKDINPMVNDYLKESNATHIIGIDRGERHLLYLSLIDLNGNIIEQYSLNKIANEYKGNIYRTDYHELLDAKEKQRDEARRSWMSIENIKELKEGYMSQVIHKIAELMVKYNAIVVLEDLNLGFMRGRQKVEKQVYQKFEKMLIDKLNYLVDKKIDANVLGGVQKAYQLANKFESFQKLGKQSGFLFYIPAWNTSKMDPTTGFVNLLDTRYENMAKAKAFFAKFKSIQFNAIKGWFEFAFDYDDFTTKAVGTKTQWTLCTYGTRVETKRDAKQNNMFVSEEFNLTSKFKELFVLYKIDLNENLREQICSQSEAIFFQKLLHLLRLTLQMRNSITGTEVDYLISPVMNASGGFYDSRKCGKNLPENADANGAYNIARKGLWIIEQIKQSNDLSKLKLAISNKEWLRYAQGVD

SEQ ID NO: 1196 - protein, 1339 aa, unidentified
  REGION 1..1339: note = Cas Enzyme sequence
MSDMSSLKQFTKKYSLTRTLRFELIPVEGTTERLVEFNILSVDQKRADDYKKMKETLDAYHRDFIDSCLQNVKLKGLDDFYNLYTTPSITVKEQESYKKSVDKVKAGLRKEIVDYFEKENGKDRVRFKNLTKKELIVKDLKPWIEQHLKPDGEMYFFEEGFKTFTTYFSGYNQNRINMYSVEQKSTAISYRLIDENLPRFIDNMRVFIKLKDAGLEQALDDFETVLKKRFSIDSLESVFNLDYYNRVLTQNAIDIYNAVIGGWHDGKEGVKGINGYINEYNQRNGGNKLPKMTMLYKQILSDRLSASWIPDAFENCKELIDGIMKYNDEALLTPDGEYLPDVLSELLKGISKYDLNRIYVKNDVSLRNISNELFGYYGVLTEALNYYYEHVIDQDYLTKMSKVKTEKQADSLEKKKNAYVKDTEYFSLHTLQEALDLYIASLDETSFVKKRYCPNCIAERYYYNVLPYTERIGKSYDELGSLIEKKPDKNYQLSDEEKNRIKKYLDNLLDYYHYCRPLILKEDSMLPKDELFYGTFAPLMEQFGSITAFYDKVRNYVTKKPYSTDKIKLNFQCKGGFLQGWVDSYTEKSENGTQHGGYLFRKKNFIGEYDYYLGVTKQTKCFRCRTAIEERDLSPYERLDYYNPNSKSIYGSSYRGERSYNEDKRLAKNAIVRFLASNSDNDIAVRLKNEMLDDGAITPSGCLSSIRKSSEDLYLRLLEDEEFCEINNTIIDNLKSTMRASVRIPGSDIIANKEYIVFTSIIADIDSLMANRVFNYIPVSQAEMNAVLNDNSKPMFLFKISNKDLAYPERVEQGVRKRQKGHDNLHTMYFKALMSGSQEVYDLGTGEVFFRQASIKRKVTHPRGEAIECKNPNSKKEYSTFDYDLIKDRRYTEDKFFLHLSIVQNIKQTQKVKDVQFNEEVCKFLKNNQDINIIGIDRGERNLLYISMIDRDGRIVRDKKGNLIQYSLNDIIGEYKNINGETIKFKTPYNDLLNQREEADKDARKNWKTIDSIKELKAGYMSQVISHITHLMVEYNAIVVLEDLNSRFINSRKKVEKQVYQNFEKALLEKMNYLVFKDVPAEAPGGVMNALQFATPFKTFKDLKKQSGFIFYVPAWNTSRIDPVTGFMDLLRPKCEQISEWQSFYDKFDFIRYNPQDKYFEFGIEYANYLPTLRLKESKWVVCTHGDTRYVFNRALNNNKGGYETINVTQEIIELFDKYKIPYQDGKDLKDIITKQDKKIFYSTLTKNLKITMSMRYSNGKGGRDFILSPVKDKNGEFFDSEVAKKKALALPHDADANGAYNIARKGLYVLRQIDKSESVKDWTTRISNTEWIEFTQSL

SEQ ID NO: 1197 - protein, 1340 aa, unidentified
  REGION 1..1340: note = Cas Enzyme sequence
MKEIKELTGLYSLTKTIGVELKPVGKTQELIEAKKLIEQDDQRAEDYKIVKDIIDRYHKDFIDKCLNCVKIKKDDLEKYVSLAENSNRDAEDFDNIKTKMRNQITESFKKNPLFVGLFKKELITNYLPNFVSEEERVVVNKFSKFTTYFDAFNDNRKNLYSGDAKSGTIAYRLIHENLPMFLDNIASFNKISETGVNKYFSDIENEFTAILYEMHLSDLFQIDYFNNTLTQKKIDNYNYIVGAVNKAVNLYKQQHKTVRVPLLKTLHKMILSERVTPSWLPERFESDEEMLTAIKETYESLKDVLVGGNDDSLRNLLLNIDNFDLEHIYIANDSGLTSISQQIFGYYDTYTLAIKDQLQRENPATKKQRENPATKKQRENPNLNDDCIDKLYKKEGSFSIAYLNRLVDTKEHITINEYYRLLGSYCREEGKRKDDFFKQIDGAYSDMLYLFSTEHGEIAQSDSDTAVVQQLLEAYKGLQRFIKPLLGHGDEADKDNEFDAKLRKVWDELNIITPLYDKVRNWLSRKIYNPEKIKLYFENNGKLLSGWSDSQTEKDNGTQYGGYIFRKKNEIGEYDFYLGISTDAKLFRRDETICYEDGMYERFDYYHLKPTTLLGKSYIGNYGEDSNAVLSAFKNAVTKLHLEKKLVPKDNEKVPTYLKRFKQYYADFYQILMNDDIVVNANKRENSQDSEEVLSAFKNAVTKLHLEKKLVPKDNEKVPTYLKRLKQKYANFYQILMNDVNVVDAYKSMKQHILATLASLIRVPAAIELAAQTDLDIDELIDEIMNLPSESFGYFPVATAAIEEANKREKKPLLLFKMSNKDLSYAAKSSEGLRKSRGTENLHTMYLKALLGMTQNVFSIGSGMVFFRHKTKGLAETTARHKANEFVANKNKLNDKKKSIFAYEIVKNKRFTVDKYLFKLSVKLNYSQPNNNKIDVNSEVREIISNGGIKHIIGIDRGERNLLYLSLIDLKGNIVMQKSLNILKDDHNAKGTDYKGLLTEREGERQDARRNWKKIANIKDLKRGYLSQVVHIISKMLVEYNAIVVLEDLNPGFIRGRQKIERNVYEQFERMLIDKLNFYVDKHKDINEVGGLLHAFQLTSEFKKFKKSEYQNGCLFYIPAWKTSKIDPATGFANLLDTRYTNADKALEFFRKFDAIRYNEEKDWFEFEFDYDKFTQKAHGTRTKWILCTHGKRLRFKRNSTRVQEVVVLTDEFKKILGEAGIDIHVNLKEAICNLEGKKNLEPLMQFMKLLLQLRNSKAGTDEDYILSPVADENGIFYDSRSCGEQLPENADANGAYNIARKGLMLIRQIKEAKELDKVKFDISNKAWLNFAQQKPYKNG

SEQ ID NO: 1198 - protein, 1340 aa, unidentified
  REGION 1..1340: note = Cas Enzyme sequence
MEKSKISSFKDFTNLYSLSKTLKFELKPVGNTRENMNKNLEYDENMRAFLTDQRIEDAYQILKPVFDKIHEEFITKSLRNDKAKEIDFSEYFSLYKKQKNEKDKDEKRKLDKLIQDEEKKLRKEFEKLYIFAGEEFKAIAGKDDKNKDILKENGYKVLTEVGILIYVKNKLSNDPNCFNNFEIPEIKSLVKNNTTNKEKIEKALEQMKKFFTYFGGFNQNRENYYSTDEKATAVASRIIHENLPKFIDNVLDYEKYRYDYNKIFVELKNNGKDLKLRNPKWDGIDKNSEFIFAYNIENDKKIFTIVDFASYFSQSGIDAYNEKIANVNFLVNLHYQQTKNKLPKFKFLFKQIGCGDKNNFVKLIKNNAELKIVIEKAKLNGEKYFIDNKDKVTVATFVDYILNLDNFENIYWSDKATNTISSKYFANWNFLKEELLKEKVFNKDKNTGEPKSPQAIHLSELFKVLDTEKDWQEKGVLFKNFIFENAENAEKIKNNNNKEYTNNKDRYDLFIQKKFSINNSKKASEALLKMICEDIKFLANNFIDGSNEILKIEEKDYQKDENKEKIKAWLDNALFVGQILKYWKVKARYSVDGNFMDIWNRLKVSKVIEDYDIIRNYLTKKPQSQLGKLKLNFENSSLASGFDLNKEKDNSCIFLMDKDGKQYLVIMDHKDTNIFKQDIVNPIYISDNFGWIKVNYKLLPGPNKMLPKVLFSKKWVEKNPTPEKITKIYKQETFKKGDKFNKKDLHNLIDFYKEQLKKYPSENESWDKIFNFNFSDTKNYEGIDQFYTEIEKQGYKLDFVDINKSKIDELVSRGEIYLFEIKSKDNNLKNGRKKTSAKDLQTLYWNKVFGDNENKPKLNGGAEIFYRVALEKKDLLNATKKDKDGKEIEIKLKNGETAIKNFRFSKEKFLFHFPITLNHCLKNNKINDLVNKNVVENKNQLFLGIDRGEKHLAYYSLINLKGEILEQGSFNVINGQNYWNELNEKQGNRDEARKNWTKISNIKDLKDGYISQDVRRIVDLAIYNEGDKKKGFRETPAFIVLEDLNIGFKRGRQKIEKQVYQKLELALAKKLNFLVDKNAKVGEIGSVENALQLTPLVRDFGDIKGKQFGIMLYANPSFTSTTDPITGWHKSISIKKGGAEYIKDQIIKYFDDFGFDGKDYYFKYKDANTGNLWNIYSGDNGKELDRYRDKFSEKDGKKHWNPEKIEIVENLENIFKGFDKDRSFKEQIKDGKELNKIDKDRTSWESLRFNIDVIQQIRNTGKDEKDNDFILSPVRANGTIFDSRKVKSNEFYPQNGDANGAYNIARKGIMMFERIKDKSEKTNLFIKNEEWDKFIQNQNK

SEQ ID NO: 1199 - protein, 1341 aa, unidentified
  REGION 1..1341: note = Cas Enzyme sequence
MANEKQQSKVFKEFTNLYSLSKTLRFELRPVPETKKLLEEGEGKNLIQTDQEIDRLYEEEMKPMFDALHEKFINESLSAVKFEADKFEELEKLIAQAETLRKKIKEARAKKENINLIEKELREIEGEYKEGERKGKIPDLQKELRVILTKTFDDTAERWKKDLDGKETDLPNKKGKRKIKFKEKEHGPKILQEENVLALLAFFNPEKIDVIKKFVGFFTYFSGFNQNRANYYSEDALATGVANRAINKNLPIFFKNKKDFKRFRGYLPQLEKFSRYFESGNYGKYLSQAGIEEYNEQIGAIKQIVNLEHNQKQKDSKFQLRGLATLEKQIGCKTGKQREGAGEGEDLKFLEKAGRGFQVVKNKDGEYFVWECLDYINAGLAEKLKDVKENYQKFFADWQSGGYDLEKIWFRKEAINTISGRWFGGSNWFIIGKALALAGAGKFDKRENAYKTPEFVSLAEIKAAFEILENGINFDLKKNKKKGDSGELIKYSAEDLFREEYKEKGLIKSGLFETMLAVWRREIDDKFIQLENFKKIFKETRQEKFDRNKKDGSGQSIHTEIVKNLIEEGYLRLFQLTKYHNLDKKGERDPRPFDGNFYAALDEFWKDNIIVVYHKALQATLTKKPYSEDKIKLNFENGSLLGGFSDGQERNKAGVILKNGNKFFLGILIDRCFFRTDKPNPVYANAENNEWQRLILTNLKFQTLAGKGFLGKYNISYGDMGKENPMKAVESLQKFLLLPENKKKYLDKYSPLVAIANKNYQSKKEFDADIKEALKDCFSMEFKSIDWEMVKQGLFEKRLYLFEIVNKDISTETKNKKNVHTLYWESLFCGENLDKPILALNGGAEIFYRESQKEKLEKKFDKSGKEILDHKRYGLDKYFLHASITINYGQPKNIKFKEKINEEISKNQKINVIGIDRGEKNLLYYSVVSPEGVLLEQGSFNRIETESEVDEKEVKAEYDECGELKKVELAPTGKKVKYTDYQILLDYYEKKRNLARRDWQTIGKIKDMKDGYLSQTVHKIYQLILKYNAVVVMEDLNVEFKAKRAAKVEKSVYKNFEMALAKKLNHLILKDKEANEIGGALRAYQLTPAIPANDVGKFDNARQWGIMFYVRANYTSTTDPLTGWRKHRYLSYSDKIETIQNFFNPDEGVQIDYDSARQCFKFSYDQEFDSDGKKHWELFAFDGLERFYWDNKARAGRRYNLHEEFEMLFRDLDRSKNINAQICGVNNFDWKKLAFLWKLINQIRNTDRAAQGDENDFLQSPVWSEKYDCFYDSRKATSEMPNNGDANGAFNIARKGLIILDRIKKCADITKFGNDNNGRNPENGYFVSDGEWDKFVQTNSN

SEQ ID NO: 1200 - protein, 1341 aa, unidentified
  REGION 1..1341: note = Cas Enzyme sequence
MGIGKIDNMLKEELKTSISKEGGNNNNSKSLTFYNVSNFEKSKESIWDEFTNLYSLQKTLRFELKPLGKTKEFIEKKGLVEEDEEREKEFNQVKKIMDDYYREFIEICLSEIKIETEDIEALERVYNGLKKDTKNQTLREEYTKYQKDLRAKIYDKIKKIKNFGVLFGKDFINKILPDWLDCKNRQQDKDLVLKFKRWVTYFNGFFKNRKNIFSEKEIPTSIIFRIVHDNMPKFLDNVSRFKEARKLIDFDYKKIEENFKSELNGQSLEEFFSLDNISNCLNQAGIELHNLLIGGKSLEHNLKIKGVNEYIEELSKTLQEKTEQKKIRKLKLSPLFKQILSDRESASFVLEQFKDKNEVFQKIDEFYVHFNNISDKIQSVIAKLKECDVDSVYLKNDNNLTKISQNIFGDWNKIHEGLKEYFILESKSKDLTEKQCIKEVEKKMKSKYFSISEIEGGISLINVEKKQSLIDYFLNFSGVIDNANMNLFEDLKEKYSAFKQIDRNKDGDLKDETSANDVEVIKDFLDSIMNIYHFVKPLHIDFKKSEGDKGTDALDLNADFYNGFDEIFGKLGEIILLYNRVRNYVTQKPFCTKKFKLNFKSATLASGWDLNKEHDKNYSFIFKEGKSFFLGVINVEEDKNVLREDKHPEIFIKNSSFMKMIYKDLGNINKQISRLGFSEKAKKGVETVGWNPEIKSIKKEFEEFQKSKEKDKSGRSSNFDKDKLFKLIEYYKSVLKNHSEKYEETYNLSYKPTKDYKNLGEFFDDISSQTHKMKFVGIDKNYVNKLIDEGKLYLFQIWNKDFSDFSIRNEMDPNKKSKPNLHTIYWREIFSEENIKDPVHKLNGGAELFFRKASSKRDITHPKNQEIKNKNPINGKEKSTFIYDLIKNERYTEDKFFFYCPVTLNFKVGEKNKVLNRLVNKYIHNTNEEINILGIDRGERNLAYYVLIDSRGNILEQNSFNIISDDLHRKLNYQEKLDFIEGERDKARKTWKNIVNIKEMKTGYLSHAIHKIAKLAIESNAIIVLEDLNFGFQRGRFKIEKQIYQKFEKMLIDKLNYLVFKERNNNQSGGSFKAYQLTNKFDSFKKLGKQSGIIFYVDAYKTSNICPKTGFTNLLFPKFENVDNSRNFFKKFKFIRFKNDEDLFEFNFNLFDFSSENNKSRLLRDNWSVWSNGTKLIKTKDKENNYNWKTKEINVTKELKELFDYNEIKYTSAENIVDQIIRVEDRSFYEKLTELFKRVLQLRNSYTDYEIKEFKKKLGDGFRMSNYDFILSCVKDRKGHFFDSRNAQDHEVKDADANGAYHIALKGLMLIEKIKKSDTNEKLDLKIDRFDFINYATKRYI

SEQ ID NO: 1201 - protein, 1342 aa, unidentified
  REGION 1..1342: note = Cas Enzyme sequence
MKGHENYSIESVWNEFTNQYSLQKTLRFELKPIGKDGKRLSAEDAAKVFAKILENDKKIIDAYIALKPIMDKVHEEVINESLISKEAKKIDFSNYLEKYKQKKDIASEEKALREAIVKTYDVGAQEIKKKAGNNSKGKPVLKEKGIKCLTEAGILEYVEKVISELPDEKEKEKLKGHLKTFNKFFTYFYGYNQNRENYYSKEEKATAIATRIVHDNLPKFCDNYIQFSDGKAQKKKPFDNAEEIISRKDEYLNAYKFLKDNDKITQIKDTQTNGVIEASPIDEKVFEIVKFSECLSQQGIDEYNRIIGHYNLLINLYNQARKDEKYFRKLLPFKTLYKQIGCGEKKAWFYALKYDTRKQQDAKEKTEAILNLEETLNQISKTGKKYFVKSSDESEVITFHRFINWLRRTDDWNGIYWSKAAVDKVSDRYFSNWHDIKDRIQQGLQGKDKKLKEICETIASYKKNREEQLKINDAVELSGLFEVLNQEKDKGWSKTLFKESILEDRHSLINEELTPSRNLINLICHDMEGFASDFCNNSTKILETTDFKNETNILEIKKWLDNAKSLIWIVKYFDVKESKVKGTTINPELTDMLIALLRSDDTKWFDWYDAVRNYVTKKPQENAKENKLKLNFGNPILLGGWSDGQEKSKGSVLLKNNNKYYVGILDERSLFDTAKKNNPVYVNSGKGAGRLILKNLAFKTLAGKGFVRDYNEKYSDMGKRNPNETIKKLQDFIKKNYVSQYKPLEQVVGKEYSNKKDFDNDIQHILTECYECNFTPINWDIVLQNVSNKKLYLFEIYSKDFEEKSTGKPNLQTKYWEHIFHNNSTIQLCGGGELFFREKAITDDKKVVHPANLPIKRRSDGKTESRFSHDITKDKRFTTEKYFFHVPIKLNYRTSSKLNVNEKVNDLFIQANDIQFLGIDRGEKHLIYYSLVDAKGNIIEQDHFDVVKGKDYLQEINEAAKKRREKQENWQQKGQIKNLKDGYISLVIHEIIQKMKDKDGQLKPTFIVLEYLTPGFKRGRQKFEQQVYQKFELAMAKKLNYLVDKNVADGEIGSVGKALQLTPPVGTYQDIENRKQLGIMLYSRANYTSITDPATGWRKTIYLKKGKDEDVKKQVFETFSEIGMDKNGDYFFEYEDKDTKNKWKLWSGKNGKSLERYRFRWGKSKNEGIIESYTTKEMLDKLFEDFDKEKSLLEQLKGNKTLAKIDDKNTAWESLRFVIEIIQQIRNSGDKSKNQDDNFLLSPVRNDLGEHFDSRKYPDQQNPNMPKDADANGAFNIARKGILMYEHIKQWIRIGKPKFEKTTDLNLFISDTEWDLWLLDRPKWREQLPMLASRNAKKKEEK

SEQ ID NO: 1202 - protein, 1342 aa, unidentified
  REGION 1..1342: note = Cas Enzyme sequence
MNRIYQGKVTAVEIPDGKDKWKQFDPDPKKNRGEWQSVLWKHHEMFQDNVNYLLAAFAALVPPNCSDDVWRDYRAAIERSWKSYTGRQGSWDRPFETACLIVGCSKGASFKEFQRKLTSLTGSKASEKQRFEALKQLFESATETAMKLTDPDQPVEESLKGKAKDLFGDTLVNLCAQKTKVTPRDVKAKQRNRASECTKKVNEGGRLKWADVFYFKTDTSAGNWSREDAAKNIILCLDKLIGEDKQKEKDAKTSDQKNKMSELAERLEKQKKTLAAWCNNPKKDLPATEPTRKGSGGYDLKAAILFSLKPALDGFRDAFLLFNQARLKEESSIIAKTDAAYVARMAGGIARPVFPFFCDLWAGKLNDEKVGQGIWPDFEKQAFSEVFTKIGQFIVRGRKFELRLAIACETIARIEKQKKSDPRLQAVERIAEALADELPDSAVDENGQRRPYGIRDRTLKGWRKVCPAWRDALKKAPNLTAEDLVKQKNRLQERQRERYGSAALFDRLAKEREIWNHDEKEDSLEIWAAYVEAIEEKAHLETERLFAPAHATLSPRFFRWSETNNKEHLAASSTEAPFAFEADALDLTEKQKTKIKIHFWSPRLLRDGLRSKNEKLDKDEPDQTWMPPVLRAFVNARKWPCDKQTFAGASVRLAPRCKENIQLVFEPELRTGVLSAKWKETFPFSPAKNKDSELVGLFWPRTKEDKVSWFDKGEMRCLGVDLGLTNSAAWQILQAANKDTTANTTRLRHRLNPDSENPAWFAHSIANGIVRVAGEDRWGWRKFAPDEKAKLRAEMKKTAKKRNAFCRKFYALNREIEFETATHAFLPELSGSGGRNATADETNEAEALFTIFKAKGFDITDRQPNWKKILSFPEQNDELLWGLKRVRAQLFRLNRWSEQLGNASDSKSHQLAVEIIGSLRGDDPMLELAALTSDPQKLKKHIGELAGEYLDCFKSMLPRIADRILPWRRGHWSWKPCENDWHRMELDTSKPRPEALLAGQRGISLTRINQLKDLRQLAQSLNHLCRRKQIERGEIVPEPFEDCRQAMEDAREDRAKQIAHEIFAVALGVELAPPPADKQERKQTESLHGVYRCLERGPVNFIALENLTEYKTSAKQGRRENRQLTSWSHRRVHKILGELCELVGLPIVLVDPKFTSRFSAKDHSAGFRAEEVRKDDPRRSFWQRKAKEDPGCWQFEFLSWLDMIPDGKSLLLPKKGGEFFVSLGKDNSLYQADLNAAYRIALRALAHQKRAELLGQAWIEKKPYLVDTASVFSDSVMRDGCSFKTIPSSERLWEDVNDDLASQRCREINLARFAGWKITLPKQTLPKAPPPDEEDDVPMQFT

SEQ ID NO: 1203 - protein, 1342 aa, unidentified
  REGION 1..1342: note = Cas Enzyme sequence
MNRIYQGKVTAVEIPDGKDKWKQFDPDPKKNRGEWQSVLWKHHEMFQDNVNYLLAAFAALVPPNCSDDVWRDYRAAIERSWKSYTGRQGSWDRPFETACLIVGCSKGASFKEFQRKLTSLTGSKASEKQRFEALKQLFESATETAMKLTDPDQPVEESLKGKAKDLFGDTLVNLCAQKTKVTPRDVKAKQRNRASECTKKVNEGGRLKWADVFYFKTDTSAGNWSREDAAKNIILCLDKLIGEVKQKEKDAKTSDQKNKMSELAERLEKQKKTLAAWCNNPKKDLPATEPTRKGSGGYDLKAAILFSLKPALDGFRDAFLLFNQARLKEESSIIAKTDAAYVARMAGGIARPVFPFFCDLWAGKLNDEKVGQGIWPDFEKQAFSEVFTKIGQFIVRGRKFELRLAIACETIARIEKQKKSDPRLQAVERIAEALADELPDSAVDENGQRRPYGIRDRTLKGWRKVCPAWRDALKKAPNLTAEDLVKQKNRLQERQRERYGSAALFDRLAKEREIWNHDEKEDSLEIWAAYVEAIEEKAHLETERLFAPAHATLSPRFFRWSETNNKEHLAASSTEAPFAFEADALDLTEKQKTKIKIHFWSPRLLRDGLRSKNEKLDKDEPDQTWMPPVLRAFVNARKWPCDKQTFAGASVRLAPRCKENIQLVFEPELRTGVLSAKWKETFPFSPAKNKDSELVGLFWPRTKEDKVSWFDKGEMRCLGVDLGLTNSAAWQILQAANKDTTANTTRLRHRLNPDSENPAWFAHSIANGIVRVAGEDRWGWRKFAPDEKAKLRAEMKKTAKKRNAFCRKFYALNREIEFETATHAFLPELSGSGGRNATADETNEAEALFTIFKAKGFDITDRQPNWKKILSFPEQNDELLWGLKRVRAQLFRLNRWSEQLGNASDSKSHQLAVEIIGSLRGDDPMLELAALTSDPQKLKKHIGELAGEYLDCFKSMLPRIADRILPWRRGHWSWKPCENDWHRMELDTSKPRPEALLAGQRGISLTRINQLKDLRQLAQSLNHLCRRKQIERGEIVPEPFEDCRQAMEDAREDRAKQIAHEIFAVALGVELAPPPADKQERKQTESLHGVYRCLERGPVNFIALENLTEYKTSAKQGRRENRQLTSWSHRRVHKILGELCELVGLPIVLVDPKFTSRFSAKDHSAGFRAEEVRKDDPRRSFWQRKAKEDPGCWQFEFLSWLDMIPDGKSLLLPKKGGEFFVSLGKDNSLYQADLNAAYRIALRALAHQKRAELLGQAWIEKKPYLVDTASVFSDSVMRDGCSFKTIPSSERLWEDVNDDLASQRCREINLARFAGWKITLPKQTLPKAPPPDEEDDVPMQFT

SEQ ID NO: 1204 - protein, 1342 aa, unidentified
  REGION 1..1342: note = Cas Enzyme sequence
MNRIYQGKVTAVEIPDGKDKWKQFDPDPKKNRGEWQSVLWKHHEMFQDNVNYLLAAFAALVPPNCSDDVWRDYRAAIERSWKSYTGRQGSWDRPFETACLIVGCSKGASFKEFQRKLTSLTGSKASEKQRFEALKQLFESATETAMKLTDPDQPVEESLKGKAKDLFGDTLVNLCAQKTKVTPRDVKAKQRNRASECTKKVNEGGRLKWADVFYFKTDTSAGNWSREDAAKNIILCLDKLIGEVKQKEKDAKTSDQKNKMSELAERLEKQKKTLAAWCNNPKKDLPATEPTRKGSGGYDLKAAILFSLKPALDGFRDAFLLFNQARLKEESSIIAKTDAAYVARMAGGIARPVFPFFCDLWAGKLNDEKVGQGIWPDFEKQAFSEVFTKIGQFIVRGRKFELRLAIACETIARIEKQKKSDPRLQAVERIAEALADELPDSAVDENGQRRPYGIRDRTFKGWRKVCPAWRDALKKAPNLTAEDLVKQKNRLQERQRERYGSAALFDRLAKEREIWNHDEKEDSLEIWAAYVEAIEEKAHLETERLFAPAHATLSPRFFRWSETNNKEHLAASSTEAPFAFEADALDLTEKQKTKIKIHFWSPRLLRDGLRSKNEKLDKDEPDQTWMPPVLRAFVNARKWPCDKQTFAGASVRLAPRCKENIQLVFEPELRTGVLSAKWKETFPFSPAKNKDSELVGLFWPRTKEDKVSWFDKGEMRCLGVDLGLTNSAAWQILQAANKDTTANTTRLRHRLNPDSENPAWFAHSIANGIVRVAGEDRWGWRKFAPDEKAKLRAEMKKTAKKRNAFCRKFYALNREIEFETATHAFLPELSGSGGRNATADETNEAEALFTIFKAKGFDITDRQPNWKKILSFPEQNDELLWGLKRVRAQLFRLNRWSEQLGNASDSKSHQLAVEIIGSLRGDDPMLELAALTSDPQKLKKHIGELAGEYLDCFKSMLPRIADRILPWRRGHWSWKPCENDWHRMELDTSKPRPEALLAGQRGISLTRINQLKDLRQLAQSLNHLCRRKQIERGEIVPEPFEDCRQAMEDAREDRAKQIAHEIFAVALGVELAPPPADKQERKQTESLHGVYRCLERGPVNFIALENLTEYKTSAKQGRRENRQLTSWSHRRVHKILGELCELVGLPIVLVDPKFTSRFSAKDHSAGFRAEEVRKDDPRRSFWQRKAKEDPGCWQFEFLSWLDMIPDGKSLLLPKKGGEFFVSLGKDNSLYQADLNAAYRIALRALAHQKRAELLGQAWIEKKPYLVDTASVFSDSVMRDGCSFKTIPSSERLWEDVNDDLASQRCREINLARFAGWKITLPKQTLPKAPPPDEEDDVPMQFT

SEQ ID NO: 1205 - protein, 1343 aa, unidentified
  REGION 1..1343: note = Cas Enzyme sequence
MTNKTKKEFKLFSDFTNLYELSKTLRFELRPIGNTQTMIDKANVFGKDKVIKDKYQKTKPFIDRLHREFVDEALNKVSLSGLKNYFKILENWKNNKKDKEAVKELKNKEEELRKEIVKCFSSTAKNWANEKYKNLGLKKKDIGILFEEGVFNLLKERYGNEDESFLKDKKDNFLKNEKGEKLSIFDEWKGFAGYFTKFQETRRNFYKDNGTETAIATRIIDQNLRRFCGNIEDFKKTKNKIDFSKIEKNFNKTIIDIFSLGFYDQCLLQKGIDSYNEILGGKILDNGEKLRGINELINEYRQKNKGEKIPFLKLLDKQILSEKEKFIIGIENDKQLLKTLKSFYKIAEEKTKILKNLFSDFVLHTENYDLRKTYISKEAFNTISYKWTDKTREFDELLYNAMKSDKSVGLNYDKKEDRYKFPDFIALSYLKDCLENIASDTRFWKEKYYKNKDDKGFLNENENIWNQFLKIFNFEVKQLFASNTFDNKGEKIKIGYDNFKEDFEDIVSKKDFKNNEGSKITIKNFADSVLWIYQMAKYFAIEKRRSWNDEYELSEFYTNPNDGYLLFYKDAYDEIVKTYNDLRNYLTKKPYNQEKWKLNFENPTLANGWDKNKESDNSAVILLKDEKYYLGLMRKGNNKIFDDKNKTEFIKNIENGVYKKVVYKLFPDPAKMMPKVCFSRKGLKFFNPPKNILQIYKNKEFKKGDKFSLAKMQELINFYIDCLSKYDGWKCYNFANVKKPKEYRDNIGEFYKNVSENGYKISFTPVSKSYIDQKNEAGELYLFEIHNKDWNLKDGKQKTGAKNLHTLYFENIFSPENISKNFPIKLNGQAELFFRPKTKEKNLGYKIWNKKEKEWIKTNKKENGSVIDRKRYGKDKIFFHCSITLNRETGSIYRFNNYVNDFLFENDINIIGVDRGEKHLAYYSIIDKKGNKIDSGSFNEINEVDYAEKLEKRAGDRKQARQDWQSVEGIKDLKRGYISQVVRKLADLAIEHNAIIVLEDLNMRFKQIRGGIEKSIYQQLEKALIDKLSFLVEKGEKNPNQAGHLLKAYQLTAPFTSFKDMGKQTGIVFYTQASYTSKTCPKCGFRKNVNKFYFENNIEKAKEVLRKLKVFEYDKRNRCFNLSYCLNDFMNKEDVEIKAKKRNNVLYSELDSKDLFILNTKDAIRYRWHDKNTERGRVILDWENVYEEEQSEKVKNTKRGITKKYNITKCLRGLFEKTRLDYKQNLCDKLVSEGLDSHFYKNLFNYLNLLFEIRNSISGTRIDYISCPECGFHTDKSKEIKNGDDNGAYNIARKGIMILEKIKQYKQKNRTLDKMNWGDLFIDLEEWDKFTQSRWNPTSKSQK

SEQ ID NO: 1206 - protein, 1343 aa, unidentified
  REGION 1..1343: note = Cas Enzyme sequence
MANNTLTRIYQGRVKQVSINGKSLSPEDGDNLIWKHHELFQDAVNYYLVALAGMADPRQDKTPCAKFRKAVESTWNGFVRNGVVRPGMKESLARTLQCDSATLTFQSAVDQILGENHAPIEVLDAGLQNIAGSLKGDVVQPAGKYLPQLCFQEYSGNFDFSSNMNAGRTGMNKMLDLLQTTDATEAQRKYNTIKNEIQLTWVGQKTQEVCYTLVELKETAKEMIAYFLAQKNASSTPPELANAIDISKMSSFRERTGEITRTDIQKTGTGPKNNNLVYATLLLMCFGDISLLSIINTQRKTLEKKKKDWGDSSKCENNLPDDPIKLSRGNRGYTFPFFTKLQCWSKQWSEFDKEAFIEALKTLNQFQDKIATRQKQLEQINKCIIWMRDGVSSDGKPPKPPTDDSEGNTSEEENDEVSTILPILKGDPRWLRLQAILHDDLQIKNDLTNDEIMDYGLSERTIRGASPIFKEWNEILKKSTASDVEKELRNALTRFQAENSQTIGSAPLFLELTKKQNHCIWDNHYQSPQKYASMNILEDAVTYYDFLDEAEFLDEPIKFSPADALHSRRLSNFKVLSGQKQSKQEKRMTWGTGFGLHGNDLLDVPVAIQQENGKWSPTKVTLTYSAPRLLRDQLIHNGIPMYCPPLVQAFNVFDNKAMSPTEDAKRIATELRDAAVQLMPDYDRKGKLRLLLNFQPAVDIEDIRKNTADVFSEKYFYGGKDEKFCLRWPDYDKPQSLWCDSAQPFDIVSVDLGQRTAGALSRIRISMEQQARSIYIGNDGKRNWFAKQVYGGLLRLPGEDCKTKDGKDELSGSAGRLATPSETEEAKAIATEILGDEETVQKFLVADMTPEGTLVYKKYYPTQNDCLLRILKRGIYRLRQLARWHFFWKNGEEAKVLEEAKDAPWLQDKTLPAIQKAELEMRDILKTNLLRITERILPLRGRHWELKTAPQGNSLILAQTTPSPLEPKRWICGQRGLSFSRLEQLENLRHCFQSINRILMDAPGSKRKTAKELRGISIPDCCPDILMRLDELKEQRVNQTANMILAQALGLKHKEHDTGARNYREENNIHGEYEQIPGLSPAKFIVIENLSRYRFSQGRSKFENSRLMKWSHRAIRDKLKMLCEVYGITVVEVNASYSSKFSPEGIPGFRAEELPWQDIRKSFFYQKNLKENTLKEKELKQELELLIAEAEKKGKTLLMPKQGGPIFIPFQPEGNDNHFAQADVNASYNLGLRAVAHLKVQEIHHKLSIEKTKLGWKFRNTSNLGKKVLPKSATFEIEAEHLPSSEITNLFVCGCPCRNLGLSSAKNEGDFEEYNGRMMIGGGIWSDKSLELKRCLEINRKRL

SEQ ID NO: 1207 - protein, 1343 aa, unidentified
  REGION 1..1343: note = Cas Enzyme sequence
MTNKTKKEFKLFSDFTNLYELSKTLRFELRPIGNTQTMIDKANVFGKDKVIKDKYQKTKPFIDRLHREFVDEALNKVSLSGLKNYFKILENWKNNKKDKEAVKELKNKEEELRKEIVKCFSSTAKNWANEKYKNLGLKKKDIGILFEEGVFNLLKERYGNEDESFLKDKKDNFLKNEKGEKLSIFDEWKGFAGYFTKFQETRRNFYKDNGTETAIATRIIDQNLRRFCGNIEDFKKTKNKIDFSKIEKNFNKTIIDIFSLGFYDQCLLQKGIDSYNEILGGKILDNGEKLRGINELINEYRQKNKGEKIPFLKLLDKQILSEKEKFIIGIENDKQLLKTLKSFYKIAEEKTKILKNLFSDFVLHTENYDLRKTYISKEAFNTISYKWTDKTREFDELLYNAMKSDKSVGLNYDKKEDRYKFPDFIALSYLKDCLENIASDTRFWKEKYYKNKDDKGFLNENENIWNQFLKIFNFEVKQLFASNTFDNKGEKIKIGYDNFKEDFEDIVSKKDFKNNEGSKITIKNFADSVLWIYQMAKYFAIEKRRSWNDEYELSEFYTNPNDGYLLFYKDAYDEIVKTYNDLRNYLTKKPYNQEKWKLNFENPTLANGWDKNKESDNSAVILLKDEKYYLGLMRKGNNKIFDDKNKTEFIKNIENGVYKKVVYKLFPDPAKMMPKVCFSRKGLKFFNPPKNILQIYKNKEFKKGDKFSLAKMQELINFYIDCLSKYDGWKCYNFANVKKPKEYRDNIGEFYKNVSENGYKISFTPVSKSYIDQKNEAGELYLFEIHNKDWNLKDGKQKTGAKNLHTLYFENIFLPENISKNFPIKLNGQAELFFRPKTKEKNLGYKIWNKKEKEWIKTNKKENGSVIDRKRYGKDKIFFHCSITLNRETGSIYRFNNYVNDFLFENDINIIGVDRGEKHLAYYSIIDKKGNKIDSGSFNEINEVDYAEKLEKRAGDRKQARQDWQSVEGIKDLKRGYISQVVRKLADLAIEHNAIIVLEDLNMRFKQIRGGIEKSIYQQLEKALIDKLSFLVEKGEKNPNQAGHLLKAYQLTAPFTSFKDMGKQTGIVFYTQASYTSKTCPKCGFRKNVNKFYFENNIEKAKEVLRKLKVFEYDKRNRCFNLSYCLNDFMNKEDVEIKAKKRNNVLYSELDSKDLFILNTKDAIRYRWHDKNTERGRVILDWENVYEEEQSEKVKNTKRGITKKYNITKCLRGLFEKTRLDYKQNLCDKLVSEGLDSHFYKNLFNYLNLLFEIRNSISGTRIDYISCPECGFHTDKSKEIKNGDDNGAYNIARKGIMILEKIKQYKQKNRTLDKMNWGDLFIDLEEWDKFTQSRWNPTSKSQK

SEQ ID NO: 1208 - protein, 1343 aa, unidentified
  REGION 1..1343: note = Cas Enzyme sequence
MNRIYQGRVSKVETFTGDKENLWQPLDPDPKIAREKWQSLLWQHHELFQTDVNYLLAAFAAQVPDNCEDEIWSDYRSAIERSWESYTGRQGTWKRPFEYVCVLVGCKKNASFEEFRRKLNSMTGSKASEKQRLEALKQLFESATDTAMKLTDPDQPVEESLKGKAKDLFGSTLVNLCAQKTKVTPRDVIAEQRNHASECTKKANEDGHLKWADVFFFKTDKSSSAWSREDAGKNIVQCLEKLVAEVKQKAKDAKTVEQETKLTELAGRLEKQKTPLTTWCNNPKTDLPTTEPTRKGSGGYDLKAAILFSLQPDLDGFREAFLLFNQGRIKEEFTTKAKPDAAFIARMAGGVARPVFPFFCDLWAGKFNDEKVGQGIWPDFEKQAFSEVFTKIGQFIVRGRKFELRLAIANATIDRIKKQKKSDPRLQAVERITETLADALPDCAVDENGQRIPYAIRERTLKAWPKVRTAWRDTIKKSPDVSADDLIKQKNRMQERMREKFGSAPLFDLLVKERDIWNHADEDPLKIWSEYVEAGEEKTHLETARLFAPAHATLSPRFFRWSETNNKEHLTASAVEIPFAFEADALDLDKKEKIKIKIHFWSPRLLRDGLRSKNEKLDKDEPDQTWMPPVLRAFVKMRKWPSDKQTFAGASVRLAPRCKENIQLVFEPALDNNTLRKVWAEEMPFTPRMEKLNDEWVAAGLRWPKSEAEKFPWLESGGVKCLAADLGLTNSAAWQILQATNKEKAANTTRLRHRLNPDSEKPAWFTHSIANGIVRVSGEDRWGWRKFASTEKAEIRAELKQPTDKRNALCRKFSALNREIEFQTATHAFLPELSGSGGRNATDEETSEAEKYFATFKTKGFDIIERRPNWKTQLSFPEQNDELLWGLKRVRAQLFRLNRWSEQLGNKKNSKPFQSAIEIIGGLREGDPLLELAALKSDTKNLKKRVGELAGEYLDCFKLMLPRIADRVLPWRRGHWSWKPCENDWHRMELDTSKPRPEALLAGQRGVSLARLNQLKDLRQLAQSLNHLCRHKQIERREIVPEPFEDCRQAMDDAREDRAKQIAHEIFAIALGVTLAPPPADKQERKQTESLHGVYRCLERGPVNFIALENLTAYKTSAKQGRRENRQLTSWSHRRVHKILGELCELVGLPIVLVDPKFTSRFSAKDHSAGFRTEEVRKDDTRRSFWKRKAMEESNGWQAEFLSWLDKLPNGKTLLLPKKGGEFFVSLGKDSSLFQADLNAAYRIGLRALAHRNRAELLGQIWIEKEKKYYLVDTANVFSDSVLRDGCSFKTVTSSEKLWEYVNEKLAWQRCREINQARLKTFGVVVEEPANNLHPDEEDDIPM

SEQ ID NO: 1209 - protein, 1344 aa, unidentified
  REGION 1..1344: note = Cas Enzyme sequence
MACITLTIFNFFGIVDLFGRANYPCAPWFVRPDISILTVLDERGMMKDRNFEHFIGVYPLQKTLRNRLIPVGRTEEFIQERGIISCDEQRARDYNFIKEKIDIFHAELIENVLEKQSNCLDWNGLAEAIAAHKQPKTEDKTALAARVKAEQATMRKAIINLFSMRPDFKLLFKKELISVILPRYFENDQEVQEVLSKFKGFATYFTGFFENRKNVYSVDELPTSIAHRTVHVNFGRYLENISVLRKIEQEYPSALKAAENELKTIFPDFEFKDLFILQNFNKVLSQIGIDRYNGMIGGRTLEGNKKVRGINEHVNLAQHQDKTDGKKQKLKLQLLHKQILSDRTTHSFVYDPLENDYEAFSAICVVSDNLNMSMAEFGNISSLERALELLQHISNYDLNHIFIPAKNLKKLSSQFLGHWSIVGDALDWCVTEEELGPTSGMTKKQAESWRKSGCFSLSDICSALEISGQSLDLGLISMQLGDLKSKANEAYVKVSELAHRFTSGQRRLLQDENATNAIREYLDILLEFLHVLKLFEGSSEEDRDLGFYVDFDQIVHLMSDIVPLYNRVRNYVTQKPYSQEKFKLNFESPTLCDGWDINKESANMATLLRKDDLFYLAIMNPEHRKSFIDAPKATTGEIYQKMIYKFLPGPNKMLPKVFFAASNLDFYNPSDKIMQIYEQGTFKKGNAFSLQDCHMLIDFFKDSIARHPDWSQFGFKFSETSSYKDIAGFYTEVQQQGYKLRFIDIDAFYVDQLVDDGKIYLFQIYNRDFSPHIRNREGASRKNLHTLYLENLFSKENLEDVVLKLNGEAELFYRRGSIENPVVHKTGEKLVNRTYEELDKISGKTIVRRISGKVYLELFKHLNGELAYESLCDEAKELVDKKKVKSRTAAYDIVKDKRYTEDQYFFHVPITINFKAAGSQAFNSKAAASQAFNSKALDYLECNKEVKIIGIDRGERHLLYYTLMDQQGTILEQDSLNSLNGVDYREKLHEREKERDEARKNWKKISKIVDLKEGYLSLVVNKLAKMMVDNNAILVLEDLNFGFKRGRFKVEKQVYQKFEKQLIDKLNYFALKPNDVDVNQAGGVLRGYQLAAPFESFEKLGKQSGFIFYVPAWNTSHIDPTTGFCDLFMRNRELADATNFFSKMESIKYNCDTNYFEFSFDYADYHTRCLSPQTKWTVCSWGDKRWIGTARTTNAGRKYEVDEINVNQELKDIFDNAGISYHDGHDLRSDIAAQETKEFGKKLLKQFKNLLKLRYSTAPSDEEQHDCIISPVMNDTGEFFMSKEGCKNLPENADANGSYNIALKGLQLLREEIEMNEKGLRGIAYPKKPNEAWLRFIQGKEWVE

SEQ ID NO: 1210 - protein, 1344 aa, unidentified
  REGION 1..1344: note = Cas Enzyme sequence
MKTIEQFCGQKNGYSRSITLRNRLIPIGKTEENIEKLKLLEKDKERSKAYVEVKQMIDDFHRSFIEDVLSKTKLEWRELYDKFELFQNEKDKQKKNKIKKELETLQGVMRKQIVKKFKDDDRFDKLFKKELLTEFVPTVIKSDESGAISDKQAALNVFKGFATYFTGFHQNRQNMYSEEAQSTAISNRIVNENFPKFYANVKLFEYLHKNFPEIISQTEQSLSEILKGKKLADIFSADGFNAVLSQSGIDFYNTIIGGVAGEAGTQKLQGLNEKINLARQQLPAEEKNKLKRKMTVLYKQILSDRSTASFIPVGFESSEEIYKSVKQFKEQSLNKILSEVKTLFEKSDYDLNQIYVPAKEVTEFSLKLFGNWSILHEGLFLIEKDGAKKELSEKQVEAIRKEIAKRDCSLGDLQNAYERWAKENDVVVKKTVKNYFKIAELRTVEESKEKTSVEILKNIESAFEKIDFEKQENLIKEKESATQIKDFLDEAQNLYHYLKLLDYRGEEQKDTDFYSKFDEIMQILSEIVPLYNKVRNFVTKKPNEVKKVKLNFDNVSLAKGWDVNKESDYTCILLRRSGLYYLGVLNPKDKPKFDVENNTETCTKKNDCYEKLVYKYFKDVTTMIPKCSTQLNDVKQHFKNSNEDYILENDNFIKPLVISKRVFDLNNKTFNEKKMFQIDYYRNTGDLKGYTEAVKDWISFCMTFVHSYKSTCIYDFSSLGDCSQFKQVDQFYKEINLLLYKIWFVNVTAEKINSLIDSGKLFLFQIYNKDYSTGRDGGNGSTGKKNLHTLYWENLFSEENLCDVCLKLNGEAELFWRDANPDVKNVCHKKGSVLVNRTTSDGETIPEEIYQEIYKFKNPDKQEKNFKLSDVAKELLDSGKVVCKEAKFDITKDRHFTQKTYLFHCPITMNFKAPEITVKTFNEKVQQVLKNNPDIKIIGLDRGERHLIYLSLINQKGEIELQKTLNLVEQDRNDKTVSVNYQEKLVQKEGERDKARKNWQTISNIKELKEGYLSNIVHEIAKLIVENNAIVVMEDLNFGFKRGRFAVERQVYQKFENMLIEKLNYLVFKDKKDTEPGGVLNAYQLTNKVANVSDVGKQCGWIFYIPAAYTSKIDPKTGFANLFYTAGLTNIEKKKDFFDKFDSIRYDRKTDSFVFDFDYSEFGDSADFKKKWELYSRGERLVFSKAEKSVVHVNPTENLKALFDAQGINWNSEDNFIDQIHEVQAERENFSFYDGLYRAFTAILQMRNSVPNSSKQEDDYLISPIMADDGTFYDSRLEYAKGKSDDGKWISKLPVDADANGAYHIALKGLYLLKNDFNLNEKGLIENISNSDWFRFVQGKEYAE

SEQ ID NO: 1211 - protein, 1345 aa, unidentified
  REGION 1..1345: note = Cas Enzyme sequence
MKTLSEFTNQYSLSKTLRFELKPIGKDGERLLSEKATNFFAEILEQDREIKKAYDALKPVMDKIHENIINTSMTSAEAKQIDFTEYFEEYKKGKVKKLDDKERFLREKVGNTFDIAANKFANGVGNDEKGKPIFKKNKKDEDVGVKYLTQQGILKYIENNIATLVSEKDVKEFIDKREVTEKGKIKNKKTGYLEVFSSFFTYFTGYNQNRENYYLKDEKATAVATRIVHENLPKFCDNVIKFKNREDDYKNALQYLKNNNRETQIKDRETNKIIEAKAISENWFKIDKFSDCLAQMGINEYNKIIGHYNLLINLYNQARKREKDFKKLDQFKILWKQIGSGKRKALFDALKYYTKQEQQKANEKSNEPLSLEEMLQLINIAGKKYFKKSTVTNNKTTIYDFIQFLKSTENWDGIYWSKAAVDIVSNRYLANWYSIKELIETGLKTKDKKEVFKSVASYNKKREEQLKINDAVELSGLFKVLDQEQDKGWSQTFFKDIVLENHESLIDENKAPSHNLINLICADMKGLAKEFCSKSESILKIIDYKKEENILEIKHWLDTAKSLLWIVKYFLVKENKIKGTPVNAELTNMLTELLYAEDTDWFRWYNLVRNYLSKKPQDDAKKNKLKLNFENPILLGGWSDGQEKNKSAVLLKNRRKYYLGILSSGNRNIFDTEKENNSVYITENTEAGRLILRNLKFQTLAGKGFLGKYGESYGTIGQTNPDDAVTKLQEFIKDNYVQKYPGLKSISEQTYSDKKEFDASIKNALTECYECYFKPIVWDTVLKFVEDEKIYLFEIYSKDFSDKKGIKSKNSNINLQTKYWEHIFQDNSTIQLNGGGELFFREKVNLQKNDKAIHPANIPIKRRIDGKTESRFSHDIIKNKRFTTDKYFFHIPIKINYRAPSRVNINEKVNKMFIQEDDILFLGIDRGEKHLIYYSLVDVEGKIIEQNHFDIINEKDYLQEINKAAKRRREKQENWQQKGNISNLKDGYISLVIHEIIQKMKDKDGKFKPTFIVLENLNKGFKRSRQKFEQQVYQKFELALAKKLNYLVDKKAKMGKIGSVAKALQLTPTVENYQDIENRKQLGIMLYTRANYTSVTDPVTGWRKTIYLKKGKEEDIKKQILNAFLEIGVDKQGDYFFQYIDENTKKIRVLWSGKDGKSLERYRGRRGKDKNEYIVESYDVKDLLDKLFIDFDKSISLKKQLGSGKELSKVNEHTAWETFRFVIDIIQQIRNSGDTTKGQDDNFLHSPVRNEEGEHFDSRKFEKQENPNLPKDADANGAYNIARKGIVMYEHVMQWIKDGKQKFNKYSDLDLFISDKEWDMWNLDRVQWKKQLQSFASKKLKENKQ

SEQ ID NO: 1212 - protein, 1345 aa, unidentified
  REGION 1..1345: note = Cas Enzyme sequence
MENFVNKYSLSKTLRFELKPVGSDGKHLNENQAKEVFQKIIEKDRKVKAAYTALKPVMDKIHEDIINASLTSDEAQQIGFADYFDEYKKGKAKKLSDFEKSLREQIGNTFENVVKSYAVKKISKKKEEEKSKSVFEFKKSVPIAKAEIIDYLLEQNKDDTDLIKHIQEFKGFFGYFDNYNQNRGNYYVYKEEASTAVATRIVHENLPKFCDNAIQFENRKDDYAGALQYLKDNNRTTQIKDAETGAIIEAEAITENWFKIEKFSKCLTQNGVDAYNRVIGHYNLLINLYNQARKDEKDFKKLSQFKILFKQIGSAKRVLFEQIKSDEELKTQLETVSKAGEKYFKESDDINQITIQSFTKWLRENKDWGGVYWSKTAVDKISNKYLSNWHEIKDRIQKVLDSKDKDQKDLKDSLKSVATYKKNREEDLKLNDAVELSGLFEILNQQNGEDWSKAFFKESVLEERQSLIDESKTPSQNLINLICADIEELAKTFCTNSIEILDKEKSTEKEEVKKIIKILEIEDYKNEDHILTIKEWLDTAKSVLWLIKYFEVKESKIKGNSINSELTNMLTTLLRSDDADWLDWYDLVRNYLSKKPQDDAKKNKLKLNFLNPQLLGGWSDGQEKNKGAVLIKNGNKQYVGLLIERNIFDTEKKDNSIYKNASGQNIGRLILRNIAFKIVAGKGFVSKYNKKYSEIDEPIKKLQEFIKSNYVQKYPRLKDVSETTYTDKKVFDKAVQDALTECYECNFKPINWTKVMEYIEEPLKKTENDGLKKLYLFEIYSKDFSENKGEQSKNSNLNLQSIYWKHLFDGDSTIQLNGGGEIFYREKVDLRKEDIAVHPAKEKIKRRSDNLTESIFKHDIIKNKRFTENKFFFHVPIKINYQAPIRSNVNADVNNEFPKSDNIQFLGIDRGEKHLIYYSLVNAKGEIIEQNHFDIINNKNYLEAINEAARKRREKQENWQQKGNIANLKDGYISLVIHEILEKLKDKDDNYKPTFIVLEDLNTGFKRSRQKFEQQVYQKFELALAKKLNYLVDKSARNGEIGSVSQALQLTPPVSNYGDIENRKQVGIMLYTRANYTSVTDPATGWRKTIYLKTGSEEVIKKQILETFTEIKFENNDYYFQYTDIIGKEWKLWSGKNGKPLERYRAKRGKDKNEYVIESYDVKALLDKLFEKFEKAESLKKQLEFGTELTKVNEHTAWEKLRFVIDIIQQIRNSGDTSKNQDDNFLLSPVRNEQGEYFDSRTATKTLPKDADANGAYNIARKGIIMYEHIKKIGNNWNKKVKIGGNETIDLDLFVSDNEWDLWLNDQKQWDEKLNYFASRFAKEESKVKSTKKSKNEENEENENQ

SEQ ID NO: 1213 - protein, 1346 aa, unidentified
  REGION 1..1346: note = Cas Enzyme sequence
MEQSVFEKFTRKYSLSKTLRFELKPVGKTLENMRDHLEYDETLQTFFKDQRIEDAYQILKPKIDMLHEQFIGMALEGGHAKELDFSEYFRIRKQLFNLKKNKSSKEKETINLENSLDKEGDKLRSAFGEIYSYAGEKWKEQYMQGSKSERYEWKVGTSVAKGPAVLKSKDMLRVVGDKHTAQDIQDALKVFQGFFTYFGGFNQNRQNYYETKKEAATGVATRIVHENLPRFAENVMGFEARRDDYISAYDFLKNQGKSLINKEDRHIGPITEDILGHRFFNSCLSQKEIETYNEKIGDFNFVVNQYNQVRNGENGFKRLPMFKVLYKQIGCGEKDTLFFQLTHEKEVDVQAAEKRNPNGKYFSVEHTLQLAKYAGVKYFAANENNDTDNLPQFIRYILENDSYKGFYWSKVALNTISNKYFSNWHSLKDRLRDAKVFKKGAKDDEESVKISEVVELHRFFEVLDDTENWETTLFKPSLLDSQNEHNRLEIIQDSKNPHEALLRMIMSDIQEEATKFMAEADYVLDLTSQYFSLPESEKEKGQRKKEWKESIKQWMDHALAVNRMLKYFKVRESKVKDSPIDDRLAKALDTLLGEVDWFHWYDALRNFLTRRPQDDAKENKLKLNFENGSLLGGWSDGQEKSKASVLLKKGDTYFLGVLKKKSLFDTQKEDNPIYTTATLGCGRLILANLKFQTLAGKGFLGKFRKTYGEMGKEDPQQAIISLQDIIKERYVNKYHLLEGLLKPYSDKKQFDKDIQEALKESYVCEFSGINWHLVDRYTDSGDMYLFEIYSKDFAHGHSGKKDLQTIYWKSLFEGSSPHQLNGGGEIFYRKQALKDKHIKKGYGNKPWVIEGKRFTEKAGKFSFHCPIKLNYKSEAKSDPKYAFPFVNKYINESYKESTDIYFLGIDRGEKHLAYYSLVDGHGKITDSGTLNMPFMDKDGNPRMVEAIKRKLDKATGKELETVVACKDYNDLLDARAGDRDYARKNWQTIGTIKELKHGYISQVVHKIAKLAVLEAKGTTFIVLEDLNAGFMRGRQKIEKSVYKQFEVAIAKKLSFLVDKTKDSNYEETGSVTKAIQLTPPVKNFEEFKERGKQAGAMIFVRADYTSQTDPVTGWRKKIYIGSGSENAIREKIVNSFENIRFDGKDYVFTYTDDLTGKRWEIFSGKNSISLPRFYRVRGVDKGEWKSEPQNIVSMLDELFIDFDKDRSLLSQIVDEGKNLKKINEHTAWDSLRFVINLIQQIRNSDGNNEGSKNDFLFSPVRDSNGNHFDSRVFWEKEQQTGRHAQFPSSGDSNGAYNTARKGIIVYEHMKRDFKLAVRDEEWDAWLAGKEFWEKWIKDHEKNLKKK

SEQ ID NO: 1214 - protein, 1346 aa, unidentified
  REGION 1..1346: note = Cas Enzyme sequence
MKNQHLFSGFTNQYAVSKTLKFALKPTDKTKEHINNKNDKGKNLLDVDKELAEKYKQAKKIIDEYHKSFIHEKLSNFSFGKKELQDFNNAYEDLKKDKKNDSLKKDLILKQDELRKQVAQELQKNNYLYKKKGGKAKFVKQRLPEWAVENANQIKKNHENIDNPEAIIKDFKNWTNYFGGFNDNRKNIYTEKSHSTSIGYRLIHENLPKFLENIKRYKEAKKLDIDFSEVEQKFDVNPDNIFTLNYFNQCLTQEDIEQYNLIRGGQSKVDNKKERGINEIINLYSHELQSKLTDAQDEDKKELKAQIKQVRSCKLEELYKQILSNRSQISFPLENIKNDSELCQQIEHLFYLNNRGSLIGKQEETGEIAEVIFDISEAIKKAIQAISDADPEQLYIKNKSSRAITDISQHLFGDWNLITKSLNYYAEQTIFSAPKDKKETAKQQEVREKKLENWMKNIPYFSFAEIHAALEYYFKQYSNKELQNEKTVKNEQSEQGITKEMKETALKKPLFTYFKELIITKKNEKDNTFEKIFLSEQIKTTYPIAKKVFEQYKDVKKELLKSKKDEVHNIKAYLDSLMDLLHFLKPLYVQFSKKEEKKQVEIFEKDNSFYGDFDVLFKVLNQIIPLYNQTRNYLTKKPFSIEKYKLNFENSQLADGWSKNKETNNTCVLLMKNEQYYLGVMNKKHNKLFSDELPNKGSCYQKIIYKQVSDAAKDIHTLVNIEGKVSRFTKGLNEKRSKYCQEIQNIKSQESYKGKGLIKSDLYKFIDYYKKCAKSYWNWCDFEFEKTEKYQNIKEFTDDINRQGYKITFCDISESYINQCVNEGKLYLFHIYSKDFSIHSKGRKNLQTLYWKALFDENNLKDVVYKLNGEAELFFRKASIQYSDDIWQKGHHYEELKGKFQKEGKHLPIIKDRRYAKDTYLFHVPITCNFKAEGVTKFNDYVNKEFLQKNSNVNILGIDRGERHLAYYTLINQNNEILKDKDGKYLQGSFNNPTGRKDYHELLNKREQERDKARKSWGTIEKIKDIKEGYLSQVVHKIATLMIEHNAIVVFEDLNFGFKKGRFKVEKQVYQKFEKMLIDKLNYLVFKDKSHDEPGGLLNAFQLTAPFESFQKLGKQTGFIFYVPAYHTSKICPATGFVNLLYPRYETVKKSQEFFDKFNKICFNKEENYFEFHFNYAKFTDKAKGSEQNWIVCSYGKRLENFKNPQQNNQWDTREIDLTQDLQKLFQKHNIQFDVDVCIINSICQQNDRQFFKDLIRLLRLTLQMRNSRINSDEDWMISPVKKNQDKFFDSRKVDDSMPQNADANGAYHIALKGLWCLQQINETDNTKNLKLAISNKEWLAFAQNK

SEQ ID NO: 1215 - protein, 1346 aa, unidentified
  REGION 1..1346: note = Cas Enzyme sequence
MINKTKNKSIFDNFTRKYSLSKTLRFELKPIEKTREWMNENLQYDKNLQTFFKDQIIEDAYQTLKPIFDKIHEEFITQSLESEKAKQIDFSKFLEKYKNRKDIKEGEIEKVEKELREKFIELYKEPIKRFKRVAGKDKKGENVLKGNNFEILTEKGILTYIKGNIDKYVEIRPKNEIQKALNNFSGFFTYFAGFNQNRENYYEAKKEASTAVATRVTNENLPKFCDNLIAFSDRKKEYLEIHGFLKNKGKIIQDRSGKSLLPIKENIFDISYFNECLSQEQIEDYNKQIGNANYLINLFNQEKNKENNFKKLTLFKTLYKQIGCGKTKALFFALTHHTKKEADEERNRNKEVFSVEEVLELFKKAGDKYFIKKNKNGEIGTVSDFINYVQNKENYLGVYWSQAALNTISSKYFSDWYKLKEELVKEKIFKKGKGNNEEGIKIPDAVELEGFFAILDKTENWQDKGMLFRDNIFDDEEKIYLKEIILREESPSQALLTAIFSDLERHAKDFISQSKDILIQNDYSDEKSKEKIKKWLDNAIAISRILKYFSVKESKIKGDPIDPMISEGLNILLRSDDAAWFKWYDAIRNFLTKKMQDDVKNNKLKLNFENSTLAGGWDINKEIDNSCIVLRNKNNEKFLAIASKENKNIFEKGKKASDGNNSLYLSDSSGWEKMEYKLLPGPNKMLPKCLMPGKDRKKYGANDEILRIYKNGGFKKNENNFSISNLYKIIDFYKSGISQYDNWKCFDFKFKSTCDYEDISQFYSSVEKQGYKIDFIKINKQEVDKLVEDGKIYLFEIKNQDNNANKIKNHRNNLHTIYWNAVFENAENRPKLNGGAELFYRKALSIDKLKKIEKNGKKIIKNFRFSKEKFLFHVPITLNFCLKDTKINSIINDIFIKNNDIHFLGIDRGEKHLAYYSLINKNGNIIEQDTLNMPFLDKNGNQRIIKAEKKIFDKNGNEKTEWVDCKDYNDLLNARAGNRDYARKNWRIIGTIKELKDGYISQVVRKIADLAIGNHAFIVLENLSRGFKRGRQKIEKSVYQKLELALAKKLNFVVDKKAKIGEVGSVTNALQLTPPVNNFGDMENKKQFGIMLYTKADYTSQTDPVTGWRKKIYLKKGSEDYIKKQIEDNFDKIGFDGKDYYFEYTIDYLEPVKKKSSFKKKWRLYSGKNGVELDRFFREKIGKEKWNSKKQEIIKTLDKLFDNFRKDDFILEQIKQGVKLAKVNERTAWETLRFIINLIQQIRNTGTSGNDEDFILSPVRDKNGNHFDSRKEHRNNWPTSGDANGAYNIAKKGIIMTEHIKKGLSPFIRDDEWDAWLAGEKIWNKWLEENEKYLSNKWNPQSKSQK

SEQ ID NO: 1216 - protein, 1346 aa, unidentified
  REGION 1..1346: note = Cas Enzyme sequence
MNNKNTYKNFANQYELLKTLRFELKPISKTLEKMRENVKYDKDLQTFLKDQEIEDSYQILKPVFDRLHENFINESLNSRTLKTANFNEYFEKYKNKKNENLIPTENKLRNLFADAYEETATKWRKKEKSLKQQGYKILLNEKILNYIRLTIDSFKEVEEKEKIEKALTLFEKGFFTYLTGFNQNRENYYETKSKKSTAIATRTIHENLPKFCDNAIEFKKNKQEYLNIHKKLTEQDIKTKEINITPKHQKLFEPSHFNKCLTQNEIEEYNQEIGNINFLINLYNQKNKKEKEFKKLQSFKTLHKQIGCGKKDSEIFVIERDKINPKAPLTSLEEVLQLINHAGQKVFIQESKETLEVKTIPAFLKYIKEKENFNGLYWSKLTLNNISSKYFTNWDFLSQLVQSTKKSKGIPAVIELENLFTTLNKEDKNLIFKETIIANQKRVVEDSKNVSDALLNMIFSDIEENIEIFLNETPKVLRRENLRNKELIKRWLDSVLKILQMLKYFSVKEEKIKEGNPLDPITAEVLKFILDENFEWFKWYNAIRNYLTKKSQEDLKKNKLKMNFSCTTLAAGWDKNKESSNLCTIFKDKKENLYLGVINKEKYGEFKSLYEITNKETWNKMEYSFLPDAAKMIPKCSTQIKKVIEHFENSNDDFAFPIGYSVHSGEKFKEKLIITKEIFSLNNIGYQKDLKKTEWLCYDSHIKKGNFIKRFQKEYWKIHFKKNNPNEKDLKKAWENFCKKDCSKLKGYEKSYKNALTQWIDFCKDFLSKYPKTRSFPYKFKNSKDYNSLDEFYNDVNENSYHIDFNTKINKSELDKLINDGGIYLFQIKNQDYNKNKKLKSKKNLHTIYWENVFKNVENRPKLNGGAEIFYRPALSPDKLEKVKDRNNKEIIKNFRFSKEKFLFHVSIALNPNKKQIDINKKVNDLLKQNKDVYFLGIDRGENHLAYYSLIDSNSKIIKQGTLNLPFADKNGNPRTIKAEKRTSDNNVKIIECKNYNDLLDARAGNRDFARKNWERIESIKDLKTGYISKVIHEIVNLVTTKDKFTFIVLEDLNIGFKRGRQKIEKSVYQNLELALAKKLNFIVSKNATSSELGSTTNAIQLTPPVNTFGDIERRKQFGNMLYVRADYTSQTDPITGWVKTIYIKKGSEKAIKEKIKKSFSDITFDGRNYIFEYKDSNNKKWKLYSGLDRYYRERNNKGIWISTKQDTTEILNKIFANIDKTKSIYNQITNQDKKLEKISKHTAWESLRFVIHLVQQIRNQDEDKNDFILSPIRNEQGEHFDSRKAKNNEPDCGDANGAFNIARKGIIVSEHIKRGIKELYIKDDEWKAWLSDKKTWENWLKKEFK

SEQ ID NO: 1217 - protein, 1346 aa, unidentified
  REGION 1..1346: note = Cas Enzyme sequence
MKTIFENFTNKYSVSKTLRFELIPQGKTKEHIRNKKFLEEDEALAKYYKEAKKIIDEYHKNFISNKLTEFAFTLEELQSYDQSYQTLKKDKKNRKLMNSFAAKQAELRKRVAKVLQEDNYLYAKEGEKAKFIKQKLPDWIEKNHISIDGILSSENVINEFKDRTNYFAGFNDNRKNIYTEKKHGTSIGFRLIHENLPKFLDNINRYNEAKKAGVDLADVEKTYKVKLDNIFTLEYFNQCLNQKGIDEYNLIRGGQSKKGNNKEKGINEIIYLHVQQLQRKLAHATDEDKKELNAKIKHVKSCILEELFKQILSDRSQLSFRLDNINNDSDLCRQIEYLFHLDNQDNLWGKQEIVDEETGETIESDFHISEAIEKVKGVIDDAKPAQLYIKNKSSKAITDISQHLFGNWSLITRSLIYYAGKNVFPEPEKKKETAKQKEEREKKCESWLKDTAYFSFEEIHTALELFFEQYTDKELQVEKKENNEEGERGITGEMKEVALGKPLFSYFKQLTISKNNEETNKFEKIELFKQIKESYPAAQKVFEEYRDVEKEILKSKKDEEVRNIKNYLEALMDLQNFFKPLYVRLSPKDEKKQTEIFEKDNSFYDEFDVLFNVLNRIVPLYNQTRNYLTKKPFSIEKYKLNFENAQLAKGWAKDKEPDYTCVLLMKNGQYYLAVMNKKHKKLFAGKIPNNGQCYKKIIYKQVPDASKDIHTLVDINGKVSRFTKGLDEKRNEYCPEIQKIKVKGSYTGDNLNKDELIKFIDYYKYCAVNYSNWKWCAFKFKHSAEYETFKNFTDDIRKQGYQITFCEVSENYINECVNEGRLYLFRIYSKDFSEKTRGNPNLHTMYWKALYDENNLKNVFYKLNGEAELFFRKASIVYDKNIWEKGHHANDPKKKQPYPIIKDRRYAKKEGKDEKDGTYLFHVPITCNFKAEEISKFNDEVNDSLRRNANVNILGIDRGERHLAYYTMIDDKGNILRDKNGNYLQGSLNDPTGRKDYRELLDKREDERDKARKTWNTIDRIKDLKEGYLSQVIHKIVSLMIEHNAIVILEDLNFGFKKGRMKVEKQVYQKLEKMLIDKLNYLVFKNKSNEEPGGLLKAFQLTAPFKSFKDLGKQTGFIFYVPSYYTSKICPATGFADLLYPYYETVKKSQEFFDKFHKIHFNQKNNYFEFEIKDYNAFNPKAEGTKQDWTICTFGTRLENYRNPEKNNNWDTQEVNLTEKMQKLFQNRDIHFNDGKCIKEKICQQSDSQFFKRLIKLLKLTLQIRNSRVNTDEDWMLSPVLNKHGNFFDSRVADEDMPQNADANGAYHIALKGLWCLEQIRKAEDPKKVNMAISNKEWLQFKQAKV

SEQ ID NO: 1218 - protein, 1346 aa, unidentified
  REGION 1..1346: note = Cas Enzyme sequence
KIREDAVWVNRSKAFDLAKERKGASLSREDIWDFLQPFFGNNYSYLKMKTAVTNTSENSEADSEESKDEPSEEKAKDLSQKAGQWLSSRFGTGTGADFCRFYEVYDAMAKHCQNIQAGMSGAAVCGSLADALHGFSPSSRSINGILELISGPGYKSATRNVLQQINNMQSVSQLDIDRVRDASEKDAQQSREKVGGKGSRPYANAVLQDVEAASGITYHNACNGPSHHWQYAVILDHAARRVSMAHSWIKRAEEERSKFEIEKDKLQCVPSDARAWLDAYCARRSSESGAIDAYRIRRSAVDGWKQVVAEWAALLAKAKNAGSELPSEAESARIQAARELQDTIEKFGDIQLFEALSLPDAKCVWLTNGKPDAQPLMDYVAGTDAVSKKQRFKVPAYRHPDAFLHPVFCDFGNSRWSIDYAVHRAPEKLARAQQLLEKKKEELTRAEQALSKASDPSKRSSIEKKLKTLNVAFKQQEAEVLWLESHHAMTMGLWNGSRIEDTPLLWQSKRFGSDIGQAGAEHPLVASRADRFGRAVAMAKDNAPVVPSGLFDLADWNGRLQAPRRQLDAIAAIHDRTDLSVEEKRQLVAKRIRTIRWLVTFSAKLQSRGPFIAYAAQHGFDWRYGAHGIENKSREGLAKLVLCRLPGLRILSVDLGHRYAAACAVWETLSAAQMQNACLEAGMEAPSQRTLYLHLKHFVNGKEKKTIYRRIGADTLPDGSPHPASWARLDRQFLIKLQGEDRDARPATCDEVVAVEQLETELGYVRPIKRKGREHLVDELMSDALRTLRLGLQRHGARARIAFNLTATKRTRPGGIQELLDQESRIGLLTETLLEWNELYAGERWADELARDMWNKHIQPLLGGTILQETNNQDVTPSAAKRRMQREETREKLRPVAKQIAENDSLCRQLNVLWSTRWQIEDAAWRMRLRWMRRWLLPRGINRDPQFRKSIRDVGGLSLIRIASFKSLYQVQKAYWMRPHPDDLRRNIPERGDSSLTSFGQRVLDAMERMRENRVKQLASRIAEAALGIGDETSVNAKNGRRKRPTERSNDPRFAPCHAVVIEDLTHYRPDETQTRRENRQLMSWSSSKVKKYLGEACQLNGLYLREVPPAYTSRQDSRTGAPGLRCNDVAVPEFNSSRFWRKQVEAAEKNQKDGKKGDARERYLLSIDERIRSEANDRDVFRIPVKGGEIFVSACGQDGGSNANRKAPPGLQADLNAAANIGLRAIFDPDWEGRWWYIPCDATTICPVEKKFNGCKAVDSSKPLRIVAEKVAVSSSSINEKRSGRKGIALTDGSRIVNLWRDPSGAPIRRDVPSNSEWQDYAEYWNKVQSRVIANLRKSYGLREI

SEQ ID NO: 1219 - protein, 1347 aa, unidentified
  REGION 1..1347: note = Cas Enzyme sequence
MASSHFISLDNSFSKFTNLYSLSKTLRFELVPTENTTVMLENNNVFKKDQIIQVKYEKTKPFIDRLHREFIKEALSNYAVSGLQEYFEILRAGGKKANLDSAKKQLRKHVVDQFNATASLWVSRHKDVGFKGEGIELLFKEAVFKLLKEKYGTDMNALIEDNHGKQISIFDSWKGFTGYFDKFQQTRRNLYKDDGKEGRVATRIIDQNLTRFCDNIFVYEKIKDKVSFIDVEKSFGKTCSEVFIPDYYNTCLLQDGIDSYNEFIGGKPLENGEKVQGLNELINLYRQTTGDKVPYFKKLEKQILGEKDEVFIDEITDEDFVPRVLAFYRTVDAKYKLFLKLLDDFVTNQDVYELSQIYISKKGLQEKLYRWLTPSAREVYDEELFEVLKKAKKVNNKDKQKVSGYVPDFVEVLYIKQALENIDAKLIWSDRYYSDGENEGIIDKGFSSWKQFLVILNHEYRQLLSFEDHVIIDKELDFDKEVKQLTDTVEIVSQDKNARTVTYRGGYDVYKAKLAELGQSFEKDTCTKKVIKNFADSVLSMYHFAMMFAVWDDTYPLDVFYTNNEFGYLLYYEDAYKNIVQEYNKLRNYLTKKPYSTEKWKLNFENPTLAAGFDKNKESDNSTVILRQGDKYFLGVMKKGFNKIFDNSQISQTGNSPEAYFEKMVYKYTKDVVTGIPKSSTQVKEVQEHFRNSDEDFFLEECSSVGNFIVPLKITKEIFDLNNKVYAKEDISQAMYRWALNTDEEKNYVKSFQKSYLSLGGSPELYCKSVTLWIGFCLNFLKSYPSAAYFDYSQLRQASDYESVDECYQELNNAGYTILFQNVSEKYVRVKNKNGELYLFQIKNKDWNEGSTGKKNLHTLYFESLFSKENAKQGFPFKLSGNAELFFRPGSIEQTYERRNFPREIPLKRRYSKDGIFFHIPVQVNRTKVGSPNQFNKEVNDFLAGNPNINIIGVDRGEKHLVYYSVISQNGEKIDGGSFNEINGQDYHDKLEKRAKEREQQRRDWETVEGIKDLKKGYISQVVKKLADLAIEHNAIIVMEDLNMRFKQIRGGIEKSVYQQLEKALIDKLSFLVNKGEVDPQKAGHLLKAYQLTAPIDAFKDMGKQTGIMFYTQAAYTSKIDPVTGWRPHLYLKYSSVEKAKDDISRFTKIAYKNDRFEFTYNITDFRTQKEWPLKTEWTVCSCVERFRWNKKLANGKGDYEHYPNVTDDFKKLFDSVGINYLQENIKSQVVNLDENTNVEFFREFIKLFALVCQIRNTNSEEAGNLNDFILSPVEPFFDSRSAEDFGKGLPSNGDENGAYNIARKGMIILNTLSTFKNDHGSCEGLSWGDLYISDTQWDDFAQSFHG

SEQ ID NO: 1220 - protein, 1347 aa, unidentified
  REGION 1..1347: note = Cas Enzyme sequence
MHIDMSSSIVSVSTEKKQAEVLSNKSVFDQFTRKYALSKTLRFELRPVGKTRENIEKANPNFIRDKEIEDAYQILKPVFDKLHEEFITESLESDEAKHLSFEDYFSVYKNLRNEQDREEKKKIEKSLETKEKNLRAAFSDIYKAEGEKFKSKVGSDKKGKPILKEDSFKILTEVGILKYVKAKIEEFVVMNLKTHEGKEVKKEDLEKALGTADSKGVFEGFFTYLTGFNQNRENYYSTEEKATAVASRIIDENLPKFADNVLEFQKRKDEYLKVYDFLKENGIETIGKNQKGEKVELEKIIADIFEIGYFTNCLSQREIEKYNLNIGNANNLINRYNQQQSEKNKKLRIFKTLYKQIGCGEKGDFIPAIKNDDGLRAVLKNVVENGEKYFGQFDGKIEDKVDTVGEFVHYIINHESFEGIFWSDKALNTISGKYFANWFILKKALKEGGVFGGKKKDDEDIKIPQAVELKNLFEILDKTEKWKNKEDGLFKTSLFDGEGNKKGIIERAEKPSKALLGMIFADVEKMAKDFSELSPKVLSITTDFKKPEHIENIKMLLDSALYVNQIVKYWKVKDKFAVDPILAESLKAILFGDNNPTKFYDIIRNYLTKRPQEGLNKLKLNFDNSVLGGGWDVNKEPERWCLILKDGEKKYLAILTKASQKLFGEKAKYKEVVTDENYLKMDYKLLPGPNKMLPKVLLPKRNRKEFGATDDILSIYDEGGFKKNQPSFTKEKLWKIIDFYKEGLKVYPSAEKSWQDLFGFNFSPTEKFESIDQFYNEVEKQGYKLSWNIISKKLINEAVENGEIYFFEIRNKDNNLKEGKEKTSEKNLHTIYWNEIFGDVANKPKLNGEAEIFYRKTILKKKENETDKEFEIRLKEKLGKKKDKSGKEVLEHKRFANEKFVFHCPITLNFCLRSLKFNDEINESMVKLNDDITTIGIDRGEKHLAYYFVVKQTKDGKIETLDQGSFNEINGQNYAEKLEKMAGNRDEARKNWKTIGTIKELKDGYISQVVRKIVDLAIYEDVEKKVFRETPAFIVLEDLNIGFKRGRQKIEKQVYQKLELALAKKLNFLVDKHAKEGEIGSVTSALQLTPLVNNFGDIEGKKQFGIMFYTKADYTSQTDPVTGWRKTIYLKKGSEESIKKQILDNFDDIKFDGKDYYFKYTDRNTNKPWELYSGKDGESLDRYYRELVHENSDKKWVPKEQNLKKILDGLFEGFDKEKSLLEQLRQGKNPNKINDRTSWESLRFVIDLIQQIRNSGKTEEDADFILSPVRDKNGNHFDSRKINLNLPTSGDANGAYNIARKGIIMCEHIKRDLSLFISDEEWSAWLAGREIWENWIKKNEKNLKRKQ

SEQ ID NO: 1221 - protein, 1347 aa, unidentified
  REGION 1..1347: note = Cas Enzyme sequence
MNNKNIYKDFASQYELLKTLRFELKPIGKTLEKMRKNIKYDKDLQTFLKDQEIEDSYQTLKPVFDRLHESFINESLNSKTLKNIDFSEYFEKYKNKKNEDLTPIENKLRSAFSNAYEETANKWKKKEKSLKKQGYEILLNEKILNYIRTTIDSFIEVEKKGEIEKALTLFEKGFFTYLTGFNQNRENYYETKNKKATAVATRTIHENLPKFCDNVIAFEKNKQDYLNIHRVLGKQGIQTKEKKKIKLIPINQELFNLNHFNKCLTQSEIEKYNQEIGNINSLINLYNQKNKKEEGFKKLQSLKTLHKQIGCGKKDSEIFIIERDRINTKKPLTSLEEVLQLVNNAGQEVFIQKRTLEIKTVPAFLKYIKEKEDFNGIYWSKTALNNISAKYFSNWDFLSQLIQASKKPKGVPTVIELENLFEILNKEDKNLIFKESIINNKKEIIGNSKDVSDALLNMIFSDIEENIKIFINKAPEVLKKENLRNKELIKKWLDSVLRILQMLKYFSIKEEKIKDGNPLDPTTAEVLKFILDEDFEWFKWYNAIRNYLTKKNQDDLKKNKLKMNFSCNTLAAGWDKNKESSNLCTIFKDEEENLYLGVINKEKCAEIQKLYKTTNKKTWSKMEYNSFPKATRMIPKCSTQVKKVITHFENSNNDFIFSAGYEVSSGKKFEKELIISKEVFALNNKGYQKDLGKTEWLYYIPQARKKDFIKKFQKEYWKISFKQNNPNEKDLKKAWENFCKKDYSKLNEYEKSYKDALTQWIDFCKDFLSKYPKTRSFPYKFKNSKEYNSLDDFYADVNENSYNIDFNTKISKNELDKLIDNGIIYLFQIKNQDYNKNKKPGFKKNLHTIYWENVFKDIENRPKLNGEAEIFYRPALSPDKLEKTKDKNNKEIIKNFRFSKEKFLFHVSITLNLNRKQTDINKKIKDLLKQSKDVYFLGIDRGENHLAYYSLIDSNSKIIKQGTLNLPFTDKDGKPRTIKAEKRTSEGNVKIVECKDYNDLLDARAENRDFARKNWQTIENIKDLKNGYISKVIHEIINLTITEDKFTFIVLEDLNIGFKRGRQKIEKSVYQNLELALAKKLNFIVDKNATLSELGSTTNAIQLTPLVNNFGDIEKRKQFGNMLYVRADYTSQTDPITGWVKTIYIKKGSEKAIRDRIKKSFSDINFDGKNYIFEYKDSNNKKWKLYSGLDRYYRERNNKGVWISTKQNTTELLNKIFKNIDKTKSIYNQIINQDKKLEKISKHTAWESLRFTIHLIQQIRNQDEDKNDFILSPIRNEQGEHFDSRKAKNNEPNCGDANGAFNIARKGIIVSKHIKKGIKKLYIRDDEWRAWLAGKKTWENWLKKELK

SEQ ID NO: 1222 - protein, 1350 aa, unidentified
  REGION 1..1350: note = Cas Enzyme sequence
MLKKKERMLDMNKTVEKTLKNFTNQFPISKTLRFELKPIGETLEYIKVNNILNEDRIREENYQELKKVLDREYNDMLTRILKNFETDWINLADALTLNSDVVNRREIINEEKEKVAGKLNEHIKKNTKNMFTEKFLKAVLEYEDITDRERQLIEHFKGFSTYLTTYFQNRENIFLETGKGVSAINRIVNENFPRFLDGVKNYKKIINNEKVITEIRDNIRKNEEFGVDDLDEFFKVENFNNLIDEDGIERYNALIGGFTKESGKKIQGLNEIINEYNQKSVSKIKRFTALYKQPLSPKNTISWVPDIIKDDEELFDTINGYLETIPEKFTESIESLYNNCIEKNNFAIKIQLLNNISNAIFKDWSYLNQKIEEKLVRENQQEKGEKSLSKKEKEKIKKSLEESASNKISMYEIKNSISEDEYDSVTLWLKSEAIAKAETAQKEKEKYVTNISRGAKIKGNDRNEESVKQLLESFNELLKFISHHELKLGDDNQTSFQESLEILSPVNLVYNKARNYITKKEDVEDKIKLNFSTPMLGSGWSKSKERENLTIILRRKINGKYMYYLGIMKKKEKIDFEEMISEDAETYEKMEYFLFPDAAKMIPKCSITTKEVKNAFEKNGKNEIILSGGNFTQPLKISRELYELYNPSYCDKEGEVYEDKTFTTKFIRNKWINPELEGIGSEEKKLKENDKYKLDVYKEALAKWIDFSKDFLSKYKGTSIFDFSHLKKSEEYRALDEFYNDINKAAYKIEFVNLSKNKIDRLVEEGKLYLFQIYNKDFSEHSRGKENLHTIYFKEIFSEENLENPIHKLSGGAEIFYRKKSEKNSFSHKKGEYLVNKTYFSQEKDGKKIYKNLPEELYMDICKILQECKKTDKKYDKDLEICVKKWNKSHKGDIEIKTEQIEINRAKYEIKKDKRFFENKYFLHVPIEMNFVAENGKNKLNSRIIEHLIKNKDGENAKEIKYLGVDRGERNLISLCLVNSKGEIEHQENINLVETNRNGKGIINVDYNEKLSSKAKTREEERKNWKSISNIRNLKEGYLSGVVHKVAKMAIEENAIIIMESLNTGFKRSRQKIEKSIYQKFEKMLMNKLSFLVEKNIQMGPGSIREPIQLTREFKEEKDLKGHNGIIFYISPFWTSQIDPATGFVRNFKEKKNGRKIKVITEDSLLSLRYISPEEGFKFKIDFSKMERIFELKNNIWEIYTIGEKFIFNSDRKSIDIVNVTEKLEAVFNSENIEYKESQELREIVLENKKLLRTVDCWFKERTKLRNKNENQDFILSPVKNSAGKFFNSKDDFEGLPKDSDLNGAYNIALKGKFKIEKTAEKYKDGKINLYKMNDSEWLDDYQKRLYFKH

SEQ ID NO: 1223 - protein, 1350 aa, unidentified
  REGION 1..1350: note = Cas Enzyme sequence
MNGMEKFCGQKNGYAVSKTIRFELQPVGKTRENFLKSEFLERDEIKSRDYQNVKKIIDECHKKFIDDVLKNSSFDWKPLADATEEFIRTKKSEESRKKLSGERKKMREKIAKKFSEENKEQYKKLTDSTPSKLLKEILQNDAEISAEDKKSVETFRQFATYFSGFQKNRQNVYSGKEISTAVPYRIVHENFPKFFQNAVSFGDIQKKCPQVISQAEKELSEILGGTKLAEIFSVEKFNDFLCQGGAHVGIDFYNKIIGGEGQKEGDRKIRGMNEFLNLYRQQNAEFAAENKKIKFLPLYKQILSDRSSAFTIQSIDSDEELKFALTEFFENAEKFIDPAKTAEIFEKIADFDLNAIFVNRKDLSFVSKILTGNWNFLQNCMNVFADEKFSRKLMTKTELNRWKKSEDAKSDDFFSFEELNEVLSYCSGNLSAAEIRMEDYFGKTFLYRSDGSGGKFEKSSEICEMSVSEICKKIRGQILQVKEIFAAESAEKSIRENHSAVEKIKNCLDEFQNLFHRIKPLKTNEPGDTNFYSEYEPVYDALEKIMMLYNKTRNYISRKIDAPKKIRLNFDTPTLAAGWDKNKENDDLAVIFIKNGFYYLGIMNPKSRKVLENPPESETDDVFQKMELKLTKDVTTTVPKCTTEVKLVKAHFANENTDFELFDKKTFLKPITITRKIFDLNNKTFNGKKKFQIEYSRQTGDVVGYKDAVVTWIDFCKEFLVSYKSTANFNYDSLKKSDSYENLKDFYDEVNEKLYSLKFKQIDKSYIDKLVDDGKLFLFKIHSKDFAPGTNGTPNLHTLYWKGVFDERNLQNGVIRLNGGARIFYRKKIQGEPVVHGAGTKLVNKTTQDGKIIPQNIYSEIYEFENGRKTEISDEAQKFREENKIVVKTASHEIIKDRRFYCEDKFLFHVPVTINFNAEKQAEPLNVRVRKFLKNNPDVSVIGLDRGERHLIYLSLINRQGEILRQFTFNQVERNKNGRNIKVDYHAKLDAREKERDEAKKSWSEIGKIADLKEGYLSAVVHQIAKIMVENNAVVVMEELNSGFKRGRFHVEKQVYQKFEKALIEKLNYLVFKDRDFLEAGGVLNGYQLTEKFESFVKMYRQSGFLFYVDAGYTSKIDPKTGFANLFSFANLTSVTKKKEFFSKFGGIRYDAETSSFAFSFNYKKFGGRGKNCLSEKDWTVYSREKRIVYSSKNKSYAEIFPTEEFKKLFSQNGIRWESGENLSGEMQKIGGNLQDGEKPDKKICEFWDGMLRNFKLTVQMRNSCAKTGEDFILSPVKCADGTFFDSRIQDEKFPENADANGAYHIALKGLQLLKRFDECENEKLKSAPLKIEHEEWFDFAQKKADERVK

SEQ ID NO: 1224 - protein, 1350 aa, unidentified
  REGION 1..1350: note = Cas Enzyme sequence
MNGMEKFCGQKNGYAVSKTIRFELQPVGKTRENFLKSEFLERDEIKSRDYQNVKKIIDECHKKFIDDVLKNSSFDWKPLADATEEFIRTKKSEESRKKLSGERKKMREKIAKKFSEENKEQYKKLTDSTPSKLLKEILQNDAEISAEDKKSVETFRQFATYFSGFQKNRQNVYSGKEISTAVPYRIVHENFPKFFQNAVSFGDIQKKCPQVISQAEKELSEILGGTKLVEIFSVEKFNDFLCQGGAHGGIDFYNKIIGGEGQKEGDRKIRGMNEFLNLYRQQNAEFAAENKKIKFLPLYKQILSDRSSAFTIQSIDSDEELKFALIEFFETAEKFIDPAKTAEIFEKIADFDLNAIFVNRKDLSFVSKILTGNWNFLQNRMNVFADEKFSRKLMTKTELNRWKKSEGAKSDDFFSFEELNEVLSYCSGNLSAAEIRMEDYFCKTFLYRSDGSGGKFEKSSEICEMSVSEICKKIRGQILQVKESFAAESAEKSIRENHSAVEKIKNCLDEFQNLFHRIKPLKTNEPGDTNFYSEYEPVYDALEKIMMLYNKTRNYISRKIDAPKKIRLNFDTPTLAAGWDKNKENDDLAVIFIKNGFYYLGIMNPKSRKVLENPPESETDDVFQKMELKLTKDVTTTVPKCTTEVKLVKAHFANENTDFELFDKKTFLKPITITRKIFDLNNKTFNGKKKFQIEYSRQTGDVVGYKDAVVTWIDFCKEFLVSYKSTANFNYDSLKKSDSYENLKDFYDEVNEKLYSLKFKQIDKSYIDKLVDDGKLFLFKIHSKDFAPGTNGTPNLHTLYWKGVFDERNLQNGVIRLNGGARIFYRKKIQGEPVVHGAGTKLVNKTTQDGKIIPQNIYSEIYEFENGRKTEISDEAQKFREENKIVVKTASHEIIKDRRFYCEDKFLFHVPVTINFNAEKQAEPLNVRVRKFLKNNPDVSVIGLDRGERHLIYLSLINRQGEILRQFTFNQVERNKNGRNIKVDYHAKLDAREKERDEAKKSWSEIGKIADLKEGYLSAVVHQIAKIMVENNAVVVMEELNSGFKRGRFHVEKQVYQKFEKALIEKLNYLVFKDRDFLEAGGVLNGYQLTEKFESFVKMYRQSGFLFYVDAGYTSKIDPKTGFANLFSFANLTSVTKKKEFFSKFGGIRYDAETSSFAFSFNYKKFGGRGKNCLSEKDWTVYSREKRIVYSSKNKSYAEIFPTEEFKKLFSQNGIRWESGENLSGEMQKIGGNLQDGEKPDKKICEFWDGMLRNFKLTVQMRNSCAKTGEDFILSPVKCADGTFFDSRIQDEKFPENADANGAYHIALKGLQLLKRFDECENEKLKSAPLKIEHEEWFDFAQKKADERVK

SEQ ID NO: 1225 - protein, 1350 aa, unidentified
  REGION 1..1350: note = Cas Enzyme sequence
KVKETWSRASRKAETFAGPQARLALILKLEREKSDFEAASIRVLHSSRATPAQRSAALMELLSAKGDLNVICGERLPWLASAHGKCGATPKAASSSQEAKRQQAVRRFHHWSEKEALAQAATLDLGLFLTQPPHGFVEDADAAKILRDYFAQACKRFAELKATACMFDKFVTSQAGRLRIPSLGRRPSGLYPLAAVFRFFPTPETLAAFRVATKSLVDAKDKELMSDAVAESRVADQPHFDYFTNLAFVSGDGGEERDTRAVWFMFDLAAFIEAIKAPRRYFEDTIKREAAAERFRQQLAAMECKGHEATSTDEDSEALPGFEGDERVRLLKILVQDKLKWVAEAEGGSGEADSKEYAIRERTVRGFSEIKRRWRAAIEAGNAPEERLLEILGEEQTAHRYDFGSATLYRQLAKPEFHPIWRDGGTEPWHAEDPLTAWLQYKEIESDLADKERAIRFTPAHPKYSPRFFIFPKKPEKGPKTPSKKPPKPGLHSHHDPGQLSFTAGLVLRTEHGLAPRIVRIHYAAPRICRDQLRSSGDTNLYEAPWLQPMMAALGLDKSPDRVNFANCRITLQPASESDIQLAFPVEVNSEKIKATVSREALWENQFNLYPDGEKQFYNSSLRWPQEMQRTKPPAPWHEQLDSFRCIATDLGQRDAGAFARLSVLGGSDFGKQPSRFIGEAAGKKWRAALERSGLFRLPGEDAQVWREKSDKDDENPADSGKPFDFREELWGERGRPARDWEADDTAELMRLLEVPLEDKNVSLLSEGWRSLLSFPEQNDKLGVAMSGYQSRIARLHRWCWFLKGDDKQQQTAWNEIGECEDPRLISAEQIVQAKNRDPRLQTELESQLRKRLELAPVLLVRIANRILPLRGRSWRWEKHPISNAEITLHHLTQNGPKLDSKDHPVWLRGQRGLSLERIEQVEKLRRRFQSLNQTLRREVGGKAPIRRDETVPDPCRDLLDKLDNLKEQRVNQTAHMILAEALGLRLAPPSADKKVLRQQRDQHGAYEKILDKSGKWIGPADFIIIEDLSRYRASQGRAPRENSRLMKWCHRAVRDKLKQLGEVFGIPIVETPAAYSSRFCSRSGVPGFRAEEIAPGFENESPWSWIKEKKDDHGQPTAEAMHIQELVQQMAEAQRIPTRSGKLLAKPRTLFAPLAGGPVFVPIVDSIPNAELAPKLVQADINAAINLALRAIADPRLWAIQPRLRSQREGGKKPGTAKKEKVKQGTADAPTEAKLLTREKRKFGEGGKPLVIHRAAGAKPDDTRQPNFFADLAGLKVLAEQLALNNPREYSWLRKEWTSAEISGESSNPPLVHSKSFWGTVKAKQWERIQAINAARLAAWRDKSNPMAD

SEQ ID NO: 1226 - protein, 1351 aa, unidentified
  REGION 1..1351: note = Cas Enzyme sequence
VGKTLENMREHLGYDKNLQTFLKDQKIEDAYQELKPKIDELHEEFINDALGSEEAKKINFSEYLEKYAQKDDDKGEKKLREKIGESFVEAGKLWKEKKYTKYAWKKGSKVTGGSTLLSCQDMLQLVKDKNANNDKLREMIDETFKGFFTYLSGFNQNRENYYSTKDEKATAIATRIIHENLPKFCDNLLQFECIVRKKKDGSFEKIERKEEYLNAHKYLKSLGRTTEIKDAKSGKMIELEPISEEVFKIDYFNDCLSQPEIEEYNIKIGHYNAFINLYNQAKRAEEKDLQKDKKSFRDLPKFKTLFKQIGCGKSDPLFFSLTHDTTAGAKENKENHKKPYSVEQVLELAIQAGEKYFQEQDDAEKITIQKFKKYVLEKENYEGLYWSKVAMNSISNKYFDNYHDLKDRLKIARVFEKANKGSEDDVKIPEAIELSTFFEVLDESEDWEVSFFKKSILKDGKKNNIIQDAKKPSEALLKMIFSDISQNAQKFLDSANFVLKSKDYKSEEGKERIKTWMDHALAINQMLKYFLVKENKIKGHPLDSEVSEMLKELLFEAKLDDNTEVNWFQWYDALRNYLTKKPQDDAKENKLKLNFENGSLLGGWSDGQEKSKASVLLNDGDLYYLGILKKKSAFSTEEGKESDVYENPTTDCGRLILANLKFQTLAGKGFLGEFRMSYGNMGKGDPQEAIQSLQKIIKDRYVKKYPLLQRIAETQYFDKKAFDKDIQETLKECYVCKFTPIDWDKVQEYVSKGEMYLFEISSKDNGKGKTSKKNMQTLYWNAVFEGDTTFQLNGGGEIFYRKQAIKEKKIKKGYEEKPWVIENKRFTSEDGKFFFHCPIKLNYKSTGNSNPKYALSEVNNNVNYNLSPSPNLHFLGIDRGEKHLAYYSLVNQNGEIVDQGTLNLPFVDKDGKPRSITKEKFSYNKKTEKWEAKSMECWDYNDLLDAMASNRDMARKNWQTIGTIKETKNGYVSQVVRTIADLATNPEKPAFIVLEDLNTGFKRGRQKIEKSVYQKFELALAKKLNFLVDKKAKLGEIGSATNALQLTPPVQNYSDIENKKQVGIMLYTRANYTSQTDSATGWRKSIYLYSGSEEYIKAQIIGGEYQKKTYEPKFSDIYFDGKDYVFKYEKGKVKNPKTDEKKANEWQIYSGKDGISLDRFRGKRGKDKYEWKVEKIDIVEILDGIFENFDKNRSLLNQVKEGNELKKFGEHTAWESLRFAIDLIQQIRNTGIEGDERNSDFILSPVRGENGKHFDSREYWDKEQKGEKVNMPSSGDANGAYNIARKGLIMNEHIKAWTKAGKQKYKDNQSDLNLFVSDEEWDIWLLDRNKWNVMVSTFASRKKYEELKSQK

SEQ ID NO: 1227 - protein, 1351 aa, unidentified
  REGION 1..1351: note = Cas Enzyme sequence
MSAEEALVYTFNLFQEAINYHLVALAGMAESCAKGQSVGVRFRNKVQSIWGEHPKGKESGKTLQQSLAKTLHLREDASFEEVVAVIFEGCDRKEVLPYVQQFIMNRTQKGDGAIQQEGRALLPKLCDADFGGNYDYSAKEKNAAVGNTRLKRELARTDITQEELEQLANEMDLSWAAIKTQPNENHTASLCYSQDETCTKVREIMDELSECLYKKTDKAWEKYASKRGLNLYEEVRQTIAQRPVINSAHLLAKNRAVAAALKQAAVFFMYYPCRLSADLLKVKLGKEKPEKGEVTEYDCSALENDPILLARGTRGYIYRGFTALPDWQQDGAKMYSTEWDILAFKDALKMLHSYELKTQERKKHVDELNEELLYMVEGKGKAPSQSGEHDNATPVLKDDPRYVLVEELVREITPEAGRDYTISHRALNAFDEVKEEWLKAEKKGIADEENLKAIVRKIQGESSRFGAGVLFEALCKEKYRPIWHDWKDKQSWVRSTNILKDYGHVQELKAEIEQYKQEVRITAAEAEYSPRQLLFSDIGSFGKKQPGHEYIRGQKGKLRLRVAVQDARGRLTGATVLVRYSAPRFERDELGVDAANWTKPKKGEDTTVPWLQPMMKALHIDESLIRLDKEPAVALQVKKDKKQGNVCLLNFPVTMNLEPLHQYMGKAALWKNQMLGGQDEKLHLHWPATYKGKETPWWENKSIQNNGFDVLGIDLGMRYAAAWSLTHVQKEDKLYTKRGSELQGRYVGDSGNLMWYGYSIKQGLMKIDGEGNHYRHLESRKNDNTPQSPAGITGASDDDKKLAKDILSRVGMPLPDSADKDVLVLGNAALRAFKRLISRFRRYQSFLVKLKDEEKRDGALQEAKVFFAYNETTKQYIPQILQKIEENDDVAVRDLLLGALLELRAALPTVASDLMNLILPRKKGTWQWVEDYKPGYICSGRIDLVDKNTPERLIYHRGGLSVKRLTQLEKLRQALQALNHILWWEPGVTVPFGNDLKNIPVVDPCPQLLEKIENVREQRVNKIAHDIVAQALGVRLVQPRKDKNSGGKDIVHGEYELIPGRKPVDFVVLENLSRYLTSVDRSSDENVTLMRWCHRQLVAKVKQLLEEVFGIPVICTHAAYTSKFDALTSAPGFRAQELNAAMVNRLAQSSDSKDKRIGEAYSKILEKLSEDTQKNNIKLLAPDSRNGGEYFVSRSSQGVRVTNADINAAVNIAWRGIAAPESLHLLHRIRLEKKKGEMKPREANMREKSLKGDYVLKQHRSLHEVDDIITAFCLTDDIPGVLPFASYQSEKYASYNVVYGRDLWRTMKNNWWSMCHMYNLRVLEKYGVRVGLLKELIQSLNSPLDDDDIPM

SEQ ID NO: 1228 - protein, 1352 aa, unidentified
  REGION 1..1352: note = Cas Enzyme sequence
MSTQKNPFNQFTNLYELQKTLRFELRPVPETKKLLEKGEGKNLIQMDLEIDRLYEKEMKPMFNILHEKFINESLGLVKLDCKKLKKLENLLAEADKLRKQIKEGRKNKNNISEVEKRLKIIIGDNSQGKNKNGEIAVLQDELRVLIVKAFNLTADKWKKELNNKETLLPEKKGKRKIKIKKSGPKILQEENVLAILAYFNPDKADIIKKFAGFFTYFSGFNQNRANYYTVKALATGVANRAINRNFLIFLANRKDFARFKERLPRLAEFDNYFELENYEKYLSQTGIEEYNDQIGKIKQIVNLEHNQQQKDNKFQLKGLATLEKQIGCRTKKQREEGGDKSAPKFLEKVGLGFQVSQDDDGEYLIWECLNYINKELAGKLKSIKDNYQKFFADWRTGAYDLEKIWFRKEALNTISGRWFGGNNWFIIGKALALTGVGKFDKRENTYKIPEFVSLAEIKTAFEMLENGVNYDFKKSKKKKEGDDTDVVKYSADNLFKEEYKKKGLIKNSLFETMLAVWQSEIKRKFEQIFDGYKLEKDDVFGRKKGEWVEPFIENFQKVSQEKFDRGVKDENGRSIHTEVVKNLIEEGYLRLFQLTKYHNLDKKGERDPRPFDGNFYATLDEFWKDNIVVVYHKALQSTLTKKPYSEDKIKLNFENGSLLGGFSDGQERSKAGVVLKNKNKFYLGILIDRGFFRTDKANPVYDNAQNNEWERLILTNLKFQTLAGKGFLGKHGVSYGEMGKDNPMMAVEYLQKFIKLKYLDKYPALNEVAHKKYTIKKEFDADVKNALKDCFTMNFKPVDFGMIRQGLTESLFYLFEIVNKDISSQAKNGKNVHTLYWEALFGDQNLKKPILALNGGAEIFYRESQREKLEKKLDKSGKEVLDHKRYGQDKYFLHASITINYGQPKNIKFKEVINEKISQNADRVNIIGIDRGEKHLLYYSVVSPEGVLLEQGSFNQIETKNKVDIKAVKAEYGERGELKKVELVPTGKKVKYVDYQILLDYYEKKRNLARRDWQTIGKIKDLKDGYLSQTVHRIYQLILKYNAVVAMEDLNVEFKAKRAAKVEKSVYKNFEMALAKKLNHLILKDRRADEIGGALRAYQLTPAIPANDVGKFDKAKQWGIMFYVRANYTSTTDPLTGWRKHKYISNSEKIDNIQKFFSPGDGIQIDYDTEKQCFKFSYDHELEGGAKKHWELFACDGLERFYWDNRERQIKKYNLYEEFEKLLGGLRKEENINIQIDGVSEFRWKDLVFFWNLLNQIRNTDRSAQGDENDFLQSPVWSEKYNCFYDSRKAPNNMPNNGDANGAFNIARKGQLILERIKKCSDIPKFGNDNNGKNPENNYFISDADWDKFAQK

SEQ ID NO: 1229 - protein, 1353 aa, unidentified
  REGION 1..1353: note = Cas Enzyme sequence
MDSQKTPQKNLFKNFTNFYELSKTLRFELKPVGKTKELLKQNKVLEKDKLIDDNYHKIKYYFDCLHRKFIKETLLNTKLDLKNHYQKFKNLKKDNQQSLKDFRSEEKKLREEIVKNFKKEAEKWKSFYFTRNIFLNSEKDKIIEILFEKNNLEILKEEFKEKPANDSNAPDIESFNSLKNKKENLFTSFKGFTIYFSNFNNSRRNFYSDKDQGTAVANRAINENLRRFYDNIKLFEDKKSHYQKAGLTEEEENIFKLDYYNLCLLQEGIKKYNEIIGRRSKKENEGEKGLNQKINEYYQSTKEKLPMFKKLDRQIMSEKENSDRFIEITSDTRAFEVLKEFVKKNDQKITRAKEIFLNFIKSQLSNNQEYEIDKIYLKKPAINTISRKFFGENCAYFENALPHKETSSREEKYQLDDFISLRQIKDALSGEQKELPKKWKYLGKIEMETKNLFKENYRNRKLFLDADDSWKVFLKIWQNEFEKLIDDTGEKNANKNESYVFRKDELEKEIIAKGKIKKNRVIRREKSSDNKETEINETSVIKMYADSALSIFQMMKYFALEKGGKKVVDLDCDERFYEGFNEYFDVYSRQIISYYNEFRNFLTKKDFLGRLLFPSLNGEEEQKNILSKRKTDGAEKIKLNFDISHDHKWNSLAFLFKKDGKFYIGITKKGNGIKFHEGRKEENEFEKLEYKQLKFKTLVGKGYVRDFKEKYSAQNDQVAILNAKILIKKQFQSDYPLLKRVLEKKYPSKKEFGKHVIELLDASYSAEFIPIKEDILKLGENGDIYLFEINNKDFRTKGSPNLHTQYFKLLFEQPAPASLKLNSEIELFFRPKKDDLPIRTKNGRELTFVDKRDGNKEKKVLQNRRYGKDKYFLHLSIIQNFGKEKIKNNEISIRGFGKKFNAGFNSKILKNNFNIIGIDRGEKHLAYYSVIDQSGKIKDSGSFNKIDVLDKNGKLVKTVDYLKLLEKKAGNRDTARKNWQTIENIKELKNGYISQVVRKICDLILKYNAVVIFEDLSGGFKRSRMKIEKQIYQKLELALVKKLNYLVNKNAKEGERGHYLNAYQLTPPVTTYGNVGKQTGMVFYTQASYTSKTCPVCGYRKNISYAFYFENEKKAIKIISRLDKLKYNAGKNCFELEYSLDKFIKENGKNNKIIKNKENELYHNTQKKNQFTVFSKDIIRYKWHDRQTERAKNLSDGEEFLADEIERKTARGVVKKYDITKCLASLFRKNNIEYKDGDLRSKISSNLNSGFYKNLFYLIGLMLDTRSSISGEEIDIIQCPECGFHSDNDFESHKYNGDANGAYNIARKGIMILEKIKQFAQNNNGSVDKISYGDLAVNIEEWDKYSQIVGKRN

SEQ ID NO: 1230 - protein, 1353 aa, unidentified
  REGION 1..1353: note = Cas Enzyme sequence
METNKCIWDDFTNKYSLSKTLRFELKPIGIDGKQLSQEDATKVFTQIIEQDKKIKEAYIVLKPILDRIHEQVINLSLNSEDAKKIDFLRYYERYSDKRELKSAEDTLRREIVKTFNVGVKSIKEKAGKDNKGKQILKEEGIKCLTEAGILKYIERNIKDFISDKLTEKELKDHLEVFNKFFGYFLGYNQNRKNYYVTEEKATAVATRIVRDNLPKFCDNCIQFSFYKIIKKKDKDKTNEVSSRKDEYLNVYQFLKDSHKTTKIKDAETNQMIEAEPIDKKLFDISTFSECMSQSGIEKYNKIIGHYNLLLNLYNQARKGEKDFKKLNQFKTLYKQIGCGKKKVLFDSLKYDTPEEQKKANEELDKILNLKEILVIISDVGKKYFKQDSDGTDSVTIIHFINWLKENENWDGVYWSKGAVDKISNQYLTNWNEIQNQIKEYLQGKDKALKEKCHTIATFDKIKDQLKINDAVELSVLFEILDTNKDKDWKDYFFKKSILDNDVYLKLINENLPPSKNLINLICEDMKISAEKFYELSKNILEITDYKKDENKLKIKDWLELAKQVVWHIKDFEVKENKVKGNPINSEFSNMITILLHTDDIKWFDWYDVVRNYLTKKPQDDAKKNKLKLNFKNAHLLGGLSDGEEKNKGAVIIRNNKKYYLGLLIKSSIFDTSLENNHMYNNTSENTGRVIIKNLGFKTLAGKGFKSKFGESYGEIGKRNPMEAVEKLQIFLREHATYIVDYPLLKEVVNKKYTTKKEFDKRIKEILIESYQCYFKPINWNNVLQNIMFKNLYLFEIYSKDFSEIKGEKSRNSKVNLQTIYWEHIFQKNSNIQLCGGGELFFRNKAIEDGKIIIHSANQPIQRRIGRKTESRFSHSIIKDKRFTMEKFFLHIPIMLNYQTTVSSFINSKVNLGLYSEMNNTINNVFTQTNNVKFLGIDRGEKHLIYYSLVDINGNILAQDDFDEINNKNYLCAINEAIKIGREKQENWQQKGNIKNLKDGYMSLVIHEIIQKIKDQNNGIFTPTYIVLENLNKGFKRSRQKFEQQVYQKFELALAKKLNYLVDKTVIIPEIGSISNALQLTPPVANYQDIENKKQVGVMLYTRAQYTSITDPVTGWRKTIYITGNDEDIKKQIFENFSNIMMDENGDYFFEYIDKNTKKWKLWSSKDGCGLERYRTKHNKDKNEIIILPYNPKEMLDKLFAEFDLKKSLLDQLKNGVVLSKIDNDKSAWKSLCFVIDIIQQIRNNGNLKKKQDDNFLLSPIRNEQGEHFDSRITYQPIMPKDADANGAYNIARKGIIMYEHIKQWIKEDNQKDKKYSDLDLFISDNEWDLWLCDKDIWKKKLPIFASRKSKLEE

SEQ ID NO: 1231 - protein, 1353 aa, unidentified
  REGION 1..1353: note = Cas Enzyme sequence
MTITNQQPFQDFVGLSEIQKTLRWRLIPIGKTKENMKKYNVFQEDEIRHKYYPVLKNACDDFYRQHIDQQLADIQFDWHKLDEVSNTNDNEKITKIQAVYRKLLFNRLNDSIDTAGNKRKSTLSYSFGDLFKAKLITTILPEFIIKRYQGDDLEEAKAALDCYKRFTSRLTGFWDTRKNIFTAEDIATGCPNRLVNENFPIFQKNADLYEENKKHLADKFKDFEEHLKENNKLSQDESLDDFFTINAFNKVCTQAGITLYNTLLGGFTKKDNTKIQGINEIVNLQQQAINKGKKAENRDNIKLLKLTRLRKQILAKEDSTSFLIEQIENDQDLFQKIFDFFDLLKLKEVENLDSFEQYSSLINLLDQGDKNKIFISAKYLTKISHQISKDWHFINKGISLLVESDNTNNEYQRYLEIYNDDKDIERLRKQIYFSVADLEKAIDLAGQDENRDVSEISILDYVQNLDEDCNFERDLFDLLERIKQIMKSGEKLLGNTEAINIIKDFLDTIMIRHSRWQVFTCELSDEYDQNFYSTYNLVSETMSNIVRLYNLARNYLSRKPDRMKKMRINFNKPTLADGWSEGKIADNLSMLFRKDGLYYLGIIKDRVTYNKLLEISGSNEANIKKNTSSYERMNYYLLPDAFRSIPKSSLAMRAVKEYFENNPSSEDYYIETDQFAEPFRISRKIYDMQYTDLHNDKKKYQIDYLRDTEDETGYRNALTDWINFCKDFCNNYEGRKHFDYSQIKDAENYYTVNEFYSDIDKCSYNVYFTPILESEINKLIDEGKLYLFQLYNKDFSEYSTGKPNLHTIYWRALFSDENLEKKNIKLNGQAELFFRPKQIATPVTHKKGSIMVNRFDVNGKPIPMEVYQEVKEYKNGLKSWEDLSKETKTGLENNQYKFFEAEFEIIKDRRYTEDQMFFHVPISFNWHISSSPRINDLANQHIVNSDDMHIIGIDRGERHLLYYSVINMNGQIIEQGSLNNITEQSPNEENGTRTIPYKDMLRQREDERAQARLNWQAIDKIKDLKDGYLGQVVHFLAKLIIKYNAIVIMEDLNFGFKRGRFKVERQVYQKFEMALLKKLNALVFKDRDINEIGGALKPWQLTRPIDSYDKMGKQNGILFYVPAAYTSAVDPVTGFANLFNLRNIKSTERIEFFSKFEAIEYHQNEDIISFTFDYNKFSNISRIKNLNKSKWQVYTNGERIRWDNNERKHKSEDLTETMKNYLIDADIDYVNNPDILGELLKMDDASKKNFANKIFNIFSLTVELRNTVKDSADNGTDYNEIDYIISPVKDSYGNFFDSRMNLDNLPNNGDANGAYNIARKGLLYVKQLQNSVRDGKNPSLSISNKDWFKFITS

SEQ ID NO: 1232 - protein, 1353 aa, unidentified
  REGION 1..1353: note = Cas Enzyme sequence
MHTYSEFTGLYQLSKTLRFELKPIGKTKETFKQWLEESNSTDENNNLFVKDKKIKDAYLAIKPIMDKLHEQFIEKALLDGAKNIDFSEYFSAYQNKAVKDDMEKELRKRIGETFQVAGKYYVQEISKAQKDGKEIKTKKDKLFECLTDAKVLNYLIVNVKEFAKASGLGENELKEHLEQFKGFWGYLDGYNTNRENYYATEKEQSTAVATRIVHENLPTFCSNALRFEKRKEEYLDIYRYLKDNNRETKIKNAQGKEIEAEPITETVFQIEHFNKCLAQSQIEEYNRIIGNYNYLINLYNQARREETGFKKIDEFETLYKQIGCGKKESMFETLQDDSDVKNLLLKAKDAGNVMFKGSRDAEINTLPAFIKFLQECDNWDGIYMSSAAISKLSNVYFTNWHSVKDKLKDAKANACITYDKNREEPIKLRDAVELSGLFAVLDSEQSEHFFKESLFKDDETNEYRGVLDKALAPSKNLINLLCFDIERNIKAFLQESDSIVALEKFKDENHQEGEEDQTIKQIKDWLEAATDALRIVRYFAVRKSKMKGNLPNVTMEQALSNLLYNDDARWFKWYDLIRNYLTKKPQDDAKENKLKLNFGNPSLLDGWSDGQEKKKAATILKYDNELYLCILKTKSVFDTSKEDNPIYQVAQSNASRLILRNLKFQTLAGKGFLGENNISYGEMGKSNPTKAIQCLQKIIKERYVKKYPLLEKFVVNTYSDKSKFDAEITETLKECYVCEFVPIDWRLVTEKQNNDELFLFKIHCKDYQPNTTGKKDLQTMYWEDVLTDGSKHQLCAGAEIFMREPVPNESPIKHRVGSKMVNKRDKDGKTIPEQIYREIYLYANGKKKDIPAEAQKYIDEQKAIIKDVKHEIIKDKRFYGETKYMFHCPIKLHFEAKDPKYAFPEVNAKITDLLQQSDNLQFIGIDRGEKHLVYSCTIDKAGKIIKCNHHDNINGTDYVKKLEAVADERIIAKKNWQAQNKIKDLKSGYISHVVHRLVEETIKDGEKIAPHAYIVLEDLNTEMKRGRQKIEKQVYQNLETALAKKFNFVVDKNAKQGELGSVSKALQLTPPINNYQDIEGKKQFGVMLYTRANYTSVTDPATGWRKTIYIKNGKEEDIKNQILDKFSDFGFDGKDYYFEYTEAHAGHSWRMYSGKNGVSLPRFQNRKQLQQDKNIWVPEKVNVVEILHQLFAKFGKEKSFKEQMEQGVELKKIDGRSETAWQSLRYALDLIQQIRNSGLKKEDDNFLYSPVRNENGEHFDTRNHKNNDDLELIVDADANGAYNIARKGLIMDAHIKHWIESGRPMKSAKKDEKTPDLDLFVSDKEWDLWLLDREQWEKELPKFASRSAKGDND

SEQ ID NO: 1233 - protein, 1354 aa, unidentified
  REGION 1..1354: note = Cas Enzyme sequence
VILLIRLNYFSQTISLIKESANVREKNSGLEQFTNLYSLSKTLRFELIPVEGTAETIQQNDILAEDKKLADSYQKIKPTLDAFHRAFIDRCLSDVKLENLDRYYDLYHVGDEEKRTKKYQDEFKSVKNALRKEVVSYFKKDKRYPKGLFGKELLKTHLPKWIEETGGDWYQDESFVNFTTYFSGYNENRENMYKDKEQSTSIAYRMIDENLPKFVYNIRLFNRLSDTDISGLFSVISEELAPFIFTSSLEEMFELSTFNKLMTQGHIDALNTIIGGYKEGEKVVKGLNGYINEYNQTHPKNRLPMMQMLYKQILSESNSASWLPDAFDSAAELFTGMNNFCDCGLRMNENPSLLEEMKRVLQEIKVCDAAGIYIRNDSSINTISNAIFGHYGVIRNALEVYYECQVFPEYRKRLINAKSAKSAEKIKKAKETYVNGTGYFPVREIQDALELYIDTAEFGSNPEIKNRYFKDCISVYLAEGAATYVSRIKEAYNNVSGMIKASYTSDYRLNEDDKDGLKHFLDAVLSLLHYCKPLYVKAEAGIKVDEVFYGQFNPLYEQLQTVTVIYDKVRNYATQKPYSEEKIKLNFGIKGNFLSGWVESKTDASDNGTQYGGYLFRKRNCIGEYDYYLGISSNSKLFRYFNSISKEGASGYERLNYYQPKEQSVYGSAYKGRHPYADDKVLLMSTILDFMKKTKDTEFYEGLLAYSQTDLATPSGCLSRIKEFSTELYENLLRDEKFKDANEEVMQALKATICSMGRLKGTEAVTERQYGVFTEMMNDISTLMSNNVYQYSAVSETELREALQDKKKPLYLFRITNKDLAYAERLEQGKDRKHRGRDNLHTMYFKALMSGEQNVYDIGSGTVFYRPASIARKVTHPAGIPINSKNPNLKDRKNIFEYDLIKDRRFTEDKFQFHLSIIQNYSASGIKSSDYNEKVCQYLRNNPNVNILGIDRGERNLLYISMIDRNGNIVRDENGQLIQYSLNNLTGEYTNASGEIVKFTTPYHTLLDKREKDNADNQRSWGTIGKIKELKAGYMSQVISHITRLMVKYNAIIVMEDLNSRFINSRRKVDKQVYQNFERALIEKLNYLVFKDIPAEESGGLYNALQLADRFTSFRDLQKQSGFIFYIPAWNTSRIDPVTGFVNLLKPKSDNLKQARDFFGKFESICFNSESDWFEFAFDYSNFLSGADYLKSRWTVCTHGDCRYIYDKKMNNNKGGYKKINVTKTIKELFNEYGIDYAEGDDLKEQIVSQNRTAFFSKLIECLKVTLAMRYSNGDGGRDFILSPVADENGHFFNSEEAAANRDDLPWDADANGAYNIARKGLLVLRNIDKSDSLKDWTTKISNREWLEFAQSFS

SEQ ID NO: 1234 - protein, 1356 aa, unidentified
  REGION 1..1356: note = Cas Enzyme sequence
MTIKKHKPFTNFECLTPVQKTLRFRLIPVGRTTEFVKCRNIIEADRKRSEMYPLLKELADRFYREFMTDQLSNLLFDWSPLVEALLLARNNTDPRENQRIASLVRDEQKKYRTLLLKRLSGQVDRNGTPLPKNTASVNKKYYDDLFKARFVTETLPAYLEHLKNKPDGRISDELFDAYKDALDSYQKFTSRLTNFWQARKNIFTDEDIATGFAYRIVHEIVPDYLFNRRVYEQHKLDFPEPLDLLETELKKKNLIANDESLDALFTIPAINRLLTQKGVDLHNAVIGGFFTDDHTKVQGFNELANLKNQTLKNVSDNSEIKPVGKMTRLKKHILSISESTSFLFEQIESDDDLLARIIEFNNTLSEPDIDGLSIADINDQLYNIMTGVDPSTILVHARNLNKLSHEASLSWNRLRDGLYQMATESPYREDERFKRYIDASEEERDLSKLKNDIYFSLQELQFALDQSIDLEEEATPTEDIFLPFEFPGMDLKSELTVLFRSIEQLISSETKLIGNPDAIATIKKYLDAIMARYSIWNLLSCEAVELQDDLFYPEYDRVMGSLSNIILLYNLARNYLSRKPSSKEKFRLNFDKPTLADGWSESKVPDNFSVLLRKDDLFYLGILKDRKAYRVLSYENCDETAKNIKGYYERMIYHFSPDAYRMIPKCSTARKDVKKHFGEQGETTGYTLYPGASNFVKPFTIPYEIYRLQTELVNDKKRYQADYLKQTEDEEGYRQAVTAWIDFCKSYLESYEGTSTFDYSHLLKSEDYEDVNQFYADVDRASYSIYFEKVSVDLIHTMVDRGDLYLFQLYNKDFSPHSTGKPNLHTMYWRALFSNDNLQNNTIKLNGQAELFYRPKQVEQPTVHLQGSYLLNRFDKHGDVIPAGLYCEIYNHINERHPEGYTLSEEATQGLLDGRFVYREAPFELVKDKRYTEDQLFLHVPLEFNWTASANVPFENLANEYIKKDSDLHIIGIDRGERNLLYYSVINLQGDIVKQGSLNTLIQQTTLKGETVERQIPYQSMLKQREDERAEARQNWQSIDRIKDLKEGYLSHVIYKLSRLIIKYHAIVVMENLNVGFKRGRFKVERQVYQKFEVALINKLNALSFKEYEPNELGGVMRPWQLARRVVSPEDTRSQNGIVFYVPASYTSIVDPVTGFANLFYLNRIRNKDLNSFYGHFQEIRYDHEFDRFIFRFNYADFGVFCRIKNVPSRTWNLVSGERKAFNPKRRMIEKRDTTDEIKKALEAHGIAYQNEQNLLPLLLENENLLARIHRSFRLVLQLRNSDSDRDDIVSPALDKENNTFDSGQQPYESSLPINADANGAYNIARKGLLLVDKVKNDKRAVLSNREWFEYLMAEE

SEQ ID NO: 1235 - protein, 1356 aa, unidentified
  REGION 1..1356: note = Cas Enzyme sequence
  VARIANT 52: note = X can be any amino acid
  VARIANT 224: note = X can be any amino acid
  VARIANT 351: note = X can be any amino acid
  VARIANT 398: note = X can be any amino acid
  VARIANT 402: note = X can be any amino acid
MTIKKHKPFTNFECLTPVQKTLRFRLIPVGRTTEFVKCRNIIEADRKRSEMXPLLKELADRFYREFMTDQLSNLLFDWSPLVEALLLARNNTDPRENQRIASLVRDEQKKYRTLLLKRLSGQVDRNGTPLPKNTASVNKKYYDDLFKARFVTETLPAYLEHLKNKPDGRISDELFDAYKDALDSYQKFTSRLTNFWQARKNIFTDEDIATGFAYRIVHEIVPDXLFNRRVYEQHKLDFPEPLDLLETELKKKNLIANDESLDALFTIPAINRLLTQKGVDLHNAVIGGFFTDDHTKVQGFNELANLKNQTLKNVSDNSEIKPVGKMTRLKKHILSISESTSFLFEQIESDXDLLARIIEFNNTLSEPDIDGLSIADINDQLYNIMTGVDPSTILVHAXNLNXLSHEASLSWNRLRDGLYQMATESPYREDERFKRYIDASEEERDLSKLKNDIYFSLQELQFALDQSIDLEEEATPTEDIFLPFEFPGMDLKSELTVLFRSIEQLISSETKLIGNPDAIATIKKYLDAIMARYSIWNLLSCEAVELQDDLFYPEYDRVMGSLSNIILLYNLARNYLSRKPSSKEKFRLNFDKPTLADGWSESKVPDNFSVLLRKDDLFYLGILKDRKAYRVLSYENCDETAKNIKGYYERMIYHFSPDAYRMIPKCSTARKDVKKHFGEQGETTGYTLYPGASNFVKPFTIPYEIYRLQTELVNDKKRYQADYLKQTEDEEGYRQAVTAWIDFCKSYLESYEGTSTFDYSHLLKSEDYEDVNQFYADVDRASYSIYFEKVSVDLIHTMVDRGDLYLFQLYNKDFSPHSTGKPNLHTMYWRALFSNDNLQNNTIKLNGQAELFYRPKQVEQPTVHLQGSYLLNRFDKHGDVIPAGLYCEIYNHINERHPEGYTLSEEATQGLLDGRFVYREAPFELVKDKRYTEDQLFLHVPLEFNWTASANVPFENLANEYIKKDSDLHIIGIDRGERNLLYYSVINLQGDIVKQGSLNTLIQQTTLKGETVERQIPYQSMLKQREDERAEARQNWQSIDRIKDLKEGYLSHVIYKLSRLIIKYHAIVVMENLNVGFKRGRFKVERQVYQKFEVALINKLNALSFKEYEPNELGGVMRPWQLARRVVSPEDTRSQNGIVFYVPASYTSIVDPVTGFANLFYLNRIRNKDLNSFYGHFQEIRYDHEFDRFIFRFNYADFGVFCRIKNVPSRTWNLVSGERKAFNPKRRMIEKRDTTDEIKKALEAHGIAYQNEQNLLPLLLENENLLARIHRSFRLVLQLRNSDSDRDDIVSPALDKENNTFDSGQQPYESSLPINADANGAYNIARKGLLLVDKVKNDKRAVLSNREWFEYLMAEE

SEQ ID NO: 1236 - protein, 1357 aa, unidentified
  REGION 1..1357: note = Cas Enzyme sequence
VNRIYQGRVTKLELLGSVKDEVLQEITKLEGEQLLWQHHELFQDAVNYYVVCLMAMAGDKESLVFKIRQRADGSDAEHAVWAPFTRKGQRRQGMREVAKYFGQDPESARLVDCCQKALEGNEASPELLDLALKELLFFCQGDGKIQQEGNSMFPRFCNADFEGGYNTGEGPALKSSGESRIKGELHGLTTKGQFEQFAREMQIAWLVNINVNGTPAKGEGARNRLLKSIAHFGQYFGTHKATTDRNERMEKFFGEHPDCKELILTIEEKIKALPVEELPDIPANRKSIPDRLEAGLLFKYFPSAEMAEILKVAFPPAKETVGKAADKETTNYASFGDDAIRLARGKRGFVFRAFTSLSGFSGSDTPEIEWKYFDILAFKEALKALNQIEQKGEERENERNRLQVDLKYMLGESQKYDESEESAQPPPVVAGDPRVQQLEKVLAGMRQAYDMTDEEVVEYGLHERTIRGFEGLRKDWNKLHIDNLSLEAAQKKLKATLSEYQTDNKETIGSAMLFEEFIQPDNWIIWKTPDPATAVMWEESKFGSNPLAALLQKRELENDIQRLTEPIRFTPADARYSRRQYLFGNQTTFKSKKGAYRHEINSLSVIVDLAVLEEGRWHKRRVRILYSAPRFLREGLRSGAEDLERMPWVQPMMEALGIRDELPQDMHSYAVFLMPHETREGGKTILLNFPVELNEGDLVERLGKRLRWAGQFAGGKDKNLYLRWPEDEWPKGWKGGRWYEKPEPFRVLSVDLGQRDAGAFALIACRPDAEFGQTAKGADRHSRYIGNAGGKPWHASVEKTGLLRLPGEDAQVLRNGQWVQELSGEKGRLATPSETEQAQATLVMLGCADKRLLEDEPLRRFFVTQNQKLLMALRWAQGRLARLHRWIWMLADEHRAATARVEILHPEAVSSDIGALAGEGKWELVAMRMEEEINLLKGVVEKSLVLVANRVLPLKGRKWEWHARQDGNGYVLRQGERGSDYSPTRIAGQRGLSMERIGQIEDLRKRCQSFNRAVMRKAGERAKMGRSARGIELPDPCPEILEKLERIREQRVDQTAHLILAEALGVRLKAHSKSEAERVARDIHGEYEKLREPVDFIVLEDLSRYLSSQGRSKGENSRLMKWCHRALLLKLKQLCETYGIPVLETAAAYSSRFSAKDGTPGFRAVEVGLNDKAQFRWTNALAKNEKEVVALFNLLEEINAGDVLKRRKLLAPVGGGPLFVPMRGPVEQADVNAATNLGLRAVAAPGRLDIHHRIRTERDSEGRVFPKTKSKREQARWGKNPPAFNLGDGAVIERNSNFFPLFQFDVAYERATLEGFSHFFASGKAVWGTIKADQWARIEQINRGRAAKNRWVQELPM

SEQ ID NO: 1237 - protein, 1357 aa, unidentified
  REGION 1..1357: note = Cas Enzyme sequence
MKYKSFTLRAYTMRLAPPLGASKEDKALLWRKLWQTHDLVNRGTKVLGDVWLNLRGGLHASLATEAPSPDDARVLLALGWLTVEAPASAIPEHAILARADQDPKERSRALGARLESILGADGVPSDQVPAWMEACRATLAAEIREDAVWVDRRGEFERAAKTLGWTAREAREMLIDEMMDGIAAYLTVDDSAGKGEKKEYGKKAVNWISNNWGTGKKSDTIAILTKLKSVLNIPLENFINKSSQSFMVAIHEAVGAQGDRLADTNTLLEQIKKTFAWKGRPSAGCMALDKIAENPIVTGALTQRVNFAFNKEINDKEVKAGRATINWSGILKLQTEQATGLPFRTGKDNIWEYVVMLDHALRRVSIAHSWAKLAEASRRQFQEAATAPSDASVSAWVQRYALARAESSGSLGEYLIRRNALDGWKEVCQAWVNLGQEATAEKRIKAARDLQEEVDKFGDIQLFEALAEHPDLWSRDGAAKPELLTREVDRRIADNDRTRFKVPAYRHPDALLNPVFCDYGKSRWKIWYSAQDGEKAKVPRTITLDTCADGTISETEFRWQSKRLFNEIVSGAEETIEGSRNHRHGHAIHADKSAERIRTAGIFDLDVWNGRLQAPRASLERVHAMRARNAGQGQIDKAMARIPWLVTFSAPLIPEGPWLDFVQDDPTLQGHKPVKDLAPRGGYEFAGLSFPFIHPENGKTRKKAARIGLSRLKGLRILSADLGHRHAAACAVWRAIDIEELKSRCAAADSPAPAADALFLHLKEQGKTVVFRRLGADALPDGKAHPAPWAELERQFLIQLPGEESQARYATGEERNEVARLESLMGCRLPREPKGWRIDRLQLDLVRSARLGLRRHGTMARLAIGLGSTERIMPGGRRVPFSGREDKEAHLADLLLQQHRLLMDELFPDEAARDRWKGIAAGYLTEADLSGGESGPRRDTRGLAKRLTGLAAKFADGDPAAVEWITYWKERWQAMDGVWRDVIKGIRNILMPKGGKADKSIRRRGGLAMSRITAIEEFRRKVQLSYHNRQRLDGERAEAPEGFAAKALRSLEKLRENRVRQIASRLASAALGIGADPANKQSIFKRFPACHAVVIEDLSNYRPESTQTRRENRQLMQWSSGKVRKLLAEACQLAGLHLREISPAFTSRQDSRTGAPGLRCVEVEWKEFRRPGGYWARLVEKAREKDKTGTAGPLERYLIRLADSEGTAPTPTVLIPRRGAELFASSHDAGPIALQADLNAAANIGLVALMDPDWSGRWWFVPATRESHQPDKELKSAAPMASTAVLPVAAPADLGKQGRKRAKGKTDEMARHFRDPSAAPLGEGTWFVGFPDYEADYAGRVVRRLERRCLPLPETPF

SEQ ID NO: 1238 - protein, 1358 aa, unidentified
  REGION 1..1358: note = Cas Enzyme sequence
VNYYLLAMAALAKQAVPGAGRLMSDLPARIYEAWDVFPRQDAARAGARSLRDSVASWIGLDSSATLQSAYDAILKGNSSGAGEMSHALALVLQECSGDGGIQQNGRAYLPMLCDAKCKATYKYSASSLASTSGKDKLSSVLHGEPSDQDLKAIAAQMELSWTIKVEPGEFLGGDEAKKRISEALDHVEGMINKPSPRLAEWLNGVKDASTQIGHFRAAVVSLSDQFRIAKNRGGNISKDLLFSTIAFMAFPCQLTKQCLRLGVKAPKKGAKQASKLGIDFTALGDDPVKLARGSRGYIFPAFTALPSWNPKSQGEPSWKEFDIAAFKEALKALNQFRIKTDERTKRESDLAGLIAHLIGTPVIGWNPSKLESGEEDELPEPLDQKLLKLAWKLEEEMTRGLSESIVGELTSLPFGDGCIPAREGGWTVSRASLRGLREIAGEWMKILAKNPAAPASDLEEAVKEHQRREGKAGSIGSVGLFLTLCDPGYRPLWISTATEEADNDGESNRFLYRLADLHESVAEYQRCKEPVNLTPAEPRHSRRAYTFPDLAFTNRKKPSKKELHQNKQFLEEGCFTIEVLRKSADGFLEVGEIRICYTAPRLRRDGLIGSDREEWLQPMVKALGLKTTKLSESFDPSFTLMPDFNSSGSLRFLLNFAANIDAEPLREAVGKSTRWDRQLNGTKDENIHIHWPGTADPAKMKVAPWWNNPSIIDDGFTVLSTDLGQRTAGAWALLRITSSRPQTPRPVRSIGCDGTREWFAEVLKTGMHRLPGEDAEVRGKDGHMVQELSGKTGRMASEEEWKEAVDLAKALLAEEPENWVGSYCHKKSYPEQNDSLLVLANRRLSRLGTFHRWSCFNPDKETDPVRRASLILKLAAELAQWEDSDILSWAAKLSEGDVTAFKSAAGEAFAKYRRDLLHLLVKLANRVAPLRDELWEWKERGGGSPYGDLVRIKGREGAKPAIRGQRGLSMARIEQMENLRRLFLRYNRSLDRSPGIPAKFGRDDEGRTSGEPCHDLLGKIDRIKEQRVDQTAHLILAQALGVKLAPHSLDAATRRLGDYHGEYTSIPGRSPVDLVVIENLNRYLTSQGRAPSENSRLMKWSHRAIRDKVKMLIEEPFGIPVLEVPAAYSSRFCAVTGEPGSRCEERASLDDYLQELLGRRATTPPTAGHLDMRIWNQKLLGQFERLAGINAKRGAEGKAPKTLMLPKTGGPLFLGAKESSVVQSDMNAAINLAFRAVAAPDALHLLHRVRSQSDGQEIITLVKNAREKAAYGGKGIPITIKGTASSKLSKSANFFHDARGIARFDSGEITVAGNVIPVASGIGIWHAVNEAILPRIIAINEMRLGIRPVFEEKDEIPM

SEQ ID NO: 1239 - protein, 1358 aa, unidentified
  REGION 1..1358: note = Cas Enzyme sequence
VNYYLLAMAALAKQAVPGAGRLMSDLPARIYEAWDVFPRQDAARAGARSLRDSVASWIGLDSSATLQSAYDAILKGNSSGAGEMSHALALVLQECSGDGGIQQNGRAYLPMLCDAKCKATYKYSASSLASTSGKDKLSSVLHGEPSDQDLKAIAAQMELSWTIKVEPGEFLGGDEAKKRISEALDHVEGMINKPSPRLAEWLNGVKDASTQIGHFRAAVVSLSDQFRIAKNRGGNISKDLLFSIIAFMAFPCQLTKQCLRLGVKAPKKGAKQASKLGIDFTALGDDPVKLARGSRGYIFPAFTALPSWNPKSQGEPSWKEFDIAAFKEALKALNQFRIKTDERTKRESDLAGLIAHLIGTPVIGWNPSKLESGEEDELPEPLDQKLLKLAWKLEEEMTRGLSESIVGELTSLPFGDGCIPAREGGWTVSRASLRGLREIAGEWMKILAKNPAAPASDLEEAVKEHQRREGKAGSIGSVGLFLTLCDPGYRPLWISTATEEADNDGESNRFLYRLADLHESVAEYQRCKEPVNLTPAEPRHSRRAYTFPDLAFTNRKKPSKKELHQNKQFLEEGCFTIEVLRKSADGFLEVGEIRICYTAPRLRRDGLIGSDREEWLQPMVKALGLKTTKLSESFDPSFTLMPDFNSSGSLRFLLNFAANIDAEPLREAVGKSTRWDRQLNGTKDENIHIHWPGTADPAKMKVAPWWNNPSIIDDGFTVLSTDLGQRTAGAWALLRITSSRPQTPRPVRSIGCDGTREWFAEVLKTGMHRLPGEDAEVRGKDGHMVQELSGKTGRMASEEEWKEAVDLAKALLAEEPENWVGSYCHKKSYPEQNDSLLVLANRRLSRLGTFHRWSCFNPDKETDPVRRASLILKLAAELAQWEDSDILSWAAKLSEGDVTAFKSAAGEAFAKYRRDLLHLLVKLANRVAPLRDELWEWKERGGGSPYGDLVRIKGREGAKPAIRGQRGLSMARIEQMENLRRLFLRYNRSLDRSPGIPAKFGRDDEGRTSGEPCHDLLGKIDRIKEQRVDQTAHLILAQALGVKLAPHSLDAATRRLGDYHGEYTSIPGRSPVDLVVIENLNRYLTSQGRAPSENSRLMKWSHRAIRDKVKMLIEEPFGIPVLEVPAAYSSRFCAVTGEPGSRCEERASLDDYLQELLGRRATTPPTAGHLDMRIWNQKLLGQFERLAGINAKRGAEGKAPKTLMLPKTGGPLFLGAKESSVVQSDMNAAINLAFRAVAAPDALHLLHRVRSQSDGQEIITLVKNAREKAAYGGKGIPITIKGTASSKLSKSANFFHDARGIARFDSGEITVAGNVIPVASGIGIWHAVNEAILPRIIAINEMRLGIRPVFEEKDEIPM

SEQ ID NO: 1240 - protein, 1359 aa, unidentified
  REGION 1..1359: note = Cas Enzyme sequence
MPSELNRIYQGRVNRVFVEEKNGAPIELEDGDGLLLKHHELYQDAVNYYLVALTAMSSEQSELLGKMRQRLSDIWNDFYRNGEKRPGLKHSIIRSLGKDHPGEVKALEKKDGLELAMKLIIGGNGAPQDVMNSALELIVSKCKGDVVQPGRTYFARLCNSGYSGNWDFDTKALREAAGKRKLTNALVSDDPVAAVQSIIPEMTLGWSGVKTQDGKRFEGDEAKASLKEAIRFFLDAKPEKLGPRVTSYLKERGKSDLELYIKRADELDGISFERNNKADLRLRHATWLLKFFPSAYTIGLLRSILPEKLDKQESDPDNSAPPYEDDPVKLSRGARGYVFSKFTELKIWNTADLAKEESGWRNRFDMAAFCETLKAFNQFRQKTEERNTKREAYSRALEWMDGKSAERKPPVDPESGTDEESDTDGALPVLGGDPRWSALLKLLKKDLAITLEDTDSGQDDESMEDALVEYGLTDRTIRCYRELRKELLKAEENARKKGLDDSALSADLLQTVTAFQGSHQDTIGSATLFRKLTEPTYFCIWHDAPVPGKYTSTDILSDAVRYFDIQREFNRLQEPIMVTLADMRYSRRTSDLRALVYDKSGYQKGFGHVKDNVFAARIARETADGISSVKVRIEYSAPRLRRDGLIGGETSIYASPVLRAFLGEDAPPVQDFKSTSVSLMPDWDRKDRLRILLNFPVKLDVSKLPNEASARFDKQFERQKSNTDWGDVRLLWQSANGKPVTWHKNGQPFDYLSVDLGQRVAAAISRIHVSQQNDARLHAVQLGEIDGHCWYAARTYAGLLRLPGEDSTIIRDGKREKEPSGREGRPATQQETDDALDICKQLIGDDTLLRQYDAVTPVKSFPEQNDKLLIALRRKLWRLKQLKRWSWMLASSGKRERAESELASSEWIRPEDKNLESIRRLELECRQVLPGLLLRIADRILPLRGRKWEWAELPETKSYCLRQTAPGTDDPRKRICGQRGLSMSRIEQLENLRKRCQALNRILMEKPGSAPLGMKQRRELQIPDCCPDILMRMNEMKDQRVNQTANMILAQALGLRLRPHEEDAAKRAENGIHGEYERIPGVQPASFIVLENLSRYRFSQDRAAFENSRLMKWSHRQILAKLKLLCEVFNIPVLEVDAAYSSKFSASGFPGFRAEECGMAELNRMAAGKQYSQGEQKKLLDCIRGQLDAMLAVNSKATVILPRTGGPVFVPFVQAEKTDALLQADVNASFNIGLRGAAHPSNLFLNNRISASRAKKDSTEWKPRSKTFGKQYAIQFAPGAKVDGNGGSFFVIRCSPDLVLKHGCSTESRPRFADAELNGKYPNLLFGSAIWRNLPLQLERCRKINQARLDKLNRSPRKS

SEQ ID NO: 1241 - protein, 1360 aa, unidentified
  REGION 1..1360: note = Cas Enzyme sequence
MQKEQSIKTKDTFEDFNNLYTINKTLRFSLIPYRETLDILKIEEEKNNFKNDREIAKFYKQIKQILDEFHSEFIDEAMKDFSFDEKKELKEFEDKYIEFIKAKKDTDNKKFFQSKEKELSDLTKKLEKKICEQFSLYKSDKYKYSKFDKDNKSKDEALFTKENIFGKKVLILLKIKYKNKENELNIIKYFDDFSTYLGGYNENRKNYYKAENKAGQFATRVIDENLIQFLKNKHIFENKYKKDNKNIRIKNIEIFELSYFNNLFLQSELDKYNGIISGEKKKENKGENANSGINEEINLYRQKKSKDKHSFKSSDFPFFKELYKQIGSIKNKMESNFIEINSDDTLIEELKKFPNYTRNYIMEIKKFYENFFENLFNKNYESINKIYIPKKTGTELSNLIFNDWEKIENLYRKGRKDKEGNEVKEKKISLADLKEKMDDLKNFDFKQLYKDKLKIGSTDKIFLDFIKVWQFEINSLFEGFEYNNDEKEKIKKDTLKILEEQYIKSVKSYEKKISEKKPLNDKEKREIIKDIKDYLDRILDIDKTIKYFDLGKDEYKNIDEFDKEPLFYDEFDKIKTKQNKYRIYTYYDEFRNYITKRNINTDKFKLNFDDGQLLSGFDLNKEMEKFGVMFRDNDRYYLGIINKNKDKKILDKKSHPEIFIDNSNFQKMEYKFLGDTKRQLPRIFFTKNENKEHIIPIFLNGKERDEMSKIKKEYNEFQDDKKENKDKWKDEFDREKLNKLISYYQKGLEIHQENYKKTYNLKWKKPSEYKNLGEFNDDIAKQTYKVKFVGINKDYIDEKVKNSELYLFQINNKDFSKKKGKNSTDNLETIYFKELFSKENLKDPIFKMSGGAEIFFRDKIEKHKEETKKDNKGKVVIAAKRYTKNIILFHLPIVINYDIKNVKKFNNVVNDFIVKNSKKINIIGIDRGEKHLLYYSLINADGKIEKIKSLNAVSENGDFIDPDILEEFEENEKIKWRYKNQKGKYEKVTDYQKKLAKIEENKQEQRKNWQTIEGIKNMKKGYLSLVVKKIADMAIENNAIVILEDLNNKFKTGRQKIERNVYQQFEKALIDKLNFVVDKKKQNQRNAPQLSAPFKSFKEIGKQTGIIFYVGASYTSKICPQCNWQRNIYVHYNGILKTKESYTKYNLNIFYEEDKNRFKFKYIGNDKEKSVVYSDIDRFFWDKKANKGRGEVVEYSDKYKISDGIKNFVKQKGSITENLKNIFDKQFTAIDKENCEGFNLDLKNSKNIDIFKKIKNDYLAKGKNNSERWKSLVFFFNKILEIRNSINDKNRSEDNIICPSCYFDSRKSNVVKNGDANGAYNIAKKGLMIINQIKKKNPNPNLYFKNEEYKKFIKNKKVNI

SEQ ID NO: 1242 - protein, 1360 aa, unidentified
  REGION 1..1360: note = Cas Enzyme sequence
MATRIYQGRIVQARFEDENLPQDKESALAALERTNRLFQDAVNYHLVALAGMAEDGKETLGSRFKKQVRAIWEDLPRSKVGACTLQRSIARTLSLADGVTFDDAVAHIYEGCDRLDVLPYVEHYVIEQTQKGEGAIQQQGRELLPKLCNSDFEGNFDYSIKERKANSGKQKLLRELNRDDVSDEELYALAQEMDLSWVVKTIPNENHDEPLYYDPEEQEEKVITSIHKLLSSLDNGNLKIATLPKYVQIDGFREQMRQDLLNRMPLKGLRLAKSSRGISVDVEQAGIYFMFYPGRISAAHLASKLGKEKPKKTDEVREYDCFSLENDPLILARGKRGYVYKGFSALPNWESSDNRMYSKEWDILAFKEALKTLHGFELKTKERDAERAKYVAQLEYVERGKKTKDYVEPDEEKTVAVLGGDYRFELLKKLVAEISPDPVTEYHISSRTLNDYEEVRALWLKRELTGDCSSHDLSKIVREYQAKSKRFGSQVLFAALCQDEYRPIWHDYHALKDEKLPRSKNILRDFSNWQYLCGQVEKYSRDVRVTAADVVASPRQMIYSDLSNFGNGKGCEYIPGCEGGLRMQVVVRNAKGHWETDSIRVTFSAPRFLRDEMGQDAGKWMVPKKGENTTLPWLQPMMKALGDDIAPVRLERTPAIGLQVWGQGSEACYYLNFPVSLDVSALQKSLGKAARWAGQFLGGRDEKLHLHWPATYKGKNRPWWEQEKEFTVLGIDLGLRSSVAWSLLRVSTCSTSSNSRGDELIGRLIGDSSNAKWYGYVIKQGLSRLPGEQPRRVGDKKIPAVSLASPEDRRIAKLIIEAAGAQFDENESEDVLRLGNRTLKSFKSLTSRLKTYLSFLSGLKDPGRKPAVLKRMADYFAYAEIIPGVCVLLEAHQEDEVYERVLDAAEELRSMLPKYAERVTSLILPRKHGSWKWEPERRKGWQGSGVMRLTEEDGIPHRPVFHRGGLSVARLTQLETLRQLLQSMGKVLSFVPGESVTFGRRLKDEKVIDPCPEILEKIENMREQRVNLIAHDIVAQALGVRLKSSRPHKNSGGLDVIHGEYERIHGREPVDFVVMENLSRYLTSLDRAPLENSGLMRWAHRQIVAKVTQLLEEIFGIPVVFTHAHYTSKFDSMTSEPGFRPVMLKPEYLKWLQRNGKGNECKAAAVYQAIWDEVVNASKTKKVTLVLPHLTKGGELANGGELFLSQKGGKFTLRNADMNAATNVAWRGLAAPESLHLLHRVRMEMKKAGFVPVCDNAREKSLKTGWSLTKLKSIQPEGNKISAFAVSSEWKDEYFAAYGNAETRAYLAYGKTLWGIMKRKQWQMCHLFNIQQLKNAGIDARLVEQLLHTDENDTSDDIPT

SEQ ID NO: 1243 - protein, 1361 aa, unidentified
  REGION 1..1361: note = Cas Enzyme sequence
MNRIYQGRVSSVQIANPTPKTEPLWLAAPSGDELLWQHHTLFHDAVNYYLVALLSLAAPTNKFLGQLRQRIATPGDAYQIWAPFRRRGAQRRGLRDSVAPYLTAGNPTPTLDEAFAAVLSGNETDVAVRDAAVNGLLEVCDGAGAIQQQGRAYWPKFCDPKTTANFAGDPAMLRRQRHQQLLPRVLHDSDTRYDSSALNEFDAYSIATPDAKRPQLVGAKARERLQQAVAHWRERRPESVIEFDRLATLIDQLPAEFVLPGYVGSAAKGDVKTRLFALLLFRHVERSEFTFELLRSATPPPRTTDVVVDAAPAEPASKSADPIRTARGARGYVFRSFTSLIAWNPPDTATPQWKEFDIAAFKYALTALNQIEEKTKERLTEADTLRGRLAYMHGESRKFVPPPGAAENEEVPPVLTGDPRITRLRELLASDALCTANALTDGVATDYGLHPRTIRGFRDLRKLWRHRLAAGESHSVKQEARLREDLQEFQADHSDTVGSVTLFETLLAPENWLIWQEPSPDIAAAWTAAGYADEPLSALVEERELLEEIESLKEPVKLTPADPVHSRRQYDFNAVSGFGSGPRTTCRHETGACAFTTEIARLEAGVWRADRVRISYSAPRFLRDGLRAADGTSDLAAARWIQPMMEALSATPTLPQDLTDCPVCLMPDFKTSGERRVLLNFPVTLDPVALVKQLGRAGTWDGQFCGTKETPFALRWPADGWPAEKEPAAWYHRLTRFTTLGVDLGTRDAGALAHLTVTADTAEKTEHRLLGEAGGHHWFAQLTGTQLIRLPGEDAKIFIPGRPKAVTEPYGERGRGASPAETEEAITICLSLGESPDKLLVPSPAYLSFPQQNDKLLVALRRAQARLARLQSWSWRLRQDAEREKATAEIALAHTEHANRTAPEILAAIDSSLLAQRELVSRSLVTLANRILPLRGRRWVWVLRDDGSRAHVLRQTDPGSDTTPRQIAGQRGLSHERMEQIEELRRRCQSLSRALAHAPGEKIRIGRSTLGDELPDPCPDLLEKIDHLREQRVDQTAHAILAAALGVRLRSPAKEVGVRRACDIHGEYERFRDPVNFIVIEDLSRYLSSQDRARRENTRLMQWCHRQLVTKLRQLCETYGLPVLATPAAYSSRFCSRTGNAGFRAVELTPAHRNEAPWRWTLARLAAHEADEKKLDAAARTEAERVRAVFDQLDLLNTGRVAAKKPLRTLLAPSPGGPIFIPIGEAPAMQADLNAAINIALRGLAAPAQHDIHHRIRTERSGKTLRLRTSSKREKARWPDSPLVLSLPADSAKTERTPNLFADLANVSFKDERATLTGIATPFATGRGLWAAIKQRAWDRCAGLNDRRINKWRDSKDDIPM

SEQ ID NO: 1244 - protein, 1362 aa, unidentified
  REGION 1..1362: note = Cas Enzyme sequence
LFDNFTQQYSLSKTLRFELRPVGKTLENMHAQLEYNKDLQTFLKDQEIEDAYQKLKPLFDELHEEFITDSLDSVQAKQIDFSEYLALYEVKKELQTVEKKLREKIGETFVVTGKTWRQEKYTKYGWKKGSKVANGADILLTKDMLELIKDKYPNDEEIKTMIDDTFKGFFTYFTGFNQNRENYYTTKEEKATAVATRIVHENLPKFCDNILFFKDRQEEYLKAYSYLEERGSDLTDKGNNLLFPITSAIFTIEHFSQCLSQKQIEIYNSQIGNANLLVNLYNQAENSGQGFKRLPLFKTLYKQIGCGKSKSLFFKLTCYTKAEAIKARNDNKEAMSVEEILHLAKQVGEKFFRYGNDDGVVNTVPKFLKYIKNKENYNGVYWSKAALNTISNKYFANYYDLKDRMKKANVFQKVTKSSEEDVKIPEAIELEDFFGVFDQTPNWKEEGIFFKKNLTEKLQDEVGNKINEKRLGIIKEAQKPSQALLGLIFADVDKYIEQFLISSEKIVNLQEYKSNGSKEAIKAWMDYALTINQMLKYFLVKENKIKNNPIDSVISNALKNILFEGIVDIDGKEVTVKWFSWYDALRNYLTKKPQDDVKENKLKLNFENSTLAGGWDINKEPDNYCVILQDQEGRQYLAVIAKQQNQRGYNKIFENALNNPLYQVGDYEVLQKMEYKQIAAPTGIGGFVRKCFNTAQQYGWICPDNCLNDERKVIIKNDEAKTNLKVLIDCYKDFFNKYEKDGFKYKDFNFVFKESDKYQELNNFFSDVEKQGYKLNFVNINKDIVDQWVNEGRIYLFEIKNQDSNNGKKKGHKNNLHTIYWNALFENIENKPKLNGGAELFYRKAILKEDQEKIKDKHGNEVIKNPRFSREKFLFHCPITLNYKAKRYKEPKYALPEINNQINEVLTTSSHIYFLGIDRGEKHLAYYSLIDQNEIIKKQGTLNLAFTDKEGKLRSIKKEKYFYNKQKDTWEPKDVDCWNYNDLLEAMASNRDMARKNWQTIGTIKELKEGYISQIIRKIADIAIEHDALIVLEDLNTGFKRGRQKIEKSVYQKFELALAKKLNFLIDKSAKTGEIGSVTNALQLTPPVNNYGDIENRKQVGIMLYTRANYTSQTDPATGWRKSIYLQKSSEENIKKQILDSFSDIRFDGQDYFFTYTDGNINRVWKMFSGINGVSLDRYRSKLDKNEWVVEKQDIVKILKGVFANFDEEKSLLAQIKEGVELTKINNDTAWESLRLAIDLIQQIRNTGSTKRDNDFLLSSVRKQGKHFDSREYWDVEQSVGQVLMPSSGDSNGAYNIARKGMMMNEHIRIWIKNGKPKYDKNTSDLNLFISDKEWDLYLKSKKEWKDSLPVFSSRKIMEIGK

SEQ ID NO: 1245 - protein, 1362 aa, unidentified
  REGION 1..1362: note = Cas Enzyme sequence
MFENFTNLYSLSKTLRFELKPVGRTRINIEKANPKFIHDQEIENAYQVLKPVFDKLHEEFITKSLESAGAKKLDVKRYFELYQKMRAEQDREKKRVIEKDIEKGEVELRKFFGDIYEESGEQFKVDAIDQNAKNILDYKLANAVNAKEKKKIEKGIKKLVFLEEKSYKVLTEAGILKYIKARIDAFVAMNLKTRDGKLVGKVDLEKALVKNGEENKGVFEGFFTYLSGFNENRENYYSIDEKSTAVANRVVGENLPKFCDNVIEFEKKKTEYLGVYKFLEGKGIELKGKSQDGQDIDLEPIMEDIYKIDHFVNCLSQPEIEKYNLQVGNANNLINRYNQQQADKKDKLRIFKTLYKQIGCGDKGEFIQTIKSDDELKEILKDVGVKGDKYFGDFDKGIVGKVDTIGEFFTWMKENAWNEGVFWSDKALNIISGKHFANWFVLKKALKDGGVFHGKKKDDEDIKIPQAVELKKLFEILDRTQSWQDKGALFKESLFEGENHKKKIIEKAMKPSEALLKMILADVKNMAKDFSSLKEVVLKITDFKDQENVQKIKQFLDSLLYVNQMVKYWKVKENKFSVDPALAEALKMILFGEENPTKNYDIIRNYLTRKPQEELRKLKLNFDNSVLAGGWDVNKEPERWCILLKDSDDNKYLAILTDKTKSFFKKENDNPVYQVNKSSWKKMDYKLVPGPNKMLPKVLLPKSDRNKFGATAEILKIYDEGGFKKDSVTKQVNKEKLGIVISFFKEGLKIYPNLENSWQKTFGFNFSDTSKYESIDQFYNEVEKQGYKISWSNINKNLLDEKVESGEIYLFEIRNKDNNLRDGKVKASGKNLHTIYWNAVFGNIENKPKLNGEAEIFYRPAVKDLIKDKDENGKTIGASKKRFEEEKFVFHCPITLNFCLKSSNLNDEINKAMGKTKVCFIGIDRGEKHLAYYSVIDEKGNILEQGTLNIAFDKPIKAEKWFEDKTKPENAENRWIKKIVDCYDYNDLLDARASNRDRARKNWQTIGTIKELKDGYISQVVHRIVDLAVKHNAYIVLENLNTGFKRGRQKIEKSVYQKLELALAKKLNFLVDKKAKDGDVKSVQKALQLTPPVANFSDIEKASQFGIMLYVRANYTSQTDPVTGWRKTIYLNKGSEENIKQQICECFDDFGFDGKDYYFTYTTKYEKTKEKGKQGGKTGFETGKTWTLYSGKNGKDIDRYWNKKSAEENNRFVPEKQKIKEVFDELFKNFDKEKSLRDQILDNGIELTKVDDRPAWETLRWTIELIQKIRNTGLDEKDDDFILSPVRDENGDHFDSRVRGAIVSSGDANGAYNIARKGVMVFGKIQDALKNAKIGKVGKEKIDYDLYIEDKEWDKWLAGIKE

SEQ ID NO: 1246 - protein, 1362 aa, unidentified
  REGION 1..1362: note = Cas Enzyme sequence
MSIAVNTTQRAYTMRLKGLEGDKDWRRNLWHTHNLANRGAQAFGDWLLTMRGGLPHELAQADTAEETKNRRIVLAMSWLSVESLLGSPAKQHIETAPNQKGKKQNTAVLDALQKILEKRGLDPTETNSWLNDCRDSLSAAIRDDAVWVNRSDCFDDFCNQTGAGINRDAAQHNIFLFIDEKKFFFLKSGDSEESAPKADSLNLGQTARKWLSSNWGSGEKNNPLIIQKHLFMITKSDLMALKGKSGEDFRSLLAQTLKLSEDQNDWKTIKRSIGWMSGSPSSAARILEEAAQAKTLNEELFEKVLERCSKEADSIKVPDKDITNWNQKIRSLLETKIGSPYRSPKDRIDEFSVLLDHGARHVSVAHSWVLLQEGERIQFREDAAKIHLVPVAAKEYLDRYCAEQEVLTHAVMRYVIRQRAISGWDKLVSVWASLADGSEEERIQAARELQAEDTEGGKFGDINLFEQMAAEEALCVWRRENGKADDTILRDYVRAQWAETQMQRFKVPMYRHPHPLLHPVFCDFGKSRFKITYAAQKPKDNVPPKSMVICVYTGAGFNEQTLLWQSSRLEKDIISGQPSKDEDTDTPAEVTRADRLGRAAANISSQEKTAVLSVFDSKDWNGRLQAPRKELERTWRQMNQAGLSAAEKEAILLEHIGHMNWFITFSPQLQPKGPWLDYAVAHQLKPHSKTPFAWRQSFEPKNRGSLAKSNYCRLPDFRILSVDLGHRHAASCAVLETFSSSQLHDLCKQTNSEPPSAEAMYFSLPDLEVPTRKQWFRRIAGDQLADKSPHPACWACIERQFTIKLSGEDGSVRGVRSRELVEAAAFCEDLGLVNIELPKTSVDKLMDFCLRQFRLSLSRHSDLARISFAFGADYSYGVGGVKIQLTPENQLFERTKALQWWYQLATGKNAVSESCRRLWQNFIAEGDTVTELPAAVADGSRERRSKKQQREQFSRLMERAKRISQDRCLAISREFHVLWSDEDALLQKRLRWLRNWFMPSQGHWKEISGTGGLSLDRIGRLQALYRVNKAFFMRLKPSGRQMLSSAESEGEEIPLTASDRFGRRMLDQFEKLRENRTRQLVSRIIAAALGLDKKLQKQFEACHAVVIENLEHYRPDEMRTRRENRQLMQWASGKVKKQLEDACHLYGLLLGEVSANYTSRQDSRTGMAGIRCVDISAEVFFREEGYYQREINKALERREKNTATPADWLLLDIQQQGEEAFSRKAIRLPRPGGDLFVSSSPDSPAARGLQADLNAAVNIGLRALTDPDWSGRWWFVPINNSTKKPEGQSMKGSPVIDSTSPFTAITGTAGKNTTVNIWRDLSAESPADSHWMHTTDYWLETTRRVIQILRRWNGLSDEEIPY

SEQ ID NO: 1247 - protein, 1363 aa, unidentified
  REGION 1..1363: note = Cas Enzyme sequence
MPFTAETKRAYTLRLNGVNKKDNVWKEELWKTHETVNEGSRIFGDLWLTLRGGLSAKLAETKEDSSTRRILLALSWLTVEAPADLIPPEYIIATSKQPRDEREVALVKVLKSILKSQGVKNISDWENDCKASLASDIKEDAVWVNRAQIFADKKKSVGWNSNEAESFVFDMFGGQEAYFSLGGKEDKEADSKDFCQKAGNWLSTNWGSGVKSDKSLIIEKLSLITSLDLLSLKKKNSSAILVKIIKALEENYKPLDEEYKEGEDPKDTFSKISRIIGWKGSPSAGFRILEKMTKDAPVSVEMVEDLLIRIKKEIEDKQKKLGKPKIKWANKIKAEFESNVHFAFRGERDHQKEFSVLMDHALRRVSGCHSWVKIAEVSRRDFDADANKISDKLISDWLDEYTDQRSSDSGSLEGYFVRKNAIDGWDDVVKAWSELGKISTPEQRVYAVRALQGELEKFGDAQLFEELAKEKPELIWYRSGKANPDLFKQEVSKRIALHNKTRFKVPAYRHPDPLLHPVFCDFGNSRWAIAYGAQDKVSSLNERDVFLTLWNGKEMTKTTLRWQSKRFFQEIVSCSKNQKGTPVSRNNPQALAASGVQGNSSIIINDLFDRKDWSGRLQADRAQLEKAVTLRKKGGTKFKKFIKEIRWFLTFSVPLKPSGPWIEYASQSSYLHQNRSDGKANKPLVNLGPKNERDEIRGLAYPLDHPEQTNLRKGMARMHLSRLEGLRTLSVDLGHRHAVATAVWLTLSIKSAINKFPWIDKAEFSSSKLFLQMEKDGKRFVFRRIGANKLPDGSIHPAPWAYLERQFFINLAGENSESRFATDTDRLGVKKFETWLGYYTSEPRNSKRWKMDELFAELVKIARFGLARHAKRARISEGLVAKVKIISGDRTIPLDAVSRKEHITNLLEEYHLLVTSPNWKDDEGLKGWSQLTKGILAEEELKISTQDSAPKKKLDKTLKEKIIRVSEKLIQDSSLCKKLSNTLKIRWEKDDDKWPEFIKWLSRSLMPRSVKDLKSIRQKGGLSLLRVTTIEDFRRKVQLAYFTRKKPDGQRATVGLDFASKALKVIEKLRENRVRQIASFITSSALGISMTNNLVRYEPCQAVVIEDLTNYRPEVTQTRRENRQLMQWSSGKIKKLLAEACQLSGLHLRQVSPKYTSRQDSRTGSPGIRCVEVSVEKLISAKRWQIAEQKAMEKRAAGKAMASDFYFLSLLDRVRNKKLSGTVLIPQRGGEIFVSSNDNGPIALQADLNAAANIGLVALLDPDWSGRWWYVLASKKDHVVDVTGSSYFENSPKLSVLNDEKVESDHIKKSSDSGKSYHFRDLMLGKPNAGEWFDSFPKYEASFTLRAISRLEQKYGIQEETPF

SEQ ID NO: 1248 - protein, 1363 aa, unidentified
  REGION 1..1363: note = Cas Enzyme sequence
VSAYLDSDCDIINKTYQFSETISLIKESANMREKNSGLEQFTNLYSLSKTLRFELIPVEGTAEAIQQNGILAEDKKLADSYQKIKPTLDAFHRAFIDRCLSDVKLENLDRYYDLYHVGDEEKRTKKYQDEFKSVKNALRKEVVSYFKKDKRYPKGLFGKELLKTHLPKWIEETGGDWYQDESFVNFTTYFSGYNENRENMYKDKEQSTSIAYRMIDENLPKFVYNIRLFNRLSDTDISGLFSVISEELAPFIFTSSLEEMFELSTFNKLMTQGHIDALNTIIGGYKEGEKVVKGLNGYINEYNQTHPKNRLPMMQMLYKQILSESNSASWLPDAFDSAAELFSGMNNFCDCGLRMNENPSLLEEMKRVLQEIKACDAAGIYIRNDSSINTISNAIFGHYGVIRNALEMYYECQVFPEYRKRLINAKSAKSAEKIKKAKETYVNGTGYFPVREIQDALELYIDTAEFGSNPEIKNRYFKDCISVYLAEGAATYVSRIKEAYSNVSGMIKASYTSDYRLNEDDKDGLKHFLDAVLSLLHYCKPLYVKAEAGIKVDEVFYGQFNPLYEQLQTVNVVYDKVRNYATQKPYSEEKIKLNFGIKGNFLSGWVESKTDASDNGTQYGGYLFRKRNCIGEYDYYLGISSNSKLFRYFNSISKEGASGYERLNYYQPKEQSVYGSAYKGRHPYADDKVLLMSTILDFMKKTKDTEFYEGLLAYSQTDLATPSGCLSRIKEFSTELYENLLRDEKFKDANEEVMQALKATICSMGRLKGAEAVTERQYGVFTEMMNDISTLMSNNVYQYSAVSETELREALQDKKKPLYLFRITNKDLAYAERLEQGKDRKHRGRDNLHTMYFKALMSGEQNVYDIGSGTVFYRPASIARKVTHPAGIPINSKNPNLKDHKNIFEYDLIKDRRFTEDKFQFHLSIIQNYSASGIKSSDYNEKVCQYLRNNPNVNILGIDRGERNLLYISMIDRNGNIVRDENGQLIQYSLNNLTGEYTNASGEIVKFTTPYHTLLDKREKDNADNQRSWGTIGKIKELKAGYMSQVISHITRLMVKYNAIIVMEDLNSRFINSRRKVDKQVYQNFERALIEKLNYLVFKDIPAEESGGLYNALQLADRFTSFRDLQKQSGFIFYIPAWNTSRIDPVTGFVNLLKPKSDNLKQARDFFGKFESICFNSESDWFEFVFDYSNFLSGADYLKSRWTVCTHGDCRYIYDKKMKNNKGGYKKINVTKTIKELFNEYGIDYAEGNDLKEQIVSQNRTAFFLKLIECLKVTLAMRYSNGDGGRDFILSPVADENGHFFNSEEAAANRDDLPWDADANGAYNIARKGLLVLRNIDKSDSLNNWTTKISNREWLEFAQSFNQ

SEQ ID NO: 1249 - protein, 1363 aa, unidentified
  REGION 1..1363: note = Cas Enzyme sequence
MKVKNKKGEELAPSPEEKKDRRIMLALSWLSVESETGAPSKYFVQNDLDTKNGKRNNWKTVDALKEILKVRGVSETDSDQWLTDCAASLSAAIRDDAVWVNRSKAFGGLINSKSFTQDDIWDFLSTFFSGPEAYLKPIKGKSTDGGEDNDETEGLTDKDEKIKDLVQKAGGWLSSRCGTGKGADFSKMHDVYEGIAKWAETATGKQDAIADLAVALSKFDPVSNDLQGVLGIISGPGYKSGTRTFLNKINDQDSISRTDLDALKKKAEDDAKKCNSKTGTKGSRDYSDKILGDVASSCGFTYLQNDGPARHAEYSVMLDHAARRVSLVHTWIKRAEAERRKFEEDAREINNISKEAKERLDRFCKERSSELGALEGYRIRRRAVDGWKEVVKAWSKADCKTEDDRLASARTLQDNPEIDKFGDIQLFEALASDDAKCVWQINGKSDPQPLLDYVAAKDAEDKKQRFKVPAYCHPDTLLHPVFCDFGNSRWDIIFNVHEAKKNKDKKRNNATEDTDIHNLKMGLWTGTTVEEISLRWQSKRLFHDLALTRKDSHEDSITDVSRADRLGRAAGKAKTGAVAIKSVFDQKEWNGRLQAPRSQLDAIAKVRDNISFSIEVKKRRIDKLVSNIKWFITFSPKLQPQGPWFDYIDKTTDKSPFERIYKSGAKKGQSYVSFTGWPHEMENNDRSGMAKHLLSRLPGLRVLSVDLGHRHAAACAVWEMLTKEQIEAACNAANVQAPGEADLYLHHKNNNRTTIYRRIGSDYIEEADKSTGEIKNVPNLTSWARLDRQFLIKLQGEESNARKATSDEIKAIRKLESELGYIRQDEYSLQVDELMSFAVNIVRLALRRHGDKARVAHCLITNEKTKPGGLKEKLDRNGRVEVITDALELWHGLAASKRWQDTEAENLWRENFPEVPITKKDDEEKTRQQIKKEKKVFRENTLKPMAEKLYQNNMKLHVVWVTRWREDDANWQKRLRWLRDWILPRGSRANDKTIRHVGGLSLTRIATIKSLNQVQKAFFARLKPDGTHETAKEGFGQSVLDTLENMREQRVKQLASRIAEAALGIGRIKISKKGKTPKRPCEQVDDSCHAVVIENLTHYRPEETRTRRENRQLMQWSSAKVKKYLSEACQLHGLHLREVSAGYTSRQDSRTGAPGIRCEDVPVDEFIKSPFWIKEIKRAENKDDAQSKYFSDLKEKYATLKEDERKKAHPLRIPLRGGEIFVSADSRSPASKGIQADLNAAANIGLKALLDPDWQGRWWYVPCDSKEYKPIKDKVSGSKAFDNVEALKKTTTGEKGGNSSEKKKRKRVARTEKSKEVVNLWRDVSSEPLTKGDWQEYSAYKNKVQYNVIRYLRRQAGLPESHD

SEQ ID NO: 1250 - protein, 1364 aa, unidentified
  REGION 1..1364: note = Cas Enzyme sequence
MNRIYQGRVTKVEVPDGKDEKGNIKWKKLENWSDILWQHHMLFQDAVNYYTLALAAISGSAVGSDEKSIILREWAVQVQNIWEKAKKKATVFEGPQKRLTSILGLEQNASFDIAAKHILRTSEAKPEQRASALIRLLEEIDKKNHNVVCGERLPFFCPRNIQSKRSPTSKAVSSVQEQKRQEEVRRFHNMQPEEVVKNAVTLDISLFKSSPKIVFLEDPKKARAELLKQFDNACKKHKELVGIKKAFTESIDKHGSSLKVPAPGSKPSGLYPSAIVFKYFPVDITKTVFLKATEKLAMGKDREVTNDPIADARVNDKPHFDYFTNIALIREKEKNRAAWFEFDLAAFIEAIMSPHRFYQDTQKRKEAARKLEEKIKAIEGKGGQFKESDSEDDDVDSLPGFEGDTRIDLLRKLVTDTLGWLGESETPDNNEGKKTEYSISERTLRIFPDIQKQWSELAEKGETTEGKLLEVLKHEQTEHQSDFGSATLYQHLAKPEFHPIWLKSGTEEWHAENPLKAWLNYKELQYELTDKKRPIHFTPAHPVYSPRYFDFPKKSETEEKEVSKNTHSLTTSLASEHIKNSLQFTAGLIRKTNVGKKAIKARFSYSAPRLRRDCLRSENNENLYKAPWLQPMMRALGIDEEKADRQNFANTRITLMAKGLDDIQLGFPVEANSQELQKEVSNGISWKGQFNWGGIASLSALRWPHEKKPKNPPEQPWWGIDSFSCLAVDLGQRYAGAFARLDVSTIEKKGKSRFIGEACDKKWYAKVSRMGLLRLPGEDVKVWRDASKIDKENGFAFRKELFGEKGRSATPLEAEETAELIKLFGANEKDVMPDNWSKELSFPEQNDKLLIVARRAQAAVSRLHRWAWFFDEAKRSDDAIREILESDDTDLKQKVNKNEIEKVKETIISLLKVKQELLPTLLTRLANRVLPLRGRSWEWKKHHQKNDGFILDQTGKAMPNVLIRGQRGLSMDRIEQITELRKRFQALNQSLRRQIGKKAPAKRDDSIPDCCPDLLEKLDHMKEQRVNQTAHMILAEALGLKLAEPPKDKKELNETCDMHGAYAKVDNPVSFIVIEDLSRYRSSQGRSPRENSRLMKWCHRAVRDKLKEMCEVFFPLCERRKAGSAWVSLPPLLETPAAYSSRFCSRSGVAGFRAVEVIPGFELKYPWSWLKDKKDKAGNLAKEALNIRTVSEQLKAFNQDKPEKPRTLLVPIAGGPIFVPISEVGLSSFGLKPQVVQADINAAINLGLRAISDPRIWEIHPRLRTEKRDGRLFAREKRKYGEEKVEVQPSKNEKAKKVKDDRKPNYFADFSGKVDWGFGNIKNESGLTLVSGKALWWTINQLQWERCFDINKRHIEDWSNKQKQ

SEQ ID NO: 1251 - protein, 1364 aa, unidentified
  REGION 1..1364: note = Cas Enzyme sequence
MKQFTDLYQVSKTLRFELQPIGKTAETFKQWLEDLKSTEAVVDNNNLFAKDQGIKDAYSIIKPIMDKLHEQFIEMSLLSEVAKEIDFSQYFEAYQERNVSERLEAELREQIGKTYIVAGHFFTKEISDAIGKDFKIKKDKPYECLTDAKMTYYLSAKSQELAKQNDIDEKKLAMHIEQFKGFWGYLTGFNQNRENYYEVKKETSTAVATRIVHENLPTFCDNILRFEKRKEEYLNIFQFLKDNERETKIKNAQGEEVEIEPIAETFFQIEYFNKCLSQSQIEEYNRIICNFNYLVNLYNQARRGEDGFKKIDEFETLYKQIGCGKKKTYFETLQDISELKNLLQKARIAGDSMFNKESSKTEINTVPEFIKFLQECDNWQGIYMSSAAINKISNLYFANWHSIKDKLKEAKANACITYDKKREEPIKLRDAVELSELFDVLNTEQSEHFFKDSLFKNDETNEYRGVLDKALKPSQNLIKLLCHDIKRNIEAFLEDSDKIVALEKFKDESNPSGEEDKAIKRIKDWLDAAIGAMRIVRYFAVRKSKMKGSIPNVTMEQALGNLLYCEEAPWFKWYDLVRNYLTKKPQDDAKENKMKLNFGTSSLLGGWSDGQEMNKAATLLKYEDEMYLCILKTKNVFDTSKKDNPIYNVASSNASRLILRNLKFQTLAGKGFLGEYKVSYGEMGQSDPVKAIQCLQKIIEDRYVKKYPLLEKFVVNRYDDKSQFDKEIKEALNECYVCEFVPIDWNLVTEKQNNTELFLFKIHSKDYKSNATGKRDLQTMYWEDVLSDGSKHQLCAGAEIFMRKPVAKESPVRHRVGSKIVNKRDKDGNTIPEQIYREIYAYANGKTKDISTEAQKYINEKRAIIKDVKHDIDKDKRFYGETKFMFHCPIKLHFEAKDPKYAFAEVNAKITESLHQSNNLNYIGIDRGEKHLVYSCTIDQDGKILKCNHHDNINGTDYVQKLEAVADERIIAKKNWQAQNRIKDLKNGYISHVVHRLVEETIKDGGIISPHAYIVLEDLNTEMKRGRQKIEKQVYQNLELALAKKFNFVVDKNAEPGGLGSVSQALQLTPPVSNYQDIEGKKQFGVMLYTRANYTSITDPATGWRKTIYIKNGKEEDIRNEILDKFRDFGFDGKDYFFEYVEVHAGHTWRMYSGKDGKPLPRFQNNKQMIDDKNVWVPEQINVVDILDLLFAKFDKSKSFKKQIDQGVELTKIDGRSETAWQSLRYALNMIQQIRNSGLKNEDDNFLFSPVRNNKGEHFDTRNHQNNGELSLIVDADANGAFNIARKGLIMDAHIKHWIEIGRPMKSARRDERTSDLDLFISDKEWDLWLLNREAWEKELPLFSSRAAKEDFSKPKTGKSRKKK

SEQ ID NO: 1252 - protein, 1364 aa, unidentified
  REGION 1..1364: note = Cas Enzyme sequence
  VARIANT 1225..1228: note = X can be any amino acid
MATRIYQGRIVQARFEDENLPQDKESALAALERTNRLFQDAVNYHLVALAGMAEDGKETLGSRFKKQVRAIWEDLPRSKVGACTLQRSIARTLSLADGVTFDDAVAHIYEGCDRLDVLPYVEHYVIEQTQKGEGAIQQQGRELLPKLCNSDFEGNFDYSIKERKANSGKQKLLRELNRDDVSDEELYALAQEMDLSWVVKTIPNENHDEPLYYDPEEQEEKVITSIHKLLSSLDNGNLKIATLPKYVQIDGFREQMRQDLLNRMPLKGLRLAKSSRGISVDVEQAGIYFMFYPGRISAAHLASKLGKEKPKKTDEVREYDCFSLENDPLILARGKRGYVYKGFSALPNWESSDNRMYSKEWDILAFKEALKTLHGFELKTKERDAERAKYVAQLEYVERGKKTKDYVEPDEEKTVAVLGGDYRFELLKKLVAEISPDPVTEYHISSRTLNDYEEVRALWLKRELTGDCSSHDLSKIVREYQAKSKRFGSQVLFAALCQDEYRPIWHDYHALKDEKLPRSKNILRDFSNWQYLCGQVEKYSRDVRVTAADVVASPRQMIYSDLSNFGNGKGCEYIPGCEGGLRMQVVVRNAKGHWETDSIRVTFSAPRFLRDEMGQDAGKWMVPKKGENTTLPWLQPMMKALGDDIAPVRLERTPAIGLQVWGQGSEACYYLNFPVSLDVSALQKSLGKAARWAGQFLGGRDEKLHLHWPATYKGKNRPWWEQEKEFTVLGIDLGLRSSVAWSLLRVSTCSTSSNSRGDELIGRLIGDSSNAKWYGYVIKQGLSRLPGEQPRRVGDKKIPAVSLASPEDRRIAKLIIEAAGAQFDENESEDVLRLGNRTLKSFKSLTSRLKTYLSFLSGLKDPGRKPAVLKRMADYFAYAEIIPGVCVLLEAHQEDEVYERVLDAAEELRSMLPKYAERVTSLILPRKHGSWKWEPERRKGWQGSGVMRLTEEDGIPHRPVFHRGGLSVARLTQLETLRQLLQSMGKVLSFVPGESVTFGRRLKDEKVIDPCPEILEKIENMREQRVNLIAHDIVAQALGVRLKSSRPHKNSGGLDVIHGEYERIHGREPVDFVVMENLSRYLTSLDRAPLENSGLMRWAHRQIVAKVTQLLEEIFGIPVVFTHAHYTSKFDSMTSEPGFRPVMLKPEYLKWLQRNGKGNECKAAAVYQAIWDEVVNASKTKKVTLVLPHLTKGGELANGGELFLSQKGGKFTLRNADMNAATNVXXXXAWRGLAAPESLHLLHRVRMEMKKAGFVPVCDNAREKSLKTGWSLTKLKSIQPEGNKISAFAVSSEWKDEYFAAYGNAETRAYLAYGKTLWGIMKRKQWQMCHLFNIQQLKNAGIDARLVEQLLHTDENDTSDDIPT

SEQ ID NO: 1253 - protein, 1365 aa, unidentified
  REGION 1..1365: note = Cas Enzyme sequence
MNRIYQGRVSKVELLPQNGLAPAPAPLEILGDHHQLFQDAINYYLVALAAMASDDESPLGQMRVRMADAWAPFSRNGILLDGLRASLLRAKVPGISPESSFEEGLIAVLAGNSVEASVLRLAAELLLSKVGGEAAIQQGGRGYWPRFCNPKANPTWDYSPDGLRSRAGKDKLAALIHSELTDIERNELAEELNLSWTVKLQPGNAYEGEKARARLKEAVSFFEKALANPDRRLAGLLAMHPDVAKHISALRPSIDALEKPIVPANRKAAPALVFATLLFKFFPSIETQSLLALHVAKPTANNKPETADRFASLGDDPIRIARGKRGYVFPAFTSLSIFGATGPDDIRWGEFDIAAFKEALKTVNQFRLKTEERREKRLKYEAAIAYMEGLHAKWEDPEGAEESEPPHRINGDPRIAGVKKLLEEQVKDLELTDADAPSITLSRRRLRGWTKLTEKFHQIVEPGEPFSTEKARKLKGALAKFQTEHRDEMGDARLFEALVTNRDYWCLWQRPTEAQRAERAAHDWSDNILATYRDYLGFDEEAKRLREPIRFTPADARESRRLFMFSDLSGRSKIKHRKDSLTVEVSVAVKTVGGIWQETRALLHYSAPRLRRDRLRGVEGADNLTEAPWIQPMMEALGLPEECTQDIADHAVALMPEPGKNGLRYLLNFPINVEPEKLMVLLGKQDLWRGQFNGTRDKSIHLHWPSTMDAKYHEKAWWRREKPFTCLAADLGTRACAAIALMEFLPGEPVGQERLIGYAEGKPWKARLLDNGRELLRLPGEDMKILEAGIWKEEPYGSKGRLPDPEETADFERWLKVFHIPVDDYLHAQIENLSFPEQNDRMLRIFRRAQGRNTELNRWLRFLREGDTSRVSEVLQEIGEKESRADWKKWASDKSIAPLMESLRLAILDHQELLKKEIVLLANRILPLRGRRWEWVQREHGKNWILRQTEDDIGEERPKIRGQRGLSIARIEQLEELRRRLQSLNRALQRAPGEKATMGRSARGMEAPDPCPALAEKLDSLKEQRINQTAHLILAKALGVRLKAHSLPDHERRLRDMHGEYEVIPGRKPVDFIVLEDLTRYRTSLDRGPSENSRLMKWCHRAITEKLKQLCEPYGIPVLETPAAYTSKFCSRTGLAGFRAREIGPGQTHFMGRTQRSGPEFAELQKMLDALESAGRTDLRLIVPARGGPRFVAAHQFHSQRPEELTDDADLNAACNLALRAVAAPDMHDLLPRLRCQTENGVLTFVGSVKNPKPSKRDAARFQKPVTFEVVNTSQHPTEHDEDEEDLRRTNIFVDLGKVALFEKVKATNWDTPLATSKGLWGTIRRLEFRYCNRLNRRRLEKWGIPLSDAVEGALTPDPDDEIPM

SEQ ID NO: 1254 - protein, 1365 aa, unidentified
  REGION 1..1365: note = Cas Enzyme sequence
MKSLFDNFTQQYSLSKTLRFELRPVGKTLENMHAQLEYNKDLQTFLKDQEIEDAYQKLKPLFDELHEEFITDSLDSVQAKQIDFSEYLALYEVKKELQTVEKKLREKIGETFVVTGKTWRQEKYTKYGWKKGSKVANGADILLTKDMLELIKDKYPNDEEIKTMIDDTFKGFFTYFTGFNQNRENYYTTKEEKATAVATRIVHENLPKFCDNILFFKDRQEEYLKAYSYLEERGSDLTDKGNNLLFPITSAIFTIEHFSQCLSQKQIEIYNSQIGNANLLVNLYNQAENSGQGFKRLPLFKTLYKQIGCGKSKSLFFKLTCYTKAEAIKARNDNKEAMSVEEILHLAKQVGEKFFRYGNDDGVVNTVPKFLKYIKNKENYNGVYWSKAALNTISNKYFANYYDLKDRMKKANVFQKVTKSSEEDVKIPEAIELEDFFGVFDQTPNWKEEGIFFKKNLTEKLQDEVGNKINEKRLGIIKEAQKPSQALLGLIFADVDKYIEQFLISSEKIVNLQEYKSNGSKEAIKAWMDYALTINQMLKYFLVKENKIKNNPIDSVISNALKNILFEGIVDIDGKEVTVKWFSWYDALRNYLTKKPQDDVKENKLKLNFENSTLAGGWDINKEPDNYCVILQDQEGRQYLAVIAKQQNQRGYNKIFENALNNPLYQVGDYEVLQKMEYKQIAAPTGIGGFVRKCFNTAQQYGWICPDNCLNDERKVIIKNDEAKTNLKVLIDCYKDFFNKYEKDGFKYKDFNFVFKESDKYQELNNFFSDVEKQGYKLNFVNINKDIVDQWVNEGRIYLFEIKNQDSNNGKKKGHKNNLHTIYWNALFENIENKPKLNGGAELFYRKAILKEDQEKIKDKHGNEVIKNPRFSREKFLFHCPITLNYKAKRYKEPKYALPEINNQINEVLTTSSHIYFLGIDRGEKHLAYYSLIDQNEIIKKQGTLNLAFTDKEGKLRSIKKEKYFYNKQKDTWEPKDVDCWNYNDLLEAMASNRDMARKNWQTIGTIKELKEGYISQIIRKIADIAIEHDALIVLEDLNTGFKRGRQKIEKSVYQKFELALAKKLNFLIDKSAKTGEIGSVTNALQLTPPVNNYGDIENRKQVGIMLYTRANYTSQTDPATGWRKSIYLQKSSEENIKKQILDSFSDIRFDGQDYFFTYTDGNINRVWKMFSGINGVSLDRYRSKLDKNEWVVEKQDIVKILKGVFANFDEEKSLLAQIKEGVELTKINNDTAWESLRLAIDLIQQIRNTGSTKRDNDFLLSSVRKQGKHFDSREYWDVEQSVGQVLMPSSGDSNGAYNIARKGMMMNEHIRIWIKNGKPKYDKNTSDLNLFISDKEWDLYLKSKKEWKDSLPVFSSRKIMEIGK

SEQ ID NO: 1255 - protein, 1365 aa, unidentified
  REGION 1..1365: note = Cas Enzyme sequence
MNRIYQGRVSKVLDDQNQELDLHVLWQHHELFQDAVNYYLVCLLSLANDPDSDMGKLREQITKDGSDGFVWGAFRKRGVTRRGLRDSVSPFLTPQNNSPIFSEVAAEVLAGNAMAATDEGKATLAAGLRQLLSKCTGASGCRNAAPEFLPRFCKPDFGGNYVEDKAAVARQADKLRFPFVLHNSTTHPNSTSLDSFGVHSIALPNPRKPEFKNAEAIAKLRNMVAAWRERQPDSVTDWTRLEEKIAKIPDDFVLPGYAPTAAKGVIKFRLFAMFFFRYVEKSNFTLNLLRSTTPAPEVGAKPPVAETSSGESAGDPIRLARGTRGYVFRAFTSLPCWGGDESGKLKWEKFDVAAFEEALKALHQVDEKGKERAKELARKQARHNYQRGESKKWKAEGGTDEDSRPPMLAGDERIARLEQLVDVDLRAEYEMSEGVEVKYGLQQRTIRGFRDLQKIWSKEVRQAEDYSDATRERLAGKLREYQKDNPQIVGSVRLFAALLERQNWIIWREPTAARLDEWRKKAKLPDDAEFASDPLQALTDERELKEELKRLAEPIRLTPADPEHSRRQFYFSDAAKFTERGEYRHEPNKRVVSVPLAKRDGGIWRLTRAQLHYSAPRLLRESLRADEGEKLGAMPWLQPMMAALGLPEPMPQDFRDCPVALMPDLTASGEKRILLNFPLTLDADLLVKQLGKASRWDNYQFGGADKESYWLRWPSTWAAKAKSHPWWEAGELFRVLSVDLGQRDAGAFAVLEASAGNAPKIQSRKLGEAGGKTWWSTVRATGMLRLPGEDALVLRDGKWQEEFSGERGRLAASPEWDEARDICAKLGVDTKILGEDSKRYSFPELNDQLLFALRRAQARLARLQSWSCIAADEKRRSSIAEQIREADEDPLDLKPLEAKQAWNLIAAKLITELETQRIVISRELVRIADRIQPLRGRRWELALRDDGSHCHVLRQTEHGSDPRPKLLAGQRGLSIERIEQLETLRQRCQSLNRALMQTPGQPAKLGSSKRGIELPDPCPELLERLERLKEQRVNQTAHLILAQALGVRLRQHQQDAAAREHRDIHGEYEKFREPVDFLVLENLDRYLANQGRSRGENSRLMKWCHRQILGKLKQLCEPYGLRVLETPAAYSSRFCSLTSVAGFRAMELTPDDANEFRWKKHLDRLADPERSKKLSKDERDESQRVKALFETLEKLNADLLTNRPTRPKWLTLLAPVAGGPIFVPMSGKPQQADINAAINLGLRAIAAPENAEIHLRIRSKREDDKFFVRAENLREKARWGTGSREIVITNEKNRAELLTEARPNFFADCGNVASFDRADISDLTCQVASGRGLWGSINQRDWQRVEEINRARIEKWERGNDDIPM

SEQ ID NO: 1256 - protein, 1365 aa, unidentified
  REGION 1..1365: note = Cas Enzyme sequence
MNRIYQGRVSKVELLPQNGFTPAPAPLEILGDHHQLFQDAINYYLVALAAMASDDESPLGQMRVRMADAWAPFSRNGIFLDGLRASLLRAKVPGITPESSFEEGLIAVLAGNSVEASVLQLAAELLLSKVGGEAAIQQGGRGYWPRFCNPKANPTWDYSPDGLRSRAGKDKLAALIHSELTDIERNELAEELNLSWTVKLQPGNAYEGEKARARLKEAVSFFEKALANPDRRLAGLLAMHPDVAKHISALRPSIDALEKPIVPANRKAVPALVFATLLFKFFPSIETQSLLALHVAKPTANKKPETADRFASLGDDPIRMARGKRGYVFPAFTSLSIFGATGPDDIRWGEFDIAAFKEALKTVNQFRLKTEERREKRLKYEAAIAYMEGLHAKWEDPEGAEESEPPHRINGDPRIAGVKKLLEEQVKDLELTDADAPSITLSRRRLRGWTKLTEKFHQIVEPGEPFSTEKARKLKGALAKFQTEHRDEMGDARLFEALVTNRDYWCLWQRPTEAQRAERAAHDWSDNILATYRDYLGFDEEAKRLREPIRFTPADARESRRLFMFSDLSGRSKIKHRKDSLTVEVSVAVKTVGGIWQETRALLHYSAPRLRRDRLRGVEGADNLTEAPWIQPMMEALGLPEECTQDIADHAVALMPEPGKNGLRYLLNFPINVEPEKLMVLLGKQDLWRGQFNGTRDKSIHLHWPSTMDAKYHEKAWWRREKPFTCLAADLGTRACAAIALMEFLPGEPVGQERLIGYAEGKPWKARLLDNGRELLRLPGEDMKILEAGIWKEEPYGSKGRLPDPEETADFERWLKVFHIPVDDYLHAQIENLSFPEQNDRMLRIFRRAQGRNTELNRWLRFLREGDTSRVSEVLQEIGEKESRADWKKWASDKSIAPLMESLRLAILDHQELLKKEIVLLANRILPLRGRRWEWVQREHGKNWILRQTEDDIGEERPKIRGQRGLSIARIEQLEELRRRLQSLNRALQRAPGEKATMGRSARGMEAPDPCPALAEKLDSLKEQRINQTAHLILAKALGVRLKAHSLPDHERRLRDMHGEYEVIPGRKPVDFIVLEDLTRYRTSLDRGPSENSRLMKWCHRAITEKLKQLCEPYGIPVLETPAAYTSKFCSRTGLAGFRAREIGPGQTHFMGRTQRSGPEFAELQKMLDALESAGRTDLRLIVPARGGPRFVAAHQFHSQRPEELTDDADLNAACNLALRAVAAPDMHDLLPRLRCQTENGVLTFVGSVKNPKPSKRDAARFQKPVTFEVVNTSQHPTEHDEDEEDLRRTNIFVDLGKVALFEKVKATNWDTPLATSKGLWGTIRRLEFRYCNRLNRRRLEKWGIPLSDAVEGALTPDPDDEIPM

SEQ ID NO: 1257 - protein, 1365 aa, unidentified
  REGION 1..1365: note = Cas Enzyme sequence
MNRIYQGRVSKVLDDQNQELDLHVLWQHHELFQDAVNYYLVCLLSLANNPTSDMGKLREQITKEGSEGFVWGKFRKRGVTRRGLRDSVAPFLTPQNNSPTFDEVATAVLAGNAMATTDEGKATLAAGLRQLLLKCTGASGCRNAAPEFLPRFCKPDFGGNYVEDKAAVARQADKLRFPFVLHDSTTHPNSATLDSFGVHSIALPNPRKPEFKEIEAISKLREMIAAWRERQPDSTADWERLAETISELPSDTTIPGYAATSAKGEIKFRLFAMFMFRYLEKSEFTLTLLRSTTPAPEAGTKPPETENTQANSAGDPIRLARGTRGYVFRAFTSLPCWGGDESGKLKWEKFDVAAFEEALKALHQVDEKGKKRAKELARKQARHNYQRGISKKWKAEGETDEDSRPPMLAGDERIARLEQLVDVDLRAEYEMSEGVEVKYGVQQRTIRGFRDLQKIWGKEVSQAEDYSDAARERLADKLREYQKDNPQIVGSVRLFTALLEKQNWIIWREPTAAQLDGWRKKAKMPDDTEFASDPLQALTDERELKEELKHLAEPIRLTPADREHSRRQFYFSDAAKFTERGEYRHEPNKRIVTVPLAKREDGIWQLTRAQLHYSAPRLLRESLRADEGEKLGAMPWLQPMMAALGLPEPMPQDFRDCPVALMPDFTASGENRILLNFPLTLEADVLVKQLGRASRWDNYQFGGSDKESYWLRWPSTWAAKAKSHPWWKAGKSYCVLSVDLGQRDAGAFALLEASAGNAPKIQSRKLGEADGKTWWSTVRATGMLRLPGEDALVLRDGQWQEEFSGERGRLATTPEWDEARDICAKLGVDIKILGEASKRYSFPELNDQLLFALRRAQARLARLQSWSCIAADEKRRSSIAEQIREADEDPLDLKPLEAKQAWNLIAANLICELEKERITIPRELVRIADRIQPLRGRRWEWVLREDGSRCHVLRQTQRESDPRPKLLAGQRGLSIERIEQLETLRQRCQSLNRALMQTPGQPAKLGSSKRGIELPDPCPELLERLERLKEQRVNQTAHLILAQALGVRLHQHQQDAAAREHRDIHGEYEKFREPVDFLVLENLDRYLANQGRSRGENSRLMKWCHRQILGKLKQLCEPYGLRVLETPAAYSSRFCSLTSVAGFRAMELTPDDAKEFRWKKHLDRLADPERSKKLSKDERDESQRVKALFETLEKLNADLLKNRPSRPKWRTLLAPVAGGPIFVPMRGKPQQADINAAINLGLRAIAAPENAEIHLRIRSKREDDKFFVRAENLREKARWGTGSREIVITNEKNRPELLTEARPNFFADCGNVASFDRADISGLTRPVASGRGLWGSINQRDWQRVEEINRARIEKLERGNDDIPM

SEQ ID NO: 1258 - protein, 1366 aa, unidentified
  REGION 1..1366: note = Cas Enzyme sequence
MNRIYQGRVTKVEILNGKNADNQPQELPDWQSALWQHHELFQDGVNYYLFCLAALASNPSSPMGKLRNQLGSVWEPFGRTGRRFKGLRDSVGPYLLPGRSTPSIDEAFAAALAGNNAEPKLLQSAVDALVADLGGDAAIQQGGRSYWPMFCNPSSKPTYPRSNAKLERDAARDWLPGWLHDPKTANELASTADRLKVGLFANVAVGEPDIVGDEAKKRLREAIAFLAETNPKLKTTLDQLLPKVDELPAATAFPRYVGSSVKGADKSRFNALLLFKYVEQSKLTFDLLRDAYPAPKQEAKPVKKSKPTEADPLLSLGDDPIKLARGERGYVFRAFTSLPCWGGKGPSDILWKEFDIAAFKEALKTANQFRLKTKERLDKADELAEERAYMDGEKSKFKPSEYSDQEPPAVLNGDPRFELVKQLFEVELAEEHYLAEGESVTYGLHPRTLRCYRELVERWNKIVKPGQAFNEAARERLVTSTDKFQTENKERIGSVTLFKQLLERDYWCLWQTPDEQTVAARQKAGFSSNILEDYQRYLELETDIARLKEPIRFTPADAEQSRRLFMFSDLAGKSKHKHLPNATPYGFAVDVALAASEGGVWKETRVRLHYSAPRLRRDGLRTGVAEDLERTAWLQPMVAALMIPEPAPQDFSKCAISLMPDKSWKGLRHLLNFPVTLDPAAVQKAIGSQARWANQFVAFGKGATEQKFFLRWPEEVSASQKKAGPWWESDEPFRCLSVDLGQRDAGAFALLDVRANADFGKKPSRFIGEVFGMQWRTALAAAGLLRLPGEDALVWRDGKWQEELYGEKGRLATKEEWLETNAIISALEQNAGEWIGADPKRWSFPELNSKLLIVAGRAQSWLARLHRWLWMLDDENKRERALGELLEQERQEVWRKRAETKDVLALKQSLTAEIQRLDKLLPEQLVLLVNRCLPLRNRKWAWNQHPDKAFAEKGCHLLEMVEAPSHLPLLAGQRGISFERIGQLEKLRRRFQSLNRVLQRELGAPPKSGRELRDDLVPDCCPDILAKLDRMKEQRVNQTAHLIVAQALGVQLRKHQTPERERAERDMHGEYEIMPGRKPVDFIVLEDLSKYLSSQARGRGENVRLMKWSHRQVTAKVKELCEPFGLPVLETPAAYSSKFCSRTGVAGFRGVEVTLKDRQSFPWSKRLEENSVEVVELFGWLESASAGHKTKQPRCLLAPMLLGPLFIPVTPQAPIMQADINAAINLGLRAMAAPNAHEIHVRIRSEAKDGQFRVRAQSKREKARWGNEPPPIKMLVETQRVALAREGGHPNFFVDPLKVATFDRAEVDGLGLPVASGRGLWKSVRDAEWKRCREINLERMRRWGFIIEAPRTLEVSRKEDEDDLTF

SEQ ID NO: 1259 - protein, 1366 aa, unidentified
  REGION 1..1366: note = Cas Enzyme sequence
MNRIYQGRVTKVEILNGKNADGQAQELPNWQSALWQHHELFQDAVNYYLFCLAALASNPSSPMGKLRNQLGSVWEPFGRTGRRFKGLRDSVGPYLLPGRSTPPIDEAFAAALAGNSAEPKMLQLAVDALVEDLGGDAAIRQGGPTYWPMFCRPQSNPTYPRSEAKLERDAARDWLPGWLHDSKNANELVSSAARLKVGLFANVAVGKPDIVGDEAKKRLREAIAFLAETNPKLKTSLDQLLPKVDKLPAATAFPRYVGSSVKGADKARFNAFLLFKYVEQSKLTFDLLREAYLAPKQQGKPVKKPEATETDPLLSLGDDPIKLARGERGYVFRAFTSLPCWGGKGPSDIVWKEFDIAAFKEALKTANQFRLKTKERLDKAGDLAGELARMNGENSKFKPSEYSDQEPPAVLNGDPRFELVKQLFEVELAEEHYLAEGESVTYGLHPRTLRCYRELVERWSKVVRPGEAFSEAARERLVTSTDKFQAENKERIGSVTLFKKLLERDYWCLWQTPDEQTAAARQQAGFSSNILEDYQRYVELQTDIARLKEPIRFTPADAEQSRRLFMFSDLAGKSKHKHLANATPYGFAVDVALAASEGGIWKETRVRLHYSAPRLRRDGLRKGVGEDLERTAWLQPMVAALIIPEPAPQDFSKCAVSLMPDKSWKGLRHLLNFPVTLDPTAVQKAIGSQARWANQFVAFGKGATEQKFFLRWPEEVSASQKKVGPWWESDKPFHCLSVDLGQRDAGAFALLAVRANADFGKKPSRLIGETVGKKWCTALAAAGLLRLPGEDALVWRDGKWQEELYGEKGRLATKEEWLETNAIFSALQQNAEEWIGADPKRWSFPELNSKLLVVAGRAQSWLARLHRWLWMLDDENKRERALGELLEQERQEAWRKRAETKDVLALKQFLTAEIQRLDKLLPEQLVLLVNRCLPLRNRKWAWNQHPDKAFAERGCYLLEMVEAPSHRPLLAGQRGISFERIGQLEKLRRRFQSLNRVLQRELGAPPKSGRELRDDLVPDSCPDILAKLDRVKEQRVNQTAHLIVAQALGVQLRTHQTPESERGERDLHGEYEIMPGRKPVDFIVLEDLSKYLSSQARGRSENVRLMKWCHRQVTAKVKELCEPFGLPVLETPAAYSSKFCSRTGVAGFRGVEVTLKDRQSFPWSKRLEENSVEVAELFGWLETASAGHKNNQPRCLLAPMSLGPLFIPVTPHAPIMQADINAAINLGLRAMAAPNAHEIHVRIRSEAKDGQFRVRAQSKREKARWGNEPPPIKMLVETQRVALAREGGHPNFFVDPLKAATFDRAEVEGLGLPVASGRGLWKSVRDAEWKRCREINLERMRRWGFIVEPPRTLQVSRKEDEDDLTF

SEQ ID NO: 1260 - protein, 1366 aa, unidentified
  REGION 1..1366: note = Cas Enzyme sequence
MNRIYQGRITGILDSKEDERGHPPPPDPKHNPFWRHHEVYQAAVNYYYVAFAALGRAASDGMLRDLVQRVGESWETDPVHFRPEYGLRASLRQFLPLSDTSTLEEAFERILEKDHASPDTLLKAAMAVAKDLGGESSIQMKGREYLPRLCVPGYKGKFPREKNSLEKERMKVLLPVWLHAEDPASQPTLKKIRFHHFANPTGTRLEVAESKDLLGVAIDTLLRENKITAEEAGTLHDEIDALPDTFTLPAYAGGSVNKDALKLRFHAYLITEHFWKNGRGLELLRSTYPPPKGKPKKVGLSEEEEALLVDGDDPVKVARGDRGYVFRAFTSLPAWGGRSAKDIAWKEFDIAAFKEALTTYNQFKDKTEERAARLRDVQARLARMNGNEPEIPLAKEDKDDIPRLENDPRVALLGELLHDSGVVAEGQTVDRGIYHRSLRHYRDLRSEWNRVLSRASDGDSDSDISKRLISVVNEMQAKYAHTFGDVNLFRGLCSDPKYWPVWKHPDAETKKRIEKEGWAENVVEAYRDFLELQAEEERYSEAIHFRPAHPEESSRYFRFSDVVTKNQTLHEQPGERLKLPIVERNDEGVYTKSSIRVRYSAPRLYRDAVCGNGNEKGHWLQPMVKALSLPEPPEADITNSAIVLNIKTDGENSSDKRVRAYVDFPVELDTSPLKEHLGHTRKWAKQFNGQYDRGVPYPSAGGGLYWPDMQGLPSDPWYENPAIQASGFQVLGVDLGQRTAECHALIEIRCDGKFPQKKDGTSRDILATVGHDGTRTWEAVLLRAGTGRLPGENAHQMEQGRRVREKGGRRGRKTSDEDYRIAVEILEKIGLREIAESHRPLNDFKYAPELWDFVLRYLKWIRNRLGRLFFAAADLRDDELRDKVATRLEEYPIPGIELPSPLKERHEEAAELCLARYTELLETFRSALLLLTDQILPLRGRRWTWAPHPQFPESTHHILMETPEPSTKGRKIRGQRGLSFNRIEQIQELRKQFQALNRMEGWDIQAPHRPGRDEIRQSLPECCQPLLEKLDNLRTQRVNQTAHLILQEALGVELAPGEKNATGDEHGVYRVKHGRRPVDIIVLEALGDFKTSQKRGRGTNRRLASWAHRGISAKLRELAEPFGIPVVETPPHNTSTFHAFTGRPGYRAREMSGIEMERIQTKLEEKKTPKTFRETLIKAGIDAMRESGTPPEKMTLLVPQQMGELFLPLTGPDEPALPPIQSDINAAINIALKMVSAPEAVHLRHTVRFETPAGKPVTPGKGSKLEKALAKRKNVTFEIGDEFHAPQARIDRANLLGTPAGTVHTPIGSFDFMSRDAMRNLLSHYKDDMFIQANKRALEKRGISFPMTPSNHPFSAGDFMDEHFPM

SEQ ID NO: 1261 - protein, 1366 aa, unidentified
  REGION 1..1366: note = Cas Enzyme sequence
MKRIYQGRVVGAELLQAKGKGKGHNERSEPIDSWEDVLWQHYSLFQDAINYYIVALLAMATSKENPLYKIRCHLEGDGDFQVWNDFRKRGVLRPGMCHSLGKYFKHREETLTLKECFRMIVSGNNEVHEVIDLALQELLQTCSGDGAIQKEGRSMFPRFCDPEYGGQYYLQKIDKDKAQKRLATYLHDGNNASDLQKVKAHLKFEWFANIAKGSAPKKGNTAKQVLKDALRYLVEKHSIAEKSKGRLEKLIEDLPDSVTIQSYTGGSVNKDILEKKFYTYLLFTHVEQSEELFNVLRNTYRPPKEARKKTVKKTEELDLSKFDDDPVKLARGERGYIFPAFTCFLEKNEVDNNARKAWKEFDIAAFKEALKTIHQIDLKEKERAGERAGIQRNLDYMRGKTGEWKEEDSEDEAPPRMAGDPRIERLEAILKTDLAAEYEMVEGESVSYGLQKRTIRGFREIKKRWQKIVKAGEPFSGEKRELLLSILKDYQTENPEGIGSVLLFEKLTERNNWLIWQEPPEATRQAWQEQQFAEDPLDAMVRRSEYQERIEKLSQPVRLTPADPDYSGRQYLFSDWKAGCKHEPGVSAVKVACAMVDADTCRWQYRMIRLAYSAPRMVRDGMKSVDETDAGGAVWMQPMVEALLPSRQIPMDFTKTAVGLMPVVGLSGKKKTLLNFPVEIEDRIVAEQLKKQRFTEADFIKFKDSKRYIRWFTDKVKDTPAWTNNDTFTCLAADLGQRDAAAFAIVEASTKKNHGARYIGDYEGDFWYARLRQTGLLRLPGEDARVWRNNRLRTELSGERGRSATETEQLDAFAICRELEQDPRLFGEDISRLSYPELNDKLLVIMRRAQSRLARLHTWAWMIESGKNKQKKNAFEGIIKEDSFSESFRKLAEQNDAVKVKTKLIQEIKLIRPLLVKNLQEIANRILPRRDAVWVWRERNETGSGCVLALERRKDRDGTVLIRGQRGLSLERIEQVEELRRRCQSLNRTLLHEPGTKPLMGRAARGIELPDPCPEILGKMEALREQRVNQTAHLIVAEALGVRLCNHNKTKQQRQLRDIHGEYERIPGREPVDLVVLEDLSRYLSSQDRPRRENSRLMKWCHRAILAKVKELCEPYGIAVLETPAAWSSRFSSRDGKPGFRAVELVPGHKYKFPWNRDLQKYADVTDGKKKVDATERTRLQKVHHFFEILEKVNADKKKKGTKQRSLLAPLAGGPLFIPFQGPAMQADINAALNLALRAIAAPWVHDIHPRIRTERAPDTGLRVRRDNILEKRRWKEAYPVRLAQDSESIRLAADRNPNFFVDLDKCSLYGRAEINGIMVASGSGLWGTMNQKAWEIVNRLNADRLKNWGFDRMLEEKADEEEIPF

SEQ ID NO: 1262 - protein, 1367 aa, unidentified
  REGION 1..1367: note = Cas Enzyme sequence
MSVFKSFTNCYALSKTLRFELKPVGKTFENMRTQLAYNKDLQTFLKDQAIEDAYQKLKPLFDKLHEEFITDSLDSDQAKKIDFSEYLVLYEAKKELQAIEKKLREEIGKTFIAAGEKWKQEKYAQYTWKKGSKVANGSDILLTQDVLELIRDLNDKNEELKKMIEETFKGFFTYLSGFNQNRKNYYTIKEEKATAVATRIVHENLPKFCDNILFFIDRQTEYPIAHSFLKEKGRDLVNKDGKALLPITDSIFSIEHFNHCFSQKQIEAYNAQIGNANVLINLYNQAHNDEQGFKRLPAFKTLYKQIGCGKRKSLFFTLTCDTEAEASKMRNENKEAFSVEEVLNLAYKAGEKYFQNSIENDSNLTIPKFCSYIEAQQDYDGIYWSKAALNTISNKYFANYHVLKDRLKEVKVFQKAAKGSEEDVKIPEAIELEGLFAVIDEVDGWRDEDIFFKKSLIEERKDEKENKKNKKRLEVIKKAEKPSQALINLIFFDINEHIEQFFDTSKAILSLQEYKSKESKEAIKAWMDHALAVNQILKYFLVKENKTKGNPLDSEISNALKNILFEGKIIFDGKEIDVDWFRWYDALRNYLTKKPQDDAKENKLKLNFRNSTLAGGWDINKEPDNYCVILQDQNDKQYLGVIAKKEKQRGYNKIFEKTPENPLYKIDSGEVWQKMEYKQIAAPTGIGGFVRKCFKTAQQYGWKCPDNCLNSEGKIIIKNDEAKENLEAIIDCYKDFFIKYEKDGFSYKKFSFNFKKSSEYEELNNFFSDVERQGYKLDFTTINKAIIDQWVEDGTIYLFEIKNQDANDGKKEGHKNNLHTIYWKALFENNEDKPKLNGGAELFYRKALPKSKQEKIKDNHGKEIIKNFRFSKEKFLFHCPIKMNYKAKSYSDPKYALPEINNQINEALTTFGDIHFLGIDRGEKHLAYYWLVDKNGEMIDQGTLNLPFIDQEGKPRSIKKPKYFYNKKKDKWESEEINCWDYNDLLDAMASNRDMARKNWQTIGTIKELKEGYISQVVRKIADIVVEHGAFIVLEDLNTGFKRGRQKIEKSVYQKFELALAKKLNFLVDKSAKSGEIGSVTRALQLTPPVNNYGDIEKRKQVGIMLYTRANYTSQTDPETGWRKIIYLKKGNEEAIKEQILQNFTDIWFDGLDYYFEYPNKNKSDKPWKLYSGKGGKSLDRFRRSRGKDKNEWTIEPVNVVNILKQVFVNFDEKRSLRSQIIEGKALARTKEKTDFTAWEALRFAIDLIQQIRNTGNNEKDADFLHSPVRDTNGNHFDSRSVSHDRPTSGDANGAYNIARKGLMMNEHIRTWAKKGKPKYDKNTNDLNLFISEEEWDLYLADKKAWQEKLLMFSSRKAMDEEKKKHI

SEQ ID NO: 1263 - protein, 1367 aa, unidentified
  REGION 1..1367: note = Cas Enzyme sequence
MSVFKSFTNCYALSKTLRFELKPVGKTFENMRTQLAYNKDLQTFLKDQAIEDAYQKLKPLFDKLHEEFITDSLDSDQAKKIDFSEYLVLYEAKKELQAIEKKLREEIGKTFIAAGEKWKQEKYAQYTWKKGSKVANGSDILLTQDVLELIRDLNDKNEELKKMIEETFKGFFTYLSGFNQNRKNYYTIKEEKATAVATRIVHENLPKFCDNILFFIDRQTEYLIAHSFLKEKGRDLVNKDGKALLPITDSIFSIEHFNHCFSQKQIEAYNAQIGNANVLINLYNQAHNDEQGFKRLPAFKTLYKQIGCGKRKSLFFTLTCDTEAEASKMRNENKEAFSVEEVLNLAYKAGEKYFQNSIENDSNLTIPKFCSYIEAQQDYDGIYWSKAALNTISNKYFANYHVLKDRLKEGKVFQKAVKGSEEDVKIPEAIELEGLFAVIDEVDGWRDEDIFFKKSLIEERKDEKENKKNKKRLEVIKKAEKPSQALINLIFFDINEHIEQFFDTSKAILSLQEYKSKESKEAIKAWMDHALAVNQILKYFLVKENKTKGNPLDSEISNALKNILFEGKIIFDGKEIDVDWFRWYDALRNYLTKKPQDDAKENKLKLNFKNSTLAGGWDINKEPDNHCVILQDQNDKQYLGVIAKKEKQRGYNKIFEKTPENPLYKIDSGEVWQKMEYKQIAAPTGIGGFVRKCFKTAQQYGWKCPDNCLNSEGKIIIKNDEAKENLEAIIDCYKDFFIKYEKDGFSYKKFSFNFKKSSEYEELNNFFSDVERQGYKLDFTTINKAIIDQWVEDGTIYLFEIKNQDANDGKKEGHKNNLHTIYWKALFENNEDKPKLNGGAELFYRKALPKSKQEKIKDNHGKEIIKNFRFSKEKFLFHCPIKMNYKAKSYSDPKYALPEINNQINEALTTFGDIHFLGIDRGEKHLAYYSLVDKNGEMIDKGTLNLPFIDQEGKPRSIKKPKYFYNKKKDKWESEEINCWDYNDLLDAMASNRDMARKNWQTIGTIKELKEGYISQVVRKIADIVVEHGAFIVLEDLNTGFKRGRQKIEKSVYQKFELALAKKLNFLVDKSAKSGEIGSVTRALQLTPPVNNYGDIEKRKQVGIMLYTRANYTSQTDPETGWRKIIYLKKGNEEAIKEQILQNFTDIWFDGLDYYFEYPNKNKSDKPWKLYSGKGGKSLDRFRRSRGKDKNEWTIEPVNVVNILKQVFVNFDEKRSLRSQIIEGKALARTKEKTDFTAWEALRFAIDLIQQIRNTGNNEKDADFLHSPVRDTNGNHFDSRSVSHDRPTSGDANGAYNIARKGLMMNEHIRTWAKKGKPKYDKNTNDLNLFISEEEWDLYLADKKAWQEKLLMFSSRKAMDEEKKKHI

SEQ ID NO: 1264 - protein, 1367 aa, unidentified
  REGION 1..1367: note = Cas Enzyme sequence
MSVFKSFTNCYALSKTLRFELKPVGKTFENMRTQLAYNKDLQTFLKDQAIEDAYQKLKPLFDKLHEEFITDSLDSDQAKKIDFSEYLVLYEAKKELQAIEKKLREEIGKTFIAAGEKWKQEKYAQYTWKKGSKVANGSDILLTQDVLELIRDLNDKNEELKKMIEETFKGFFSYLSGFNQNRKNYYTIKEEKATAVATRIVHENLPKFCDNILFFIDRQTEYPIAHSFLKEKGRDLVNKDGKALLPITDSIFSIEHFNHCFSQKQIEAYNAQIGNANVLINLYNQAHNDEQGFKRLPAFKTLYKQIGCGKRKSLFFTLTCDTEAEASKMRNENKEAFSVEEVLNLAYKAGEKYFQNSIENDSNLTIPKFCSYIEAQQDYDGIYWSKAALNTISNKYFANYHVLKDRLKEVKVFQKAAKGSEEDVKIPEAIELEGLFAVIDEVDGWRDEDIFFKKSLIEERKDEKENKKNKKRLEVIKKAEKPSQALINLIFFDINEHIEQFFDTSKAILSLQEYKSKESKEAIKAWMDHALAVNQILKYFLVKENKTKGNPLDSEISNALKNILFEGKIIFDGKEIDVDWFRWYDALRNYLTKKPQDDAKENKLKLNFRNSTLAGGWDINKEPDNYCVILQDQNDKQYLGVIAKKEKQRGYNKIFEKTPENPLYKIDSGEVWQKMEYKQIAAPTGIGGFVRKCFKTAQQYGWKCPDNCLNSEGKIIIKNDEAKENLEAIIDCYKDFFIKYEKDGFSYKKFSFNFKKSSEYEELNNFFSDVERQGYKLDFTTINKAIIDQWVEDGTIYLFEIKNQDANDGKKEGHKNNLHTIYWKALFENNEDKPKLNGGAELFYRKALPKSKQEKIKDNHGKEIIKNFRFSKEKFLFHCPIKMNYKAKSYSDPKYALPEINNQINEALTTFGDIHFLGIDRGEKHLAYYSLVDKNGEMIDQGTLNLPFIDQEGKPRSIKKPKYFYNKKKDKWESEEINCWDYNDLLDAMASNRDMARKNWQTIGTIKELKEGYISQVVRKIADIVVEHGAFIVLEDLNTGFKRGRQKIEKSVYQKFELALAKKLNFLVDKSAKSGEIGSVTRALQLTPPVNNYGDIEKRKQVGIMLYTRANYTSQTDPETGWRKIIYLKKGNEEAIKEQILQNFTDIWFDGLDYYFEYPNKNKSDKPWKLYSGKGGKSLDRFRRSRGKDKNEWTIEPVNVVNILKQVFVNFDEKRSLRSQIIEGKALARTKEKTDFTAWEALRFAIDLIQQIRNTGNNEKDADFLHSPVRDTNGNHFDSRSVSHDRPTSGDANGAYNIARKGLMMNEHIRTWAKKGKPKYDKNTNDLNLFISEEEWDLYLADKKAWQEKLLMFSSRKAMDEEKKKHI

SEQ ID NO: 1265 - protein, 1367 aa, unidentified
  REGION 1..1367: note = Cas Enzyme sequence
MSVFKSFTNCYALSKTLRFELKPVGKTFENMRTQLAYNKDLQTFLKDQAIEDAYQKLKPLFDKLHEEFITDSLDSDQAKKIDFSEYLVLYEAKKELQAIEKKLREEIGKTFIAAGEKWKQEKYAQYTWKKGSKVANGSDILLTQDVLELIRDLNDKNEELKKMIEETFKGFFTYLSGFNQNRKNYYTIKEEKATAVATRIVHENLPKFCDNILFFIDRQTEYLIAHSFLKEKGRDLVNKDGKALLPITDSIFSIEHFNHCFSQKQIEAYNAQIGNANVLINLYNQAHNDEQGFKRLPAFKTLYKQIGCGKRKSLFFTLTCDTEAEASKMRNENKEAFSVEEVLNLAYKAGEKYFQNSIENDSNLTIPKFCSYIEAQQDYDGIYWSKAALNTISNKYFANYHVLKDRLKEVKVFQKAAKGSEEDVKIPEAIELEGLFAVIDEVDGWRDEDIFFKKSLIEERKDEKENKKNKKRLEVIKKAEKPSQALINLIFFDINEHIEQFFDTSKAILSLQEYKSKESKEAIKAWMDHALAVNQILKYFLVKENKTKGNPLDSEISNALKNILFEGKIIFDGKEIDVDWFRWYDALRNYLTKKPQDDAKENKLKLNFKNSTLAGGWDINKEPDNHCVILQDQNDKQYLGVIAKKEKQRGYNKIFEKTPENPLYKIDSGEVWQKMEYKQIAAPTGIGGFVRKCFKTAQQYGWKCPDNCLNSEGKIIIKNDEAKENLEAIIDCYKDFFIKYEKDGFSYKKFSFNFKKSSEYEELNNFFSDVERQGYKLDFTTINKAIIDQWVEDGTIYLFEIKNQDANDGKKEGHKNNLHTIYWKALFENNEDKPKLNGGAELFYRKALPKSKQEKIKDNHGKEIIKNFRFSKEKFLFHCPIKMNYKAKSYSDPKYALPEINNQINEALTTFGDIHFLGIDRGEKHLAYYSLVDKNGEMIDKGTLNLPFIDQEGKPRSIKKPKYFYNKKKDKWESEEINCWDYNDLLDAMASNRDMARKNWQTIGTIKELKEGYISQVVRKIADIVVEHGAFIVLEDLNTGFKRGRQKIEKSVYQKFELALAKKLNFLVDKSAKSGEIGSVTRALQLTPPVNNYGDIEKRKQVGIMLYTRANYTSQTDPETGWRKIIYLKKGNEEAIKEQILQNFTDIWFDGLDYYFEYPNKNKSDKPWKLYSGKGGKSLDRFRRSRGKDKNEWTIEPVNVVNILKQVFVNFDEKRSLRSQIIEGKALARTKEKTDFTAWEALRFAIDLIQQIRNTGNNEKDADFLHSPVRDTNGNHFDSRSVSHDRPTSGDANGAYNIARKGLMMNEHIRTWAKKGKPKYDKNTNDLNLFISEEEWDLYLADKKAWQEKLLMFSSRKAMDEEKKKHI

SEQ ID NO: 1266 - protein, 1367 aa, unidentified
  REGION 1..1367: note = Cas Enzyme sequence
MSVFKSFTNCYALSKTLRFELKPVGKTFENMRTQLAYNKDLQTFLKDQAIEDAYQKLKPLFDKLHEEFITDSLDSDQAKKIDFSEYLVLYEAKKELQAIEKKLREEIGKTFIAAGEKWKQEKYAQYTWKKGSKVANGSDILLTQDVLELIRDLNDKNEELKKMIEETFKGFFTYLSGFNQNRKNYYTIKEEKATAVATRIVHENLPKFCDNILFFIDRQTEYPIAHSFLKEKGRDLVNKDGKALLPITDSIFSIEHFNHCFSQKQIEAYNAQIGNANVLINLYNQAHNDEQGFKRLPAFKTLYKQIGCGKRKSLFFTLTCDTEAEASKMRNENKEAFSVEEVLNLAYKAGEKYFQNSIENDSNLTIPKFCSYIEAQQDYDGIYWSKAALNTISNKYFANYHVLKDRLKEVKVFQKAAKGSEEDVKIPEAIELEGLFAVIDEVDGWRDEDIFFKKSLIEERKDEKENKKNKKRLEVIKKAEKPSQALINLIFFDINEHIEQFFDTSKAILSLQEYKSKESKEAIKAWMDHALAVNQILKYFLVKENKTKGNPLDSEISNALKNILFEGKIIFDGKEIDVDWFRWYDALRNYLTKKPQDDAKENKLKLNFRNSTLAGGWDINKEPDNYCVILQDQNDKQYLGVIAKKEKQRGYNKIFEKTPENPLYKIDSGEVWQKMEYKQIAAPTGIGGFVRKCFKTAQQYGWKCPDNCLNSEGKIIIKNDEAKENLEAIIDCYKDFFIKYEKDGFSYKKFSFNFKKSSEYEELNNFFSDVERQGYKLDFTTINKAIIDQWVEDGTIYLFEIKNQDANDGKKEGHKNNLHTIYWKALFENNEDKPKLNGGAELFYRKALPKSKQEKIKDNHGKEIIKNFRFSKEKFLFHCPIKMNYKAKSYSDPKYALPEINNQINEALTTFGDIHFLGIDRGEKHLAYYSLVDKNGEMIDHGTLNLPFIDQERKPRSIKKPKYFYNKKKDKWESEEINCWDYNDLLDAMASNRDMARKNWQTIGTIKELKEGYISQVVRKIADIVVEHGAFIVLEDLNTGFKRGRQKIEKSVYQKFELALAKKLNFLVDKSAKSGEIGSVTRALQLTPPVNNYGDIEKRKQVGIMLYTRANYTSQTDPETGWRKIIYLKKGNEEAIKEQILQNFTDIWFDGLDYYFEYPNKNKSDKPWKLYSGKGGKSLDRFRRSRGKDKNEWTIEPVNVVNILKQVFVNFDEKRSLRSQIIEGKALARTKEKTDFTAWEALRFAIDLIQQIRNTGNNEKDADFLHSPVRDTNGNHFDSRSVSHDRPTSGDANGAYNIARKGLMMNEHIRTWAKKGKPKYDKNTNDLNLFISEEEWDLYLADKKAWQEKLLMFSSRKAMDEEKKKHI

SEQ ID NO: 1267 - protein, 1367 aa, unidentified
  REGION 1..1367: note = Cas Enzyme sequence
MSVFKSFTNCYALSKTLRFELKPVGKTFENMRTQLAYNKDLQTFLKDQAIEDAYQKLKPLFDKLHEEFITDSLDSDQAKKIDFSEYLVLYEAKKELQAIEKKLREEIGKTFIAAGEKWKQEKYAQYTWKKGSKVANGSDILLTQDVLELIRDLNDKNEELKKMIEETFKGFFSYLSGFNQNRKNYYTIKEEKATAVATRIVHENLPKFCDNILFFIDRQTEYPIAHSFLKEKGRDLVNKDGKALLPITDSIFSIEHFNHCFSQKQIEAYNAQIGNANVLINLYNQAHNDEQGFKRLPAFKTLYKQIGCGKRKSLFFTLTCDTEAEASKMRNENKEAFSVEEVLNLAYKAGEKYFQNSIENDSNLTIPKFCSYIEAQQDYDGIYWSKAALNTISNKYFANYHVLKDRLKEVKVFQKAAKGSEEDVKIPEAIELEGLFAVIDEVDGWRDEDIFFKKSLIEERKDEKENKKNKKRLEVIKKAEKPSQALINLIFFDINEHIEQFFDTSKAILSLQEYKSKESKEAIKAWMDHALAVNQILKYFLVKEDKTKGNPLDSEISNALKNILFEGKIIFDGKEIDVDWFRWYDALRNYLTKKPQDDAKENKLKLNFRNSTLAGGWDINKEPDNYCVILQDQNDKQYLGVIAKKEKQRGYNKIFEKTPENPLYKIDSGEVWQKMEYKQIAAPTGIGGFVRKCFKTAQQYGWKCPDNCLNSEGKIIIKNDEAKENLEAIIDCYKDFFIKYEKDGFSYKKFSFNFKKSSEYEELNNFFSDVERQGYKLDFTTINKAIIDQWVEDGTIYLFEIKNQDANDGKKEGHKNNLHTIYWKALFENNEDKPKLNGGAELFYRKALPKSKQEKIKDNHGKEIIKNFRFSKEKFLFHCPIKMNYKAKSYSDPKYALPEINNQINEALTTFGDIHFLGIDRGEKHLAYYWLVDKNGEMIDQGTLNLPFIDQEGKPRSIKKPKYFYNKKKDKWESEEINCWDYNDLLDAMASNRDMARKNWQTIGTIKELKEGYISQVVRKIADIVVEHGAFIVLEDLNTGFKRGRQKIEKSVYQKFELALAKKLNFLVDKSAKSGEIGSVTRALQLTPPVNNYGDIEKRKQVGIMLYTRANYTSQTDPETGWRKIIYLKKGNEEAIKEQILQNFTDIWFDGLDYYFEYPNKNKSDKPWKLYSGKGGKSLDRFRRSRGKDKNEWTIEPVNVVNILKQVFVNFDEKRSLRSQIIEGKALARTKEKTDFTAWEALRFAIDLIQQIRNTGNNEKDADFLHSPVRDTNGNHFDSRSVSHDRPTSGDANGAYNIARKGLMMNEHIRTWAKKGKPKYDKNTNDLNLFISEEEWDLYLADKKAWQEKLLMFSSRKAMDEEKKKHI

SEQ ID NO: 1268 - protein, 1367 aa, unidentified
  REGION 1..1367: note = Cas Enzyme sequence
MSVFKSFTNCYALSKTLRFELKPVGKTFENMRTQLAYNKDLQTFLKDQAIEDAYQKLKPLFDKLHEEFITDSLDSDQAKKIDFSEYLVLYEAKKELQAIEKKLREEIGKTFIAAGEKWKQEKYAQYTWKKGSKVANGSDILLTQDVLELIRDLNDKNEELKKMIEETFKGFFTYLSGFNQNRKNYYTIKEEKATAVATRIVHENLPKFCDNILFFIDRQTEYPIAHSFLKEKGRDLVNKDGKALLPITDSIFSIEHFNHCFSQKQIEAYNAQIGNANVLINLYNQAHNDEQGFKRLPAFKTLYKQIGCGKRKSLFFTLTCDTEAEASKMRNENKEAFSVEEVLNLAYKAGEKYFQNSIENDSNLTIPKFCSYIEAQQDYDGIYWSKAALNTISNKYFANYHVLKDRLKEVKVFQKAAKGSEEDVKIPEAIELEGLFAVIDEVDGWRDEDIFFKKSLIEERKDEKENKKNKKRLEVIKKAEKPSQALINLIFFDINEHIEQFFDTSKAILSLQEYKSKESKEAIKAWMDHALAVNQILKYFLVKENKTKGNPLDSEISNALKNILFEGKIIFDGKEIDVDWFRWYDALRNYLTKKPQDDAKENKLKLNFKNSTLAGGWDINKEPDNYCVILQDQNDKQYLGVIAKKEKQRGYNKIFEKTPENPLYKIDSGEVWQKMEYKQIAAPTGIGGFVRKCFKTAQQYGWKCPDNCLNSEGKIIIKNDEAKENLEAIIDCYKDFFIKYEKDGFSYKKFSFNFKKSSEYEELNNFFSDVERQGYKLDFTTINKAIIDQWVEDGTIYLFEIKNQDANDGKKEGHKNNLHTIYWKALFENNEDKPKLNGGAELFYRKALPKSKQEKIKDNHGKEIIKNFRFSKEKFLFHCPIKMNYKAKSYSDPKYALPEINNQINEALTTFGDIHFLGIDRGEKHLAYYSLVDKNGEMIDKGTLNLPFIDQEGKPRSIKKPKYFYNKKKDKWESEEINCWDYNDLLDAMASNRDMARKNWQTIGTIKELKEGYISQVVHKIADIVVEHGAFIVLEDLNTGFKRGRQKIEKSVYQKFELALAKKLNFLVDKSAKSGEIGSVTRALQLTPPVNNYGDIEKRKQVGIMLYTRANYTSQTDPETGWRKIIYLKKGNEEAIKEQILQNFTDIWFDGLDYYFEYPNKNKSDKPWKLYSGKGGKSLDRFRRSRGKDKNEWTIEPVNVVNILKQVFVNFDEKRSLRSQIIEGKALARTKEKTDFTAWEALRFAIDLIQQIRNTGNNEKDADFLHSPVRDTNGNHFDSRSVSHDRPTSGDANGAYNIARKGLMMNEHIRTWAKKGKPKYDKNTNDLNLFISEEEWDLYLADKKAWQEKLLMFSSRKAMDEEKKKHI

SEQ ID NO: 1269 - protein, 1367 aa, unidentified
  REGION 1..1367: note = Cas Enzyme sequence
MSVFKSFTNCYALSKTLRFELKPVGKTFENMRTQLAYNKDLQTFLKDQAIEDAYQKLKPLFDKLHEEFITDSLDSDQAKKIDFFEYLALYKAKKELQAIEKKLREEIGKTFIAAGEKWKQEKYAQYTWKKGSKVANGSDILLTQDVLELIRDLNDKNEELKKMIEETFKGFFTYLSGFNQNRKNYYTIKEEKATAVATRIVHENLPKFCDNILFFIDRQTEYLIAHSFLKEKGRDLVNKDGKALLPITDSIFSIEHFNHCFSQKQIEAYNAQIGNANVLINLYNQAHNDEQGFKRLPAFKTLYKQIGCGKRKSLFFTLTCDTEAEASKMRNENKEAFSVEEVLNLAYKAGEKYFQNSIENDSNLTIPKFCSYIEAQQDYDGIYWSKAALNTISNKYFANYHVLKDRLKEVKVFQKAAKGSEEDVKIPEAIELEGLFAVIDEVDGWRDEDIFFKKSLIEERKDEKENKKNKKRLEVIKKAEKPSQALINLIFFDINEHIEQFFDTSKAILSLQEYKSKESKEAIKAWMDHALAVNQILKYFLVKENKTKGNPLDSEISNALKNILFEGKIIFDGKEIDVDWFRWYDALRNYLTKKPQDDAKENKLKLNFKNSTLAGGWDINKEPDNHCVILQDQNDKQYLGVIAKKEKQRGYNKIFEKTPENPLYKIDSGEVWQKMEYKQIAAPTGIGGFVRKCFKTAQQYGWKCPDNCLNSEGKIIIKNDEAKENLEAIIDCYKDFFIKYEKDGFSYKKFSFNFKKSSEYEELNNFFSDVERQGYKLDFTTINKAIIDQWVEDGTIYLFEIKNQDANDGKKEGHKNNLHTIYWKALFENNEDKPKLNGGAELFYRKALPKSKQEKIKDNHGKEIIKNFRFSKEKFLFHCPIKMNYKAKSYSDPKYALTEINNQINEALTTFGDIHFLGIDRGEKHLAYYSLVDKNGEMIDKGTLNLPFIDQEGKPRSIKKPKYFYNKKKDKWESEEINCWDYNDLLDAMASNRDMARKNWQTIGTIKELKEGYISQVVRKIADIVVEHGAFIVLEDLNTGFKRGRQKIEKSVYQKFELALAKKLNFLVDKSAKSGEIGSVTRALQLTPPVNNYGDIEKRKQVGIMLYTRANYTSQTDPETGWRKIIYLKKGNEEAIKEQILQNFTDIWFDGLDYYFEYPNKNKSDKPWKLYSGKGGKSLDRFRRSRGKDKNEWTIEPVNVVNILKQVFVNFDEKRSLRSQIIEGKALARTKEKTDFTAWEALRFAIDLIQQIRNTGNNEKDADFLHSPVRDTNGNHFDSRSVSHDRPTSGDANGAYNIARKGLMMNEHIRTWAKKGKPKYDKNTNDLNLFISEEEWDLYLADKKAWQEKLLMFSSRKAMDEEKKKHI

SEQ ID NO: 1270 - protein, 1367 aa, unidentified
  REGION 1..1367: note = Cas Enzyme sequence
MSVFKSFTNCYALSKTLRFELKPVGKTFENMRTQLAYNKDLQTFLKDQAIEDAYQKLKPLFDKLHEEFITDSLDSDQAKKIDFSEYLALYEAKKELQAIEKKLREEIGKTFIAAGEKWKQEKYAQYTWKKGSKVANGSDILLTQDVLELIRDLNDKNEELKKMIEETFKGFFTYLSGFNQNRKNYYTIKEEKATAVATRIVHENLPKFCDNILFFIDRQTEYPIAHSFLKEKGRDLVNKDGKALLPITDSIFSIEHFNHCFSQKQIEAYNAQIGNANVLINLYNQAHNDEQGFKRLPAFKTLYKQIGCGKRKSLFFTLTCDTEAEASKMRNENKEAFSVEEVLNLAYKAGEKYFQNSIENDSNLTIPKFCSYIEAQQDYDGIYWSKAALNTISNKYFANYHVLKDRLKEVKVFQKAAKGSEEDVKIPEAIELEGLFAVIDEVDGWRDEDIFFKKSLIEERKDEKENKKNKKRLEVIKKAEKPSQALINLIFFDINEHIEQFFDTSKAILSLQEYKSKESKEAIKAWMDHALAVNQILKYFLVKENKTKGNPLDSEISNALKNILFEGKIIFDGKEIDVDWFRWYDALRNYLTKKPQDDAKENKLKLNFRNSTLAGGWDINKEPDNYCVILQDQNDKQYLGVIAKKEKQRGYNKIFEKTPENPLYKIDSGEVWQKMEYKQIAAPTGIGGFVRKCFKTAQQYGWKCPDNCLNSEGKIIIKNDEAKENLEAIIDCYKDFFIKYEKDGFSYKKFSFNFKKSSEYEELNNFFSDVERQGYKLDFTTINKAIIDQWVEDGTIYLFEIKNQDANDGKKEGHKNNLHTIYWKALFENNEDKPKLNGGAELFYRKALPKSKQEKIKDNHGKEIIKNFRFSKEKFLFHCPIKMNYKAKSYSDPKYALPEINNQINEALTTFGDIHFLGIDRGEKHLAYYWLVDKNGEMIDQGTLNLPFIDQEGKPRSIKKPKYFYNKKKDKWESEEINCWDYNDLLDAMASNRDMARKNWQTIGTIKELKEGYISQVVRKIADIVVEHGAFIVLEDLNTGFKRGRQKIEKSVYQKFELALAKKLNFLVDKSAKSGEIGSVTRALQLTPPVNNYGDIEKRKQVGIMLYTRANYTSQTDPETGWRKIIYLKKGNEEAIKEQILQNFTDIWFDGLDYYFEYPNKNKSDKPWKLYSGKGGKSLDRFRRSRGKDKNEWTIEPVNVVNILKQVFVNFDEKRSLRSQIIEGKALARTKEKTDFTAWEALRFAIDLIQQIRNTGNNEKDADFLHSPVRDTNGNHFDSRSVSHDRPTSGDANGAYNIARKGLMMNEHIRTWAKKGKPKYDKNTNDLNLFISEEEWDLYLADKKAWQEKLLMFSSRKAMDEEKKKHI

SEQ ID NO: 1271 - protein, 1367 aa, unidentified
  REGION 1..1367: note = Cas Enzyme sequence
MSVFKSFTNCYALSKTLRFELKPVGKTFENMRTQLAYNKDLQTFLKDQAIEDAYQKLKPLFDKLHEEFITDSLDSDQAKKIDFSEYLVLYEAKKELQAIEKKLREEIGKTFIAAGEKWKQEKYAQYTWKKGSKVANGSDILLTQDVLELIRDLNDKNEELKKMIEETFKGFFTYLSGFNQNRKNYYTIKEEKATAVATRIVHENLPKFCDNILFFIDRQTEYLIAHSFLKEKGRDLVNKDGKALLPITDSIFSIEHFNHCFSQKQIEAYNAQIGNANVLINLYNQAHNDEQGFKRLPAFKTLYKQIGCGKRKSLFFTLTCDTEAEASKMRNENKEAFSVEEVLNLAYKAGEKYFQNSIENDSNLTIPKFCSYIEAQQDYDGIYWSKAALNTISNKYFANYHVLKDRLKEVKVFQKAAKGSEEDVKIPEAIELEGLFAVIDEVDGWRDEDIFFKKSLIEERKDEKENKKNKKRLEVIKKAEKPSQALINLIFFDINEHIEQFFDTSKAILSLQEYKSKESKEAIKAWMDHALAVNQILKYFLVKEDKTKGNPLDSEISNALKNILFEGKIIFDGKEIDVDWFRWYGALRNYLTKKPQDDAKENKLKLNFKNSTLAGGWDINKEPDNYCVILQDQNDKQYLGVIAKKEKQRGYNKIFEKTPENPLYKIDSGEVWQKMEYKQIAAPTGIGGFVRKCFKTAQQYGWKCPDNCLNSEGKIIIKNDEAKENLEAIIDCYKDFFIKYEKDGFSYKKFSFNFKKSSEYEELNNFFSDVERQGYKLDFTTINKAIIDQWVEDGTIYLFEIKNQDANDGKKEGHKNNLHTIYWKALFENNEDKPKLNGGAELFYRKALPKSKQEKIKDNHGKEIIKNFRFSKEKFLFHCPIKMNYKAKSYSDPKYALPEINNQINEALTTFGDIHFLGIDRGEKHLAYYSLVDKNGEMIDHGTLNLPFIDQERKPRSIKKPKYFYNKKKDKWESEEINCWDYNDLLDAMASNRDMARKNWQTIGTIKELKEGYISQVVHKIADIVVKHGAFIVLEDLNTGFKRGRQKIEKSVYQKFELALAKKLNFLVDKSAKSGEIGSVTRALQLTPPVNNYGDIEKRKQVGIMLYTRANYTSQTDPETGWRKIIYLKKGNEEAIKEQILQNFTDIWFDGLDYYFEYPNKNKSDKPWKLYSGKGGESLDRFRRSRGKDKNEWTIEPVNVVNILKQVFVNFDEKRSLRSQIIEGKALARTKEKTDFTAWEALRFAIDLIQQIRNTGNNEKDADFLHSPVRDTNGNHFDSRSVSHDRPTSGDANGAYNIARKGLMMNEHIRTWAKKGKPKYDKNTNDLNLFISEEEWDLYLADKKAWQEKLLMFSSRKAMDEEKKKHI

SEQ ID NO: 1272 - protein, 1367 aa, unidentified
  REGION 1..1367: note = Cas Enzyme sequence
MSVFKSFTNCYALSKTLRFELKPVGKTFENMRTQLAYNKDLQTFLKDQAIEDAYQKLKPLFDKLHEEFITDSLDSDQAKKIDFFEYLALYKAKKELQAIEKKLREEIGETFIAAGEKWKQEKYAQYTWKKGSKVANGSDILLTQDVLELIRDLNDKNEELKKMIEETFKGFFTYLSGFNQNRKNYYTIKEEKATAVATRIVHENLPKFCDNILFFIDRQTEYLIAHSFLKEKGRDLVNKDGKALLPITDSIFSIEHFNHCFSQKQIEAYNAQIGNANVLINLYNQAHNDEQGFKRLPAFKTLYKQIGCGKRKSLFFTLTCDTEAEASKMRNENKEAFSVEEVLNLAYKAGEKYFQNSIENDSNLTIPKFCSYIEAQQDYDGIYWSKAALNTISNKYFANYHVLKDRLKEVKVFQKAAKGSEEDVKIPEAIELEGLFAVIDEVDGWRDEDIFFKKSLIEERKDEKENKKNKKRLEVIKKAEKPSQALINLIFFDINEHIEQFFDTSKAILSLQEYKSKESKEAIKAWMDHALAVNQILKYFLVKEDKTKGNPLDSEISNALKNILFEGKIIFDGKEIDVDWFRWYDALRNYLTKKPQDDAKENKLKLNFKNSTLAGGWDINKEPDNHCVILQDQNDKQYLGVIAKKEKQRGYNKIFEKTPENPLYKIDSGEVWQKMEYKQIAAPTGIGGFVRKCFKTAQQYGWKCPDNCLNSEGKIIIKNDEAKENLEAIIDCYKDFFIKYEKDGFSYKKFSFNFKKSSEYEELNNFFSDVERQGYKLDFTTINKAIIDQWVEDGTIYLFEIKNQDANDGKKEGHKNNLHTIYWKALFENNEDKPKLNGGAELFYRKALPKSKQEKIKDNHGKEIIKNFRFSKEKFLFHCPIKMNYKAKSYSDPKYALPEINNQINEALTTFGDIHFLGIDRGEKHLAYYSLVDKNGEMIDKGTLNLPFIDQEGKPRSIKKPKYFYNKKKDKWESEEINCWDYNDLLDAMASNRDMARKNWQTIGTIKELKEGYISQVVHKIADIVVKHGAFIVLEDLNTGFKRGRQKIEKSVYQKFELALAKKLNFLVDKSAKSGEIGSVTRALQLTPPVNNYGDIEKRKQVGIMLYTRANYTSQTDPETGWRKIIYLKKGNEEAIKEQILQNFTDIWFDGLDYYFEYPNKNKSDKPWKLYSGKGGKSLDRFRRSRGKDKNEWTIEPVNVVNILKQVFVNFDEKRSLRSQIIEGKALARTKEKTDFTAWEALRFAIDLIQQIRNTGNNEKDADFLHSPVRDTNGNHFDSRSVSHDRPTSGDANGAYNIARKGLMMNEHIRTWAKKGKPKYDKNTNDLNLFISEEEWDLYLADKKAWQEKLLMFSSRKAMDEEKKKHI

SEQ ID NO: 1273 - protein, 1367 aa, unidentified
  REGION 1..1367: note = Cas Enzyme sequence
MSVFKSFTNCYALSKTLRFELKPVGKTFENMRTQLAYNKDLQTFLKDQAIEDAYQKLKPLFDKLHEEFITDSLDSDQAKKIDFSEYLVLYEAKKELQAIEKKLREEIGKTFIAAGEKWKQEKYAQYTWKKGSKVANGSDILLTQDVLELIRDLNDKNEELKKMIEETFKGFFTYLSGFNQNRKNYYTIKEEKATAVATRIVHENLPKFCDNILFFIDRQTEYPIAHSFLKEKGRDLVNKDGKALLPITDSIFSIEHFNHCFSQKQIEAYNAQIGNANVLINLYNQAHNDEQGFKRLPAFKTLYKQIGCGKRKSLFFTLTCDTEAEASKMRNENKEAFSVEEVLNLAYKAGEKYFQNSIENDSNLTIPKFCSYIEAQQDYDGIYWSKAALNTISNKYFANYHVLKDRLKEVKVFQKAAKGSEEDVKIPEAIELEGLFAVIDEVDGWRDEDIFFKKSLIKERKDEKENKKNKKRLEVIKKAEKPSQALINLIFFDINEHIEQFFDTSKAILSLQEYKSKESKEAIKAWMDHALAVNQILKYFLVKEDKTKGNPLDSEISNALKNILFEGKIIFDGKEIDVDWFRWYDALRNYLTKKPQDDAKENKLKLNFRNSTLAGGWDINKEPDNYCVILQDQNDKQYLGVIAKKEKQRGYNKIFEKTPENPLYKIDSGEVWQKMEYKQIAAPTGIGGFVRKCFKTAQQYDWKCPDNCLNSEGKIIIKNDEAKENLEAIIDCYKDFFIKYEKDGFSYKKFSFNFKKSSEYEELNNFFSDVERQGYKLDFTTINKAIIDQWVEDGTIYLFEIKNQDANDGKKEGHKNNLHTIYWKALFENNEDKPKLNGGAELFYRKALPKSKQEKIKDNHGKEIIKNFRFSKEKFLFHCPIKMNYKAKSYSDPKYALPEINNQINEALTTFGDIHFLGIDRGEKHLAYYWLVDKNGEMIDQGTLNLPFIDQEGKPRSIKKPKYFYNKKKDKWESEEINCWDYNDLLDAMASNRDMARKNWQTIGTIKELKEGYISQVVRKIADIVVEHGAFIVLEDLNTGFKRGRQKIEKSVYQKFELALAKKLNFLVDKSAKSGEIGSVTRALQLTPPVNNYGDIEKRKQVGIMLYTRANYTSQTDPETGWRKIIYLKKGNEEAIKEQILQNFTDIWFDGLDYYFEYPNKNKSDKPWKLYSGKGGKSLDRFRRSRGKDKNEWTIEPVNVVNILKQVFVNFDEKRSLRSQIIEGKALARTKEKTDFTAWEALRFAIDLIQQIRNTGNNEKDADFLHSPVRDTNGNHFDSRSVSHDRPTSGDANGAYNIARKGLMMNEHIRTWAKKGKPKYDKNTNDLNLFISEEEWDLYLADKKAWQEKLLMFSSRKAMDEEKKKHI

SEQ ID NO: 1274 - protein, 1367 aa, unidentified
  REGION 1..1367: note = Cas Enzyme sequence
MSVFKSFTNCYALSKTLRFELKPVGKTFENMRTQLAYNKDLQTFLKDQAIEDAYQKLKPLFDKLHEEFITDSLDSDQAKKIDFSEYLALYKAKKELQAIEKKLREEIGKTFIAAGEKWKQEKYAQYTWKKGSKVANGSDILLTQDVLELIRHLNDKNEELKKMIEETFKGFFTYLSGFNQNRKNYYTIKEEKATAVATRIVHENLPKFCDNILFFIDRQTEYPIAHSFLKEKGRDLVNKDGKALLPITDSIFSIEHFNHCFSQKQIEAYNAQIGNANVLINLYNQAHNDEQGFKRLPAFKTLYKQIGCGKRKSLFFTLTCDTEAEASKMRNENKEAFSVEEVLNLAYKAGEKYFQNSIENDSNLTIPKFCSYIEAQQDYDGIYWSKAALNTISNKYFANYHVLKDRLKEVKVFQKAAKGSEEDVKIPEAIELEGLFAVIDEVDGWRDEDIFFKKSLIEERKDEKENKKNKKRLEVIKKAEKPSQALINLIFFDINEHIEQFFDTSKAILSLQEYKSKESKEAIKAWMDHALAVNQILKYFLVKENKTKGNPLDSEISNALKNILFEGKIIFDGKEIDVDWFRWYDALRNYLTKKPQDDAKENKLKLNFRNSTLAGGWDINKEPDNHCVILQDQNDKQYLGVIAKKEKQRGYNKIFEKTPENPLYKIDSGEVWQKMEYKQIAAPTGIGGFVRKCFKTAQQYGWKCPDNCLNSEGKIIIKNDEAKENLEAIIDCYKDFFIKYEKDGFSYKKFSFNFKKSSEYEELNNFFSDVERQGYKLDFTTINKAIIDQWVEDGTIYLFEIKNQDANDGKKEGHKNNLHTIYWKALFENNEDKPKLNGGAELFYRKALPKSKQEKIKDNHGKEIIKNFRFSKEKFLFHCPIKMNYKAKSYSDPKYALPEINNQINEALTTFGDIHFLGIDRGEKHLAYYWLVDKNGEMIDQGTLNLPFIDQEGKPRSIKKPKYFYNKKKDKWESKEINCWDYNDLLDAMASNRDMARKNWQTIGTIKELKEGYISQVVRKIADIVVEHGAFIVLEDLNTGFKRGRQKIEKSVYQKFELALAKKLNFLVDKSAKSGEIGSVTRALQLTPPVNNYGDIEKRKQVGIMLYTRANYTSQTDPETGWRKIIYLKKGNEEAIKEQILQNFTDIWFDGLDYYFEYPNKNKSDKPWKLYSGKGGKSLDRFRRSRGKDKNEWTIEPVNVVNILKQVFVNFDEKRSLRSQIIEGKALARTKEKTDFTAWEALRFAIDLIQQIRNTGNNEKDADFLHSPVRDTNGNHFDSRSVSHDRPTSGDANGAYNIARKGLMMNEHIRTWAKKGKPKYDKNTNDLNLFISEEEWDLYLADKKAWQEKLLMFSSRKAMDEEKKKHI

SEQ ID NO: 1275 - protein, 1367 aa, unidentified
  REGION 1..1367: note = Cas Enzyme sequence
MSVFKSFTNCYALSKTLRFELKPVGKTFENMRTQLAYNKDLQTFLKDQAIEDAYQKLKPLFDKLHEEFITDSLDSDQAKKIDFSEYLALYEAKKELQAIEKKLREEIGKTFIAAGEKWKQEKYAQYTWKKGSKVANGSDILLTQDVLELIRDLNDKNEELKKMIEETFKGFFTYLSGFNQNRKNYYTIKEEKATAVATRIVHENLPKFCDNILFFIDRQTEYPIAHSFLKEKGRDLVNKDGKALLPITDSIFSIEHFNHCFSQKQIEAYNAQIGNANVLINLYNQAHNDEQGFKRLPAFKTLYKQIGCGKRKSLFFTLTCDTEAEASKMRNENKEAFSVEEVLNLAYKAGEKYFQNSIENDSNLTIPKFCSYIEAQQDYDGIYWSKAALNTISNKYFANYHVLKDRLKEVKVFQKAAKGSEEDVKIPEAIELEGLFAVIDEVDGWRDEDIFFKKSLIEERKDEKENKKNKKRLEVIKKAEKPSQALINLIFFDINEHIEQFFDTSKAILSLQEYKSKESKEAIKAWMDHALAVNQILKYFLVKENKTKGNPLDSEISNALKNILFEGKIIFDGKEIDVDWFRWYDALRNYLTKKPQDDAKENKLKLNFRNSTLAGGWDINKEPDNYCVILQDQNDKQYLGVIAKKEKQRGYNKIFEKTPENPLYKIDSGEVWQKMEYKQIAAPTGIGGFVRKCFKTAQQYGWKCPDNCLNSEGKIIIKNDEAKENLEAIIDCYKDFFIKYEKDGFSYKKFSFNFKKSSEYEELNNFFSDVERQGYKLDFTTINKAIIDQWVEDGTIYLFEIKNQDANDGKKEGHKNNLHTIYWKALFENNEDKPKLNGGAELFYRKALPKSKQEKIKDNHGKEIIKNFRFSKEKFLFHCPIKMNYKAKSYSDPKYALPEINNQINEALTTFGDIHFLGIDRGEKHLAYYSLVDKNGEMIDHGTLNLPFIDQERKPRSIKKPKYFYNKKKDKWESEEINCWDYNDLLDAMASNRDMARKNWQTIGTIKELKEGYISQVVHKIADIVVKHGAFIVLEDLNTGFKRGRQKIEKSVYQKFELALAKKLNFLVDKSAKSGEIGSVTRALQLTPPVNNYGDIEKRKQVGIMLYTRANYTSQTDPETGWRKIIYLKKGNEEAIKEQILQNFTDIWFDGLDYYFEYPNKNKSDKPWKLYSGKGGKSLDRFRRSRGKDKNEWTIEPVNVVNILKQVFVNFDEKRSLRSQIIEGKALARTKEKTDFTAWEALRFAIDLIQQIRNTGNNEKDADFLHSPVRDTNGNHFDSRSVSHDRPTSGDANGAYNIARKGLMMNEHIRTWAKKGKPKYDKNTNDLNLFISEEEWDLYLADKKAWQEKLLMFSSRKAMDEEKKKHI

SEQ ID NO: 1276 - protein, 1367 aa, unidentified
  REGION 1..1367: note = Cas Enzyme sequence
MSVFKSFTNCYALSKTLRFELKPVGKTFENMRTQLAYNKDLQTFLKDQAIEDAYQKLKPLFDKLHEEFITDSLDSDQAKKIDFSEYLALYKAKKELQAIEKKLREEIGKTFIAAGEKWKQEKYAQYTWKKGSKVANGSDILLTQDVLELIRDLNDKNEELKKMIEETFKGFFTYLSGFNQNRKNYYTIKEEKATAVATRIVHENLPKFCDNILFFIDRQTEYLIAHSFLKEKGRDLVNKDGKALLPITDSIFSIEHFNHCFSQKQIEAYNAQIGNANVLINLYNQAHNDEQGFKRLPAFKTLYKQIGCGKRKSLFFTLTCDTEAEASKMRNENKEAFSVEEVLNLAYKAGEKYFQNSIENDSNLTIPKFCSYIEAQQDYDGIYWSKAALNTISNKYFANYHVLKDRLKEVKVFQKAAKGSEEDVKIPEAIELEGLFAVIDEVDGWRDENIFFKKSLIEERKDEKENKKNKKRLEVIKKAEKPSQALINLIFFDINEHIEQFFDTSKAILSLQEYKSKESKEAIKAWMDHALAVNQILKYFLVKENKTKGNPLDSEISNALKNILFEGKIIFDGKEIDMDWFRWYGALRNYLTKKPQDDAKENKLKLNFRNSTLAGGWDINKEPDNYCVILQDQNDKQYLGVIAKKEKQRGYNKIFEKTPENPLYKIDSGEVWQKMEYKQIAAPTGIGGFVRKCFKTAQQYGWKCPDNCLNSEGKIIIKNDEAKENLEAIIDCYKDFFIKYEKDGFSYKKFSFNFKKSSEYEELNNFFSDVERQGYKLDFTTINKAIIDQWVEDGTIYLFEIKNQDANDGKKEGHKNNLHTIYWKALFENNEDKPKLNGGAELFYRKALPKSKQEKIKDNHGKEIIKNFRFSKEKFLFHCPIKMNYKAKSYSDPKYALPEINNQINEALTTFGDIHFLGIDRGEKHLAYYSLVDKNGEMIDKGTLNLPFIDQEGKPRSIKKPKYFYNKKKDKWESEEINCWDYNDLLDAMASNRDMARKNWQTIGTIKELKEGYISQVVRKIADIVVEHGAFIVLEDLNTGFKRGRQKIEKSVYQKFELALAKKLNFLVDKSAKSGEIGSVTRALQLTPPVNNYGDIEKRKQVGIMLYTRANYTSQTDPETGWRKIIYLKKGNEEAIKEQILQNFTDIWFDGLDYYFEYPNKNKSDKPWKLYSGKGGKSLDRFRRSRGKDKNEWTIEPVNVVNILKQVFVNFDEKRSLRSQIIEGKALARTKEKTDFTAWEALRFAIDLIQQIRNTGNNEKDADFLHSPVRDTNGNHFDSRSVSHDRPTSGDANGAYNIARKGLMMNEHIRTWAKKGKPKYDKNTNDLNLFISEEEWDLYLADKKAWQEKLLMFSSRKAMDEEKKKHI

SEQ ID NO: 1277 - protein, 1368 aa, unidentified
  REGION 1..1368: note = Cas Enzyme sequence
LSEDDLRRTLVDGNSGKNGIPIGECNYMTTIPKQTQRAYTLRLTGIDDETWRDRLWATHQLVNTGARVFGDWLLTLRGGLPHELAEEGKPEQRSDRRIALALSWLSVESEVGSPEQYRVPRAWKDKSNPGRWQVADALRDILRERGLDKDEIKSWIQHCEASLGAEIREDAVWVNRSRAFDSFCAQTGLPPDRGIAADNVFFFLDRKSYFTLPKPGDSTVPDETVPNENSLNLVQKAANWLSRNWGSGPKSDRDAIQCALRSISQLDYESLLGQPGEAVLSFIARSLHFEPPEGAEWTLQTLKKAIGWRSGRTSSSALVLEKIARAATLTHELLEDLEKKCQKDSDKSGVPLGLNEWRGYLEEQIGVAFRTHRNNIGEFSVMLDHGARHVSVAHTWILRQEEERRTFTNDAERIRDVPAPARVFLDSYCEQRSLDTGAVEEYRIRRRAIGGWDEVVSAWTAPACVTDEDRIEAARNVQAEDVEGAKFGDIQLFEALAVEEAKCVWQSKNGGPDSKILKDYVYACHAEERRRRFKVPAYRHPDPLEHPVYCDFGDSRFDVTYGVQGKKRGQASHNDVTITVCDGSSFGKLALRWQSRRFEEDIARHAPRESKKTDAVEVTRADRLGRAAAGTIDGDQVSVMAVFEEENWNARLQAPRRQLEEAARALRSKRLTEAERQAAFKKRLKKVGWFLTISPKLQPMGPWVDYANTHGLTKNPKKVFDWKQKLEPQRGWLSYAPLCRLPALRVVSVDLGHRFGAACAVLQTVATANVRAMCEKAGVQSPEPDQLNYSFSVPDGGEGREHKTLLRRIGPDTLPDGSPHPAPWAIVERQFTIKLAGEDEEVRTLRKSEWVEVRGYLEALGVAARELKDRAVDKAMDECVWQMRQALRRHGDAARVASAMKSTEADPSKQREELIKALGIWHAQGHVPYAAELWNRYLIPLVERLNLGLTIGTAVSARKRKKGENRESLALVAEQLTPQERLAIGKAWHKLWTEQDAAIKMQLRWLRRWLMPRRAHWSVLRNVGGLSVPRLTRLRELYQLEKAFFTRLTPDGRRMRTTESGDEIAVTAQEHFGQRILDQLDELRTNRVRQLSSRITAAALGLGKDLKPRYAPCHGVVIENLENYRPDETRVRVENRRLMNWSSGKMRDLLQDACELNGLLLMQVSANYTSRQDSRTGAPGLRCVDVPAKDFFAPESWYQRQIEKAQERKAKGKPDARDLLLADLFDRGIEGLRRQTVRIPARGGELFVSAEAASPARNGLQADLNAAVNIGLRAITDPDWPCRWWYVPCAAKSGTPVKDKVKGSPLFVDAAAMPIAGELPQKRETVNLWRDVTMHPLTDPHRPWKPTVEYWKDVEVRVVEILRAWNGL

SEQ ID NO: 1278 - protein, 1369 aa, unidentified
  REGION 1..1369: note = Cas Enzyme sequence
MNRIYQGKVTAVEIPDGKDEQGKPLDIDVLWRHHELFQDAVNYYLVCLLSLATDLESEMAKLCGRITKDGSETYVWGSFRKRGVTRQGMQKSVAQYLTPKNDAPTFEQASAAVLAGNTIAATTEGRAALAAGLRQLLSKCTGGSGCRNAAPEFLPRFCKPDFGGNYAEDKAAIARQADKLRFPFVLHDPATRPDSASLNSFHVHSIALPNPKKPEFKEAEAIGKLREMISAWRQRQPDSNADWTQLEEKIAKLPESLVIPGYAATSAKGDIKFRLFAMFLFRYVEQSEFTFQLLRSTTPVPKAGEKPSATESNISESAGDPIRIARGARGYVFRAFTTLPCWGGNESGKIQWEKFDVAAFEEALKALHQVEEKGKERAKELARKQARHDYQRGKSKKWKSEGGTDEDSRPPVLAGDERIERLEQLVDVELRVEYEMSEGVEVKYGLQQRTIRGFKELQKIWSKELDPAESYSDEAHERLATKLREYQKDNSQIVGSVRLFASLLDKPNWIIWREPTTAQKDQWRKNAKLPDDAEFTSDPLQALTDERELKEEISRLAEPIRLTPADAQHSRRQFYFSDAAKFTERGEYRHEPNQRTVIVPLAMRGNGVLRQTRVRLRYSAPRLLREGLRADAGENLGAMPWLQPMMAALGLPEPMPQDFRDCPVALMPDFAASGEKRILLNFPLTLDTDALVKQLGKTARWDNYQFGGADGESYWLRWPSTWAVKAKSRPWWESGESFRCLSVDLGQRDAGAFAVLEASAGNAPKPQSRKLGEIGDKTWWSTVRAIGMLRLPGEDALVLRDRKWQEEFSGERGRLATLDEWNEARDISAKLGVDTKILGDDPKRHSFPELNDQLLFALRRAQGRLARLQSWSCIAADEKRRASIAEQIREADEDPLGLKPLETKQAWELIAAKLIVELEKDRATIQRELLRIADRIQPLRGRRWEWVLRDDGSHCYFLRQTHRDTDPRPKLLAGQRGLSMERIEQLESLRQRCQSLNRALMQTPGQPAKLGRSKRGIELPDPCPELLDRLEKLKEQRVNQTAHLILAQALGVRLRSHTQDAVARERHDIHGEYEKFREPVDFLVLENLDRYLASQGRSRGENSRLMKWCHRAILGKLKQLCEPYGLRVLETPAAYSSRFCSLTSVAGFRAVELTPDSREEFRWRKHLERLADPERIKKLSKDERKESQRVKALFDTLEKLNAELLKNRPARPKWRTLLAPVAGGPIFVPMRGNPQQADINAAINLGLRTIAAPENYEIHLRLRSKREGDRFFVRAENLREKARWKTDKHEIKPLEGESLASLLTENYPNFFADIGAVASFDRAEISSRRGFASGRGLWGTINQNDWQRVEELNRARIQKSERGDDNIPM

SEQ ID NO: 1279 - protein, 1369 aa, unidentified
  REGION 1..1369: note = Cas Enzyme sequence
MNRIYQGKVTAVEIPDGKDEQGKPLDIDVLWRHHELFQDAVNYYLVCLLSLATDPESEMAKLCGRITKDGSETYVWGSFRKRGVTRQGMQKSVAQYLTPKNGAPTFEQASAAVLAGNTIAATTEGRATLAAGLRQLLSKCTGGSGCRNAAPEFLPRFCKPDFGGNYAEDKASIARQADKLRFPFVLHDPATRQDSVSLDSFHVHSIALPNPKKPEFKEVEAIGKLREMVSAWRERQPDSTADWTRIEEKIAKLPEGFVIPGYAATSAKGDIKFRLFAMFLFRNVEQSEFTFQLLRSTTPVPKAGVKPPATESNITKSAGDPIRLARGARGYVFRAFTSLPCWGGNESSKIQWEKFDVAAFEEALKALHQVEEKGKERAKELARKQARHDYQRGKSKKWKSEGGTDEDSRPPVLAGDERIERLEQLVDVELRVEYEMSEGVEVKYGLQQRTIRGFKELQKIWSKELNPAESYSDEVRERLATKLREYQKDNSQIVGSVRLFAALLDEPNWIIWREPTTAQKDQWRENAKLPDDAEFTSDPLQALTDERELKEEISHLAEPIRLTPADAQHSRRQFYFSDAAKFTERGEYRHEPNQRTVIVPLAMRENGVLRQTRVRLRYSAPRLLREGLRADAGENLGAMPWLQPMMAALGLPEPMPQDFRDCPVALMPDFAASGEKRILLNFPLTLDTDALVKQLGKAARWDNYQFGGADGESYWLRWPSTWAVKAKSRPWWESGESFRCLSVDLGQRDAGAFAVLEASAGNAPKPQSRKLGAAGDKTWWSTVRAIGMLRLPGEDALVLRDGKWQEEFSGERGRLAKPDECNEALDICAKLGVDVKILGDDPKRHSFPELNDQLLFALRRAQARLARLQSWSCIAADEKRRASIAEQIREADEDPLGLKPLETKQAWELIAAKLIVELEKDRATIQRELLRIADRIQPLRGRRWEWVLRDDGSHCYFLRQTHRDTDLRPKLLAGQRGLSMERIEQLESLRQRCQSFNRALMQTPGQPAKLGRSKRGIELPDPCPELLDRLEKLKEQRVNQTAHLILAQALGVRLRSHSQDAVARERHDIHGEYEKFREPVDFLVLENLDRYLASQGRSRGENSRLMKWCHRAILGKLKQLCEPYGLRVLETPAAYSSRFCSLTSVAGFRAVELTPDSREEFRWRKHLERLAAPERIKKLSKDEREESQRVKALFETLEKLNAELLKNRPARPKWRTLFAPLAGGPIFVPMRGNPQQADINAAINLGLRTIAAPENYEIHLRLRSKREGDRFFVRAENLREKARWKTDKHEIKPLEGESLASLLTENYPNFFADIGAVANFDRAEISGKRGFASGRGLWGTINQNDWQRVEELNRARIQKWERGDDDIPM

SEQ ID NO: 1280 - protein, 1370 aa, unidentified
  REGION 1..1370: note = Cas Enzyme sequence
MNKVNNKKSVFNGFTNLYELSKTLRFELKPVENTQKMLDEADVFGKDKIIQEKYQQTKPFIDRLHREFVDEALSQSPLSDLKNYFKIFEIWRENKKDKEIIKKLKNEAEGLRKEIVGFFNTTAKHWAGEKYKNLGLKNKDIGILFEKGVFDLLKEKYGKEDNAFLKDEYSNFLKNEKGEKLSIFDEWKGFVGYFTKFQETRKNFYKDEGKAGQIATRIIDQNLKRFCDNLKDFKKIKNKIDFSEIEKNFGKTANDVFSFDFYNQCLLQEGIDSYNEFIGGKTLKNGEKLKGINELINKYRQDKKGEKPSFLKLLHKQILSEKEKFIIGIENDDKLIEALKSFYKTAEEKTKILRTLFSDFVEHNENYDLSKTYISKEALNTIAYKWTGDTKKFEECIFEVINQKEIREWYDSFRKDKKDPKVDKDENGYKFPNFIILQHLKDGLEKNKEERLWKEKYYKNEDNKKDKGFLTGKENAWDQFLQIFNFELNSLFKKEIEHFIDKNKNFNKKLEQFQNTEKVLESNEKEGKIKTEIGYSIFRKHFENIINKKEFKNDENSKIAIKNFADSVLWIYQMAKYFAIEKKRNWNDDYELSEFYTNSDRGYLLFHKNAYEEIIKTYNDLRNYLTKKPYSEEKRKLNFENPTLANGFDKNKESDNSAVILLKDGKYYLGLMKKGNNKIFDDRNNAEFVKNIENGVYKKIVYKLFSDPKKDFPHVCFSKKGLDFFKPSEVIVKIYENKEFKKGNNFSVVKMQKLIGFYIDCLSKYDGWRCYDFTSVKKPESYTENIDEFYRDVSQNGYKISFKDISRSYIDEKNKNGELYLFKIYNQDFAEGKTGKKNLHTLYFENVFSPENIAKNFPIKLNGQAELFFRPKKEEAGLGYKKWDKKEKKWVKVKNRENGSVIDRKRYSEDKIFFHCPITLNRGKGSLYGFNNYINDFLSENDINIIGVDRGEKHLAYYSVIDPKGKILDSGSFNEINKVNYAEKLEERAGDREQARQDWQSVEGIKDLKRGYISQVVRKLADLAIEHNAIIVLEDLNMRFKQIRGGIEKSIYQQLEKALIDKLSFLVEKGEKDPNQAGHLLKAYQLAAPFTSFKEMGKQTGIIFYTQASYTSKTCPQCGFRKNNNKFYFENNIGKAENVLKKLKTFEYNDKNQCFNLSYSLSEFMSNEDAERNKNKKRSNVLYSNINKKDLFSINTKGAIRYRWHDKNTERGKIILDGESVYEEGQSEEVKNTKRGIVKKYDITKCLFSLFEGAKLDYKQNLLDKLLSEKFDSNFYKNLFNYLNLLFEIRNSISGTEIDYISCPKCGFCSDDESAIVKNGDENGAYNIARKGIMVLEKIKQYKKENGILDKMNWGDLFIDIDEWDKFVQK

SEQ ID NO: 1281 - protein, 1370 aa, unidentified
  REGION 1..1370: note = Cas Enzyme sequence
MNRIYQGRVTCVETLSPNQTATSAAPWSPAAGGDELLWQHHALFQDAVNYYLVALLALAAPTNKALGQLRRRIATAGDEFQIWGSFRRGGANRRGLRDSVAPYLTPGHASPTVEEAYAVVLAGNASESTITDAAVSALLDACDGAGAIQQEGRAYWPKFCDPNTAANFAGDPLMLRRKQHQELLPRVLHDPATTFNAPALVEFDVYSIATPDAKHPELIGPKAKARLNQAIALWHQRLPAASSEFDRLTHLVEKFPADLVLPGYVGSSAKGEVQARLFALLLFKYLERSPFTFGLLRASTPLPRQRDLQPSIPAKPDPTATADPIRLARGSRGYVFRAFTSLPCWNPANTAEPQWKEFDIAAFKYALTALNQIEEKTKERTIEAKKAQARLDFMLGKTAKFAGAADEEEPPPVIAGDPRIERLKAVLSSDALRVSNALTDGESTDYGLQPRTIRGFRDLRKLWRRHLTPGEAFSELKQAKLHEELREFQTEHSETIGSAALFEALLAPGNWLIWQEPAPELAAAWAAAGFATDPNDPLTALVETRELEEKLNHLKEPIRLTPADPVHSRRQYDFNAVTKFSAGPKAKYRHEPQALAFTTEIAVREAGIWQRKPVRLTYSAPRLLRDGLRNEGGSANLAAARWLQPMMEALAPAPTLPQDLTDCAVCLMPDITVGGDRRVLLNFPVTLTPDELVKQLGRAAEWAGQFCGPKDEPFSLRWPADDWPTGKEASAWYHRDQPFTVLGIDLGTRDAGAIAHLTVTPSTPHKPVHRVLGTAVGKTWYASLTGPQLIRLPGEDAKVFTAGESAPATEPFGERGRLTSEAESFHAAELIRALGEDPDKLLGPADPKSEARRFFPLQNDKLLVALRRAQARLAHLQSLSWRLRTDAKREEARAEIAKEHPTRASLSSSELTAAIDRDLLAQRDLTTRSLVEIANRVVPLRGRRWVWIPREDGTRAHWLCQTEPGSDPVPRQIAGQRGLSHERIEQLEELRRRCQSLSRALSHQPGEPVRFGRSTRGDELPDPCPDLLQKIEHLRDQRVDQTAHAILAAALGVRLRAPVKDPVTRRARDIHGEYERFRDPVAFIVIEDLSRYLSSQDRARRENTRLMRWCHRQLVTKLRQLCETYGLPVLATPAAYSSRFCSRSSAAGFRAVELVPSARHEAPWRWTLARLTAHRSGEKKLERDALTEAERVDAFFDELDRINTGRTEAGKKPRTLLAPIAGGPVFVPLGDSPAMQADLNAAANIALRGIAAPDCHDIHQRIKTERTKNGLQLRRKTNREKARWPEGVPDLTIQSQSGETDRTPNLFVDVAQISDRDGRAQLAGIDQAFATSRGLWTAVKRRAWSRCEQLNRARIAKWQNDEPIDGHPEL

SEQ ID NO: 1282 - protein, 1370 aa, unidentified
  REGION 1..1370: note = Cas Enzyme sequence
LRSRHLCEEEVNQWVVDCRDSLSAKIREDAVWVNRSKAFDLAKARKGASLSREDIWDFLQPFFGNNYSYLKMKTAVTNTSENSEADSEESKDEPSEEKAKDLSQKAGQWLSSRFGTGTGADFCRFYEVYDAMAKHCQNIQAGMSGAAVCGSLADALHGFSPSSRSINGILELISGPGYKSATRNVLQQINNMQSVSQLDIDRVRDASEKDAQQSREKVGGKGSRPYANAVLQDVEAASGITYHNACNGPSHHWQYAVILDHAARRVSMAHSWIKRAEEERSKFEIEKDKLQCVPSDARAWLDAYCARRSSESGAIDAYRIRRSAVDGWKQVVAEWAALLAKAKNAGSELPSEAESARIQAARELQDTIEKFGDIQLFEALSLPDAKCVWLTNGKPDAQPLMDYVAGTDAVSKKQRFKVPAYRHPDAFLHPVFCDFGNSRWSIDYAVHRAPEKLARAQQLLEKKKEELTRAEQALSKASDPSKRSSIEKKLKTLNVAFKQQEAEVLWLESHHAMTMGLWNGSRIEDTPLLWQSKRFGSDIGQAGAEHPLVASRADRFGRAVAMAKDNAPVVPSGLFDLADWNGRLQAPRRQLDAIAAIHDRTDLSVEEKRQLVAKRIRTIRWLVTFSAKLQSRGPFIAYAAQHGFDWRYGAHGIENKSREGLAKLVLCRLPGLRILSVDLGHRYAAACAVWETLSAAQMQNACLEAGMEAPSQRTLYLHLKHFVNGKEKKTIYRRIGAETLPDGSPHPASWARLDRQFLIKLQGEDRDARQATCDEVVAVEQLETELGYVRPIKRKGREHLVDELMSDALRTLRLGLQRHGARARIAFNLTATKRTRPGGIQELLDQESRIGLLTETLLEWNELYAGERWADELARDMWNKHIQPLLGGTILQETNNQDVTPSAAKRRMQREETREKLRPVAKQIAENDSLCRQLNVLWSTRWQIEDAAWRMRLRWMRRWLLPRGINRDPQFRKSIRDVGGLSLIRIASFKSLYQVQKAYWMRPHPDDLRRNIPERGDSSLTSFGQRVLDAMERMRENRVKQLASRIAEAALGIGDETSVNAKNGRRKRPTERSNDPRFAPCHAVVIEDLTHYRPDETQTRRENRQLMSWSSSKVKKYLGEACQLNGLYLREVPPAYTSRQDSRTGAPGLRCNDVAVPEFNSSRFWRKQVEAAEKNQKDGKKGDARERYLLSIDERIRSEANDRDVFRIPVKGGEIFVSACGQDGGSNANRKAPPGLQADLNAAANIGLRAIFDPDWEGRWWYIPCDATTICPVEKKFNGCKAVDSSKPLRIVAEKVAVSSSSINEKRSGRKGIALTDGSRIVNLWRDPSGAPIRRDVPSNSEWQDYAEYWNKVQSRVIANLRKSYGLREI

SEQ ID NO: 1283 - protein, 1371 aa, unidentified
  REGION 1..1371: note = Cas Enzyme sequence
LLTITKIIISRTIDRSQLIAENAEKKERMLDMNKTAEKTLKNFTNQFPVSKTLRFELKPIGETLEYIKVNNILNEDRIREENYQELKKVLDREYNDMLTRILKNFETDWINLADALTLNSDVVNRREIVNEEKEKVAGKLNEHIRKNTKNMFTEKFLKAVLEYEDITDRERQLIEHFKGFSTYLTTYFQNRENIFLETGKGVSAINRIVNENFPRFLDGVKNYKKIINNEKVITEIRDNIRKNEEFGVDDLDEFFKVENFNNLIDEDGIERYNALIGGFTKESGKKIQGLNEIINEYNQKSVSKIKRFTALYKQPLSPKNTISWVPDIIKDDEELFDTINGYLETIPEKFTESIESLYNNCIEKNNFAIKIQLLNNISNAIFKDWSYLNQKIEEKLVRENQQEKGEKSLSKKEKEKIKKSLEESASNKISMYEIKNSISEDEYDSVTLWLKSEAIAKAETAQKEKEKYVTNISRGAKIKGNDRNEESVKQLLESFNELLKFISHHELKLGDDNQTSFQESLEILSSVNLVYNKARNYITKKEDVEDKIKLNFSTPMLGSGWSKSKERENLTIILRRKINGKYMYYLGIMKKKEKIDFEEMISEDAETYEKMEYFLFPDAAKMIPKCSITTKEVKNAFEKNGKNEIILSGGNFTQPLKISRELYELYNPSYCDKEGEVYEDKTFTTKFIRNKWINPELEGIGSEEKKLKENDKYKLDVYKEALAKWIDFSKDFLSKYKGTSIFDFSHLKKSEEYRALDEFYNDINKAAYKIEFVNLSKNKIDRLVEEGKLYLFQIYNKDFSEHSRGKENLHTIYFKEIFSEENLENPIHKLSGGAEIFYRKKSEKNSFSHKKGEYLVNKTYFSQEKDGKKIYKNLPEELYMDICKILQECKKTDKKYDKDLEICVKKWNKSHKGDIEIKTEQIEINRAKYEIKKDKRFFENKYFLHVPIEMNFVAENGKNKLNSRIIEHLIKNKDGENAKEIKYLGVDRGERNLISLCLVNSKGEIEHQENINLVETNRNGKGIINVDYNEKLSSKAKTREEERKNWKSISNIRNLKEGYLSGVVHKVAKMAIEENAIIIMESLNTGFKRSRQKIEKSIYQKFEKMLMNKLSFLVEKNIQMGPGSIREPIQLTREFKEEKDLKGHNGIIFYISPFWTSQIDPATGFVRNFKEKKNGRKIRVITEDSLLSLRYISPEEGFKFKIDFSKMERIFELKNNIWEIYTIGEKFIFNSDRKSIDIVNVTEKLEAVFNSENIEYKESQELREIVLENKKLLKTVDCWFKERTKLRNKNENQDFILSPVKNSAGKFFNSKDDFEGLPKDSDLNGAYNIALKGKFKIEKTAEKYKDGKINLYKMNDSEWLDDYQKRLYFKH

SEQ ID NO: 1284 - protein, 1371 aa, unidentified
  REGION 1..1371: note = Cas Enzyme sequence
MSDSGQFTGLYQISKTLRFELKPIGRTKDTFKQWLKEINNADDENNLFAQDLGIKNAYQALKPIMDNLHEQFINMSLLSTEAKEIDFSQYFEAYRKKDAEKFEKGLRKKIGDTYQVAGKHFLEEISKYEQFTEKELNKIKKEPFRCITYAKVLNYLLANIKEFAKAGDLKEDELKKHLSRLKGFWGYLDGYNTNRENYYITDKEASTAVATRIVYENLPIFCDNILRFEKCREEYLGVYRYLEDIDRELKTKNEYGEEVDAEAINDTFFQIEHFNNCLAQSQIDKYNHIIGNYNYLINLYNQARRREEKGFRKIEEFEKIRKQIGCGKKKSLFETLHNDNELKNLLQKAKETGDYMFVGGDTKTEIDTLPAFIKFLQECNDWEGIYMSSAAVNKISNQYFANWHSIKDKLKEENACATYDKNREEPVKLRDAVELSGLFTVLDTEKSELFFKESLFKDDTTNEYRGVLDKSLPPSQNLINLLCYDIKQNIKVFSENSDKIVALEKYKDDNNQVGEGEQTIKQIKEWLDAATDAMRIVRYFSVRKSKMKGNIPNTKMEQALSNLLYSDDAQWFKWYDLIRNYLTKKPQDDAKENKLKLNFNNSQLLAGWSDGQEKTKAATLLKCDNGLYLCILKTKNVFDTSKDNPIYTNQSNASRLILKNLKFQTLTGKGFSSENGVGYGDMGKSNPIKAIQCLQKIIKERYVKKYPLLEKFVEHTYTDKINFDAEIKEALNECYVCEFVPINWDIVTAKQNNDELFLFKIHCKDYERKVTGKNDLQTIYWEDVLSDGSKHQLCAGAEIFMREPVSKESPIIHRMGSKLVNRRDRDGNTIPEHIYREIYAYSNNKTRKISTEAQMYIEEKRAVIKDVRYELVKDKRFYGEEPKYIFHCPIKLNYEAKEYKEPQYAFPEVNAKITDSLQQSDNLQFIGIDRGEKHLVYSCTIDKDGTIIKCNHHDIISVPSRDKDGKIVERKTDYVQKLEAVADERIIAKKNWQQQNKIRDLKSGYISHVVHHLVEETIKDGDKISPHAHIVLEDLNTEMKRGRQKIEKQVYQNLELALAKKLNFVVDKNAKQGELGSVSKALQLTPPISNYQDIEGKKQFGVMLYTRANYTSITDPATGWRKTIYIKNGKEEDIKKEFLERFRDFGFDGKDYYFEYTEANAGHIWRLYSGKNGDPLLRFQNKKLKLQDKNIWEPEPINVVEILDKLFVNFNKTKSFKTQIEQNVALKKIEGRDETAWQSLRYALDLIQQIRNSGEKNTINDNFLCSPVRNGNGEHFDTRNHETNGELSEIKDADANGAYNIARKGLIMDAHIKEWIRQGKPKRKDDKKTSDLDLFVSDREWDLWLLDREQWRNLLPTFASRSAKENGNHKQ

SEQ ID NO: 1285 - protein, 1371 aa, unidentified
  REGION 1..1371: note = Cas Enzyme sequence
MNRIYQGKVTAVEIPGAKDEQGKPLDLDVLWRHHELFQDAVNYYLVCLLSLATDPESEMAKLRERITKDGSETYVWGSFRKRGVTRQGMQKSVAPFLTPGNDAPTIEESAAAVLAGNTIAATTEGRAALAAGLRQLLAKCTGGSGCRNAAPEFLPRFCKPIGDFTFAEDPSRLIRDAQRPKLIRTLHDPATQYNSPSLDPFGPHSIALIREGREVKGSKLQAKLREFLNDWKEKHPEATADWARLEQKLKELPAEVSAPDYAGTSAKGNDRFLLAAMFFFQKLERSPFTFGLMKMASRQPKAAQEPADESLDVTTKVSAGDPIRLARGARGYVFRGFTSLPCWGGNESGKLQWEKFDVAAFEEALKALHQVEEKGKERAKELARKEARHDYQRGKSKKWKSEASTDEDSRPPILAGDERIVRLEQLVDVELRAEYEMSEGVEVKYGLQQRTIRGFRELQKIWSKELDAAEAYSDEARERLMAELREYQKDNSQIVGSVRLFAEFLKEPNWIIWREPTTAQKDEWRKKAKLPDDAEFASDPLQALTDERELKEEISRLAEPIRLTPADAQHSRRQFYFSDAAKLTERGEYRHEPNQRTVIVPVAMRENGILRQTRVRLRYSAPRLLREGLRADEGEKLGAMPWLQPMMAALGLPDPMPQDFRDCPVALMPDFTATGEKRFLLNFPLTLNADALVKQLGKASRWDNYQFGGADGESYWLRWPSTWAAKAKAKPWWENGESFRCLSVDLGQRDAGAFAVLEASAGNAPKPQSRKLGEAGGKTWWSTVRAIGMLRLPGEDALVLRDGKLQEEFSGERGRNAAPEEWNEARDICEKLVGNTQILGDDPKRFSFPELNDQLLFALRRAQARLARFQSWSCIAADEKRRASITEQIREADEDPLGLKPLEARQAWDLIAAKLIVELEKDRATIQRELVRIADRIQPLRGRRWEWVLRDDDSHCYVLRQTQRDTDPRPKLLAGQRGLSIERIEQLESLRQRCQSLNRALMQTPGEPAKLGRSKRGIELPDPCPELLDRLEKLKEQRVNQTAHLILAQALGVRLRSHTQNANTREQRDIHGEYERFREPVDFLVLENLDRYLANQGRSRGENSRLMKWCHRAILGKLKQLCEEPYGLRVLETPAAYSSRFCSLTSVAGFRAVELTPDSREEFRWRKHLERLADPERAKKLSKDERAESQRVQALFDTLEKLNTELLKNRPARPKWRTLLAPIAGGPIFVPMRGNPQQADINAAINLGLRTIAAPENYEIHLRLRSKRDGDKFFVRAENLREKARWKADKHEIKPTEGESLAALLTENYPNFFADIGSVANFDRAEISGKGGFASGRGLWGTINQNDWQRVAELNRARIQKWEHGDDNIPM

SEQ ID NO: 1286 - protein, 1371 aa, unidentified
  REGION 1..1371: note = Cas Enzyme sequence
MKLTRIYQGKINNVECKNGENWQTMPNWQDALWEHHCLFQDAVNYYTLMLAALAYDDVEQNSNDSNDEEINIIKSWAKQVECAWESATKKSKNFDGPHKRISKIIGLEPEKSNFKECVKKILKNCSPNAQIRLAALIQLLKETKGAKLNQVAADRLSWLCSDKLDAATSEENAEQGKKIKEAILAIHNARDDKQLKDAVEKFLDPYNFIKKYPNKKSSEKKFIDFARKKFDKLCKKNDNKDLEPLEEDFCKKAKEFCKNNIIYDCERRTKPVFPYALVLKIMPDIRIAEKFKKMTTSLYKKFSKTSQNTATGGNNENDFEKLRFLNNNKNPFEYFSNIVMKKGENRAAWFEFDKMAFIEALNHPHRFYEDTLERNKAAKKIAEIISAMESKGMEIKSDDENEDDNGNFIPGFSGDNRIELIKNLVRNNLAYLADVDGTESTNGTIEYSIDDGTIRGFDKIREKWMKISEPTEEKLRNIVDEEQAAHRYDFGSAPLFNELAKKEFWPIWKEKGTEDYHSKAPLKDWIKYNNFKKELKQKQRPIKFTPAHPSHSPRYFDFTKKSTKKKNGNSKKTTTNPLYVKHEINSLRFTAGIAIKENNLYKPTVLRFTYSAPRLLRDHLRSDDENQLSSLSDVTWLQPMMEAIDFTIQDPPHANFDNAKISLMPEALDNFQIIFPIEVETEKLHNIVSKKNWEKQFLFGGEENISHLMWPTDKKKYPPEKFWYEKCQRFSCLSVDLGQRTAAAIARIEVEAYNSEPQGKYRFIGETKQKKWFAKIIRTKILRLPGEDQEIWREKSKLEKGSERFSFREELFGSKGRSSTEEENKEARDILRQLDIPEKEIMPDEWEKSLSFPEQNDRLLAAVKRAQYRIRRLHRWAYLLNSNHCNEVKEKVKEEIKDSKEEDFALLLDENKRKEKIESLIINKQKSLTSSLVKIANRVLPLRGRSWIWEESSFMLTQKGAPLQNVRIRGQRGLSIDRIEQITELRKRLQSMNKTLRRKIGEKPQKYDSIPDCCPDILEKLDHIKEQRVNQTAHMILAEALGLKLAPPNRSKDKKDYKHGSYKTILNKNGEWIGPVDFLVIEDLSRYRTTQGRSRRENSRLMKWCHRAIRDKLKDIMKVFFAPVFKENPPLLETPAAYSSRFCSRSGVAGFRAIELAPGFEKKAPWQWMLEKESKTNEEDKPLSKLLEYFKEIKQYNLKIPPKLLAPIAGGPIFVPACKIIPEKGNSKKGILSPKIAQADINAAINLGLRAIASPSVWEIHSRLRSKNEKGELIANEKRKFGNDKIRITCNNNGNSDNKHPNFFADFGNIADWGKASLEKPNSSSEKLQFPNLVLGKALWDSVEKKQWEICNEINKKRIDGWKKKYKKNMS

SEQ ID NO: 1287 - protein, 1372 aa, unidentified
  REGION 1..1372: note = Cas Enzyme sequence
MNEAFLRARIESCGFRRARNSTARFLQLPPKLARLRSSMKRIYQGRIVGVAIRRVGGTSMDLPDWPEALQRQHEIFQTAVNYYFVALAGMAAGLPPEHPLHGWREELRRVWNECERGSTSWSQPFAEVARTLGLPAQASLEQCTAEMFRHTASDESLRANALLDLATRKGDLSVLVGDTFGFLCAPPGQCDKTAKDAGNQRYAEAQRLLKTVLVSAPCEIAAAAKAFDPYLLLPKEPADIWTAKQTRGELQRRFAEVAAEFSELGSAKATWEAHLTSLGRDFVLRSPGRKTKGVFNPALLFHVWPTDITLNVLRRATSGLIEQTIDTGFIDQISRARVNDTPVFPFFTNLAVTAARDASSKQAGWFELDKAAMVEALNYPRRYLADSEERERERARVSREIADVLGRGRTPATDDEGSDTGSHGFANDERFQAIERLVGAELAWKAEDDSTRREYGIRERTLRHYKQVVAAWRALGEAPSEQALLDEVTRLQGKHSRTFGSADLYRALAKPPYRAIWRAPVNPQPWHAANPLELYRELQDLRREERRLSEPIRFTPAHPVHSPRFFTLPKDPQGKKNHVPLRDGDVMHLDVELLLPTCAGQAALRRTPVRIAYSAPRLLRDGLRRAGETPEMLIKGSLWEPPLAAGFTGSIAPDRQNFARTPAELVVDEYPESHNVATRFRLAFAVAIETKELVANFGPQLDWSKQLAKVPKAKSETFRRLIWKADSAWQKLDDFRILSVDAGTRHSATWARLVAAAANGTPTSHDRRIGVTAAGVEWRARLEHAEAIRLPGEDATTWRARSPNDRDDTAGPDFRIEPWGSRGRPALTDETQAARQLFRALLGDDTTAWPVDEMWEQTLSFPEQNDRLLTAASWAQARLRRLSRWGWMSNDPAKRNEACADIESLPSGYPISVATKTAAAQRDAAALHDALHSDWSQLRAALPSLLVEIANRTAPLRDRMWQWIVLPRRPDDAHDLHRLSDTGPMPRSKVRVRGQRGISVTRLTQLTRLRMRFQSLNQALRRPFGTRFAAASFADKARIPEVAPRLLDKIDELKTQRINQTANQILAAALGLELKSPDPATQSTRLTRDIHGLYQKRTDREGRPWKPVDFIVVEDLSRYRTAQTRSRSENKRLVDWCHREAVKKLKELAEPFGLKVVEANPSYTSKFSGWTGIAGFRAEEIAPADLEAWPWNEQIEAAARSNEPTDDEKALLRCAQWLRMLNVGRPREKHLRLVVPRDGGSRFVPAWPEPGEPERDPTRHADVGAAHNVGLRAIGALTEATIHPYVSSKSGRQSKKKANAPIDGRFFEVSGQAADAHTLPGDPFPSIPRSKFDEVVGRQKWPRCEAINRQRMRRWHLKFGTPLPEDEDEISV

SEQ ID NO: 1288 - protein, 1373 aa, unidentified
  REGION 1..1373: note = Cas Enzyme sequence
MAEEATIHRIYQGRATHLWRRVNQEWVQTDSQMGLVWLHHALFQSAVNYYTVALAAMATDPDSAAGRLRQQMASCWDDYSIDGCQRPGLRKSLQPFIGDFSSLDKAASFILDGIGCPSEVLQRALECIIGSISGDGAVQQSSKEYLPRLTSPKFKGKYGKDKELKEIAFHRLSERIHAEDSDSEWLNILTSLRFEWFANAATGELVGQKLRDKLREAVKSVGEEDPEIKKEEDRLMSLVDSLPDVPGIPAYAGGSVNKKPIQQRFFRFLIVSMLEKSELTFRSLKRSFPVPKKSKKPRINSADAHYDDADPVKLARGSRGYIFKAFTSLPAWNASPVRSGTYSKFDIHALAEAFKTLNQFAKKQAERDHERSTYEVGLRWLVDGVKLPSSQEQIPEEWRGEDAEVPGTLYNDPRTDLVKQLLEADLAVANELTDDLTVPYFLRDRTLRGSHEVFEAWNKAFHANHVPDMGKLIEIWNSHQTRHPDDSGSASLFRALTAKKYWPIWKDPDENEMTIRNQNGWTTDLLGTYAMALGFKERIGELNTPVRFTPADPEFSKRLYLASEVGLRFPPSNTEIVNQVDGKQKRRTKDFDFPSETNPQQVIFSIAVQKETGWTFEEICLEFSAPRLWRDCLLGEEPCWLPPMLKPLIKEQASSFDFSEAAAMQLMPDRRQGSPRILLNFPIKLNVDEIRKAYSADGRWGQRQFNGTTDSRIHLHWPETTKLSKSTRKSDWWESNESWRVLSVDLGQRTAGAFSRIRVDAEDHPCEHGKGWHLGQAGDHNWNARLEQTGLLRLPGENPLVWDGISKKWIREPYGPDGRKPDSHETIEAEQILSSLPAHGLNPSELHSMSFSRQNSYLLVAVRRAQSWFSRVHRWVWMLDNSLASKALSEVQSYVTTHPNLIPSKDINLDTLPGLLRSKIPELGSLIPRSLLHITQRIMPLRHYEWSWSEHPTTPNCHQLQWIPRSYPRKPIKVRGQMGLSFDRITQIEELRIRWQSINRTLQRSPGQKPPSGRELRENPIPDPCPALLEKLDIMKRQRVNQTAHMIVAEALGIELKAPSNPPNKLAHDIHGEYQTVRPPVAFVVMEDLSRYRTSQSRGSAENSRLMKWCHRAVLDKVKMLCEPLGIQVLEVNAAYSSRFCSKTRVPGFRAVEVTLADMCRFPWSARRNRLTADNNANRGLESETVELVFQQLSEAEALRRGKRPRTLLLPQSGGNLFVPINDWPAVTRKSAHGPISVKPHGIQQADINAAINIGLKAIAGPFADSIHLRVRLNWDEDHWTTRGETDGNLIEKARFRDGLTVNDFAPKEGKSSMMGFWDIGDLSRFDFGFIGGSKVTSGKSLWGPIKNELCWKRVKEINLERIRSWKNDEIPF

SEQ ID NO: 1289 - protein, 1373 aa, unidentified
  REGION 1..1373: note = Cas Enzyme sequence
MAEEATIHRIYQGRATHLWRRVNQEWVQTDSQMGLVWLHHALFQSAVNYYTVALAAMATDPDSAAGRLRQQMASCWDDYSIDGCQRPGLRKSLQPFIGDFSSLDKAASFILDGIGCPSEVLQRALECIIGSISGDGAVQQSSKEYLPRLTSPKFKGKYGKDKELKEIAFHRLSERIHAEDSDSEWLNILTSLRFEWFANAATGELVGQKLRDKLREAVKSVGEEDPEIKKEEDRLMSLVDSLPDVPGIPAYAGGSVNKKPIQQRFFRFLIVSMLEKSELTFRSLKRSFPVPKKSKKPRINSADAHYDDADPVKLARGSRGYIFKAFTSLPAWNASPVRSGTYSKFDIHALAEAFKTLNQFAKKQAERDHERSTYEVGLRWLVDGVKLPSSQEQIPEEWRGEDAEVPGTLYNDPRTDLVKQLLEADLAVANELTDGLTVPYFLRDRTLRGSHEVFEAWNKAFHANHVPDMGKLIEIWNSHQTRHPDDSGSASLFRALTAKKYWPIWKDPDENEMTIRNQNGWTTDLLGTYAMALGFKERIGELNTPVRFTPADPEFSKRLYLASEVGIRFPPSNTEIVNQVDGKQKRRTKDFDFPSETNPQQVIFSIAVQKETGWTFEEICLEFSAPRLWRDCLLGEEPCWLPPMLKPLIKEQASSFDFSEAAAMQLMPDRRQGSPRILLNFPIKLNVDEIRKAYSADGRWGQRQFNGTTDSRIHLHWPETTKLSKSTRKSDWWESNESWRVLSVDLGQRTAGAFSRIRVDAEDHPCEHGKGWHLGQAGDHNWNARLEQTGLLRLPGENPLVWDGISKKWIREPYGPDGRKPDSHETIEAEQILSSLPAHGLNPSELHSMSFSRQNSYLLVAVRRAQSWFSRVHRWVWMLDNSLASKALSEVQSYVTTHPNLIPSKDINLDTLPGLLRSKIPELGSLIPRSLLHITQRIMPLRHYEWSWSEHPTTPNCHQLQWIPRSYPRKPIKVRGQMGLSFDRITQIEELRIRWQSINRTLQRSPGQKPPSGRELRENPIPDPCPALLEKLDIMKRQRVNQTAHMIVAEALGIELKAPSNPPNKLAHDIHGEYQTVRPPVAFVVMEDLSRYRTSQSRGSAENSRLMKWCHRAVLDKVKMLCEPLGIQVLEVNAAYSSRFCSKTRVPGFRAVEVTLADMCRFPWSARRNRGNADSNANRGLESETVELVFQQLSEAEALRRGKRPRTLLLPQSGGNLFVPINDWPAVTRKSAHGPISVKPHGIQQADINAAINIGLKAIAGPFADSIHLRVRLNWDEDHWTTRGETDGNLIEKARFRDGLTVNDFAPKEGKSSMMGFWDIGDLSRFDFGFIGGSKVTSGKSLWGPIKNELCWKRVKEINLERIRSWKNDEIPF

SEQ ID NO: 1290 - protein, 1373 aa, unidentified
  REGION 1..1373: note = Cas Enzyme sequence
MAEEATIHRIYQGRATHLWRRVNQEWVQTDSQMGLVWLHHALFQSAVNYYTVALAAMATDPDSAAGRLRQQMASCWDDYSIDGCQRPGLRKSLQPFIGDFSSLDKAASFILDGIGCPSEVLQRALECIIGSISGDGAVQQSSKEYLPRLTSPKFKGKYGKDKELKEIAFHRLSERIHAEDSDSEWLNILTSLRFEWFANAATGELVGQKLRDKLREAVKSVGEEDPEIKKEEDRLMSLVDSLPDVPGIPAYAGGSVNKKPIQQRFFRFLIVSMLEKSELTFRSLKRSFPVPKKSKKPRINSADAHYDDADPVKLARGSRGYIFKAFTSLPAWNASPVRSGTYSKFDIHALAEAFKTLNQFAKKQAERDHERSTYEVGLRWLVDGVKLPSSQEQIPEEWRGEDAEVPGTLYNDPRTDLVKQLLEADLAVANELTDDLTVPYFLRDRTLRGSHEVFEAWNKAFHANHVPDMGKLIEIWNSHQTRHPDDSGSASLFRALTAKKYWPIWKDPDENEMTIRNQNGWTTDLLGTYAMALGFKERIGELNTPVRFTPADPEFSKRLYLASEVGIRFPPSNTEIVNQVDGKQKRRTKDFDFPSETNPQQVIFSIAVQKETGWTFEEICLEFSAPRLWRDCLLGEEPCWLPPMLKPLIKEQASSFDFSEAAAMQLMPDRRQGSPRILLNFPIKLNVDEIRKAYSADGRWGQRQFNGTTDSRIHLHWPETTKLSKSTRKSDWWESNESWRVLSVDLGQRTAGAFSRIRVDAEDHPCEHGKGWHLGQAGDHNWNARLEQTGLLRLPGENPLVWDGISKKWIREPYGPDGRKPDSHETIEAEQILSSLPAHGLNPSELHSMSFSRQNSYLLVAVRRAQSWFSRVHRWVWMLDNSLASKALSEVQSYVTTHPNLIPSKDINLDTLPGLLRSKILELGSLIPRSLLHITQRIMPLRHYEWSWSEHPATPNCHLLQWIPRGYPRKPIKVRGQMGLSFDRITQIEELRIRWQSINRTLQRSPGQKPPSGRELRENPIPDPCPALLEKLDRMKRQRVNQTAHMIVAEALGIELKAPSNPPNKLAHDIHGEYQTVRPPVAFVVMEDLSRYRTSQSRGSAENSRLMKWCHRAVLDKVKMLCEPLGIQVLEVNAAYSSRFCSKTRVPGFRAVEVTLADMCRFPWSARRNRGNADSNANRGLESETVELVFQQLSEAEALRRGKRPRTLLLPQSGGNLFVPINDWPAVTRKSAHGPISVKPHGIQQADINAAINIGLKAIAGPFADSIHLRVRLNWDEDHWTTRGETDGNLIEKARFRDGLTVNDFAPKEGKSSMMGFWDIGDLSRFDFGFIEGSKVTSGKSLWGPIKNELCWKRVKEINLERIRSWKNDEIPF

SEQ ID NO: 1291 - protein, 1374 aa, unidentified
  REGION 1..1374: note = Cas Enzyme sequence
MPETTQRAYTLRLQGHDPKDASWREALWKTHEAVNRGAKAFGDWLLTLRGGLDHSLADEGAPGQTPTEEQRKQRRILLALSWLSVESENGAPQEYIVPHDRDNESGARQNWKTREALREILKNRGCRDDEIESWCHDCEPSLTSAIRKDAVWVNRSKAFDNAVQSIPNFSREEIWDLLGCFFVSSQAYLAPLESPKDDKPDASKKDSSKDLIQSAGQWLSRRFGRGKGLNFARLAETYEAIARWASVANPGDTNDLIADLAKTLNAETPELDGILKVVSGPGHKSKTRNLLRSLSAVNHITKDTLQRLKDTANEDAKKAKLKKGEKGHRAYAYKVLEAVEDACGFTYLQEGDRAKHCEFAVMLDHAARRVSSLHTWIKRAEAERRRFEIDTKKKDQLPPSVKEWLDTYCQKRSKETGAVEPYRIRRGAIEGWKEIVEAWSKAGTTTAEDRKHEARRLPDNPHIDKSGDIKLFEDLALEDALPVWHANGDPNNPPDPQLLIDYVEGSEAEFKKRAFKVPTYCHPDPLVHPVFCDYGCSRWNVSFAIQPVKKQKLSSEEKLPAKGLLLDLLHGTAIRPVALRWQSKRFARDLALNTTDSSDKPNEVTRADRFGCALAKCPSSQKIRIRGLFEEKYWNGRLQAPRPELTALAKRVAKYGWDKKARKLRNSLNWFITFSANLRPSGPWEEYTKYAEKAFSSNASAKPSVSRGGFWVVHASPNKRGKMAQLRLCRLPELRVLSVDLGHRYAAACAVWETLSKSAFEQEIHERKILRGGTGPNDLFCHTQHDTNGQSKVTIYRRIGADTLPNGTPHPAPWARLDRQFLIKLPGEEREARKASPTELANVEKLEKELGLKTSENRVKRIDDLMSDTLRTVRQALRRHSLRARIAFNLATLRDQSDGDEESQSKQKRDTRWNNTVKIWHSLLESNEWTDDWAKALWDELGPLSDPQKADDAEWLKLAAEKFYTRWQEDEQTWRERLRWLRRWILPRGSQAASQKGSIRHVGGLSLTRLATIKTLYQVLKAYHMRLKPDNSRKNIPAEGDEALQNFGQKILDDLEHMREQRVKQLASRIVEAALGLGRMKQVTIGKDPKRPREPVDQSCHAVVIENLTHYRPEKRQTRRENRQLMDWSAAKVKKYLKECCQLHGLHLVEVSASYTSRQDSRTGAPGIRCQEVPLTDFLKKNFWREQVKQAKQRLSEGKANARDRYLCQLNERWGNAPAPVTQTAIRLRIPLNGGELFVSADQNSPASKGIQADLNAAANIGLRAITDPDWPGAWWYVPCEANTFKPVKDKVAGSAAIDSNVSLKKDSPNSEKPASDRKSRTSKSMINLWCDTSSKSLSEKDQWQESAPYWEDVAARTINILQASLACSTTNSQ

SEQ ID NO: 1292 - protein, 1374 aa, unidentified
  REGION 1..1374: note = Cas Enzyme sequence
MANKNIYKDFANQYELSKTLRFELKPIGKTLEKMKENIKYDKNLQTFLEDQKIENSYQTLKPVFDHLHENFINESLKSKTLKNIDFNEYLKKYRNKKEENLTPLENKLRSIFSDAYIETSKNWKKNENTLKEKGFKILTEKNILNYVEKNIENFSKIEEIEKIKNALNCFKDFFTYFTGFNQNRENYYETKDKKSTAIATRVIHDNLPKFCDNIIEFEKREDDYLNIYNIIKKEGVSLVKKDKTTIYPINKEIFKIKHYNKCLSQDEIEKYNEEVGNANSLINLYNQLNNKNKDFKRLQPLKTLYKQIGCGKKNNSFLVIDCDKKNNNNSLVSLEEILWFINDAGNKVFKERKDEIGIKSVPAFLKYIKSRGNYNGVYWSKAALNTVSNKYFANWYYLTDKLKEAGVFKATKKGSEDSVKIPDAIELEGFFNVINKEEKNLSFKESILENKGKIINESKNTSDALLNLIFNDIEENINLFLNISPDILEHKNFNDKELIKKWLDSSIAIIQMLKYFLVKEDKIREGNPIDSTITEALEFIINGEFNWFGWYDAIRNYLTKKKQDNINKLKLNFLNSGLASGWDINKESDNLCVMLKDQEENLYLGVINKEKKTIFEKTFIDGKGKNKKIIENDLYKINGGEIWQKMEYNFWPQAFKAIPKCSTQKKEVIEHFKNSNNDFIFPIGYKVNSGEKFEEECIITKEIFELNNKGYKKSNTNINTLMCYDSNIKKSEYIKKFQKEYWEILFKKNNPDKKEINKEWINFCKKDYSELKDYEKSYKDALIKWIDFCKYFLSKYPKTKLFTYILKDSKDYNSLNEFYNDIDKCSYGLNFDTKINKYKLDKLIDEGSLYLFQIKNQDYNKNKKPNHKDNLHTIYWKAVFEEIKNRPKLNGGAEIFYRKALSKEKLEKIKNKKNKEIIKNFRFSKDKFIFHISITLNFCQKNITINNKVNDFLKQNQDVYFLGIDRGENHLAYYSLINSKGEIINQDTLNLPFTDKDGKPRVIEVQKRINEHKFETVKCKNYNDLLDTRAGNRNYARKNWQTIETIKDLKNGYISKVIHEIVNIATNKDKFTFIVLENLNIGFKRGRQKIEKSVYQNLELALAKKLNFLVDKNTTLGNLGSVTNAIQLTPPVNNFGDIEGKKQFGNMLYIKADYTSQTDPITGWTKTIYIKKGSEKSIKEEIKKHFTNILHDGKNYYFEYTDSFNIKWKLYSGLDRYYRKNKEGNWISTKEDTTEMLDKIFKNVDKSKSIYNQIMNENVKLEKINEHPAWESLRFAIHLIQQIRNQDNENNDFILSPVRDKNGKHFDSRKARENEPNCGDANGAFNIARKGIIVSEHIKRGIKELYIKDDEWRAWLAGKQIWEEWLDKEYNESK

SEQ ID NO: 1293 - protein, 1374 aa, unidentified
  REGION 1..1374: note = Cas Enzyme sequence
MANKNIYKDFANQYELSKTLRFELKPIGKTLEKMKENIKYDKNLQTFLEDQKIENSYQTLKPVFDHLHENFINESLKSKTLKNIDFNEYLKKYRNKKEENLTPLENKLRSIFSDAYIETSKNWKKNENTLKEKGFKILTEKNILNYVEKNIENFSKIEEIEKIKNALNCFKDFFTYFTGFNQNRENYYETKDKKSTAIATRVIHDNLPKFCDNIIEFEKREDDYLNIYNIIKKEGVSLVKKDKTTIYPINKEIFKIKHYNKCLSQDEIEKYNEEVGNANSLINLYNQLNNKNKDFKRLQPLKTLYKQIGCGKKNNSFLVIDCDKKNNNNSLVSLEEILWFINDAGNKVFKERKDEIGIKSVPAFLKYIKSRGNYNGVYWSKAALNTVSNKYFANWYYLTDKLKEAGVFKATKKGSEDSVKIPDAIELEGFFNVINKEEKNLSFKESILENKGKIINESKNTSDALLNLIFNDIEENINLFLNISPDILEHKNFNDKELIKKWLDSSIAIIQMLKYFLVKEDKIREGNPIDSTITEALEFIINGEFNWFGWYDAIRNYLTKKKQDNINKLKLNFLNSGLASGWDINKESDNLCVMLKDQEENLYLGVINKEKKTIFEKTFIDGKGKNKKIIENDLYKINGGEIWQKMEYNFWPQAFKAIPKCSTQKKEVIEHFKNSNNDFIFPIGYKVNSGEKFEEECIITKEIFELNNKGYKKSNTNINTLMCYDSNIKKSEYIKKFQKEYWEILFKKNNPDKKEINKEWINFCKKDYSELKDYEKSYKDALIKWIDFCKYFLSKYPKTKLFTYILKDSKDYNSLNEFYNDIDKCSYGLNFDTKINKYKLDKLIDEGSLYLFQIKNQDYNKNKKPNHKDNLHTIYWKAVFEEIKNRPKLNGGAEIFYRKALSKEKLEKIKNKKNKEIIKNFRFSKDKFIFHISITLNFCQKNITINNKVNDFLKQNQDVYFLGIDRGENHLAYYSLINSKGEIINQDTLNLPFTDKDGKPRVIEVQKRINEHKFETVKCKNYNDLLDTRAGNRNYARKNWQTIETIKDLKNGYISKVIHEIVNIATNKDKFTFIVLENLNIGFKRGRQKIEKSVYQNLELALAKKLNFLVDKNTTLGNLGSVTNAIQLTPPVNNFGDIEGKKQFGNMLYIKADYTSQTDPITGWTKTIYIKKGSEKSIKEEIKKHFTNIFHDGKNYYFEYTDSFNIKWKLYSGLDRYYRKNKEGNWISTKEDTTEMLDKIFKNVDKSKSIYNQIMNENVKLEKINEHPAWESLRFAIHLIQQIRNQDNENNDFILSPVRDKNGKHFDSRKARENEPNCGDANGAFNIARKGIIVSEHIKRGIKELYIKDDEWRAWLAGKQIWEEWLDKEYNESK

SEQ ID NO: 1294 - protein, 1375 aa, unidentified
  REGION 1..1375: note = Cas Enzyme sequence
MATRIYQGRIITVEYENAAEISGSMSAEEALVYTFNLFQEAINYHLVALAGMAESCAKGQSVGVRFRNKVQSIWGEHPKGKESGKTLQQSLAKTLHLREDASFEEVVAVIFEGCDRKEVLPYVQQFIMNRTQKGDGAIQQEGRALLPKLCDADFGGNYDYSAKEKNAAVGNTRLKRELARTDITQEELEQLANEMDLSWAAIKTQPNENHTASLCYSQDETCTKVREIMDELSECLYKKTDKAWEKYASKRGLNLYEEVRQTIAQRPVINSAHLLAKNRAVAAALKQAAVFFMYYPCRLSADLLKVKLGKEKPEKGEVTEYDCSALENDPILLARGTRGYIYRGFTALPDWQQDGAKMYSTEWDILAFKDALKMLHSYELKTQERKKHVDELNEELLYMVEGKGKAPSQSGEHDNATPVLKDDPRYVLVEELVREITPEAGRDYTISHRALNAFDEVKEEWLKAEKKGIADEENLKAIVRKIQGESSRFGAGVLFEALCKEKYRPIWHDWKDKQSWVRSTNILKDYGHVQELKAEIEQYKQEVRITAAEAEYSPRQLLFSDIGSFGKKQPGHEYIRGQKGKLRLRVAVQDARGRLTGATVLVRYSAPRFERDELGVDAANWTKPKKGEDTTVPWLQPMMKALHIDESLIRLDKEPAVALQVKKDKKQGNVCLLNFPVTMNLEPLHQYMGKAALWKNQMLGGQDEKLHLHWPATYKGKETPWWENKSIQNNGFDVLGIDLGMRYAAAWSLTHVQKEDKLYTKRGSELQGRYVGDSGNLMWYGYSIKQGLMKIDGEGNHYRHLESRKNDNTPQSPAGITGASDDDKKLAKDILSRVGMPLPDSADKDVLVLGNAALRAFKRLISRFRRYQSFLVKLKDEEKRDGALQEAKVFFAYNETTKQYIPQILQKIEENDDVAVRDLLLGALLELRAALPTVASDLMNLILPRKKGTWQWVEDYKPGYICSGRIDLVDKNTPERLIYHRGGLSVKRLTQLEKLRQALQALNHILWWEPGVTVPFGNDLKNIPVVDPCPQLLEKIENVREQRVNKIAHDIVAQALGVRLVQPRKDKNSGGKDIVHGEYELIPGRKPVDFVVLENLSRYLTSVDRSSDENVTLMRWCHRQLVAKVKQLLEEVFGIPVICTHAAYTSKFDALTSAPGFRAQELNAAMVNRLAQSSDSKDKRIGEAYSKILEKLSEDTQKNNIKLLAPDSRNGGEYFVSRSSQGVRVTNADINAAVNIAWRGIAAPESLHLLHRIRLEKKKGEMKPREANMREKSLKGDYVLKQHRSLHEVDDIITAFCLTDDIPGVLPFASYQSEKYASYNVVYGRDLWRTMKNNWWSMCHMYNLRVLEKYGVRVGLLKELIQSLNSPLDDDDIPM

SEQ ID NO: 1295 - protein, 1375 aa, unidentified
  REGION 1..1375: note = Cas Enzyme sequence
LDSWVSDCAPSLSSAIRDDAVWVDRSEAFDNAFVQIGGSLTRDVAWDFLDPFFGNADAYLSSLSIEDDDESESKGKEEKAKDLGQKAGQWLSSRFGTGRGADFKLLARIYQKISTWSKSQSAFLDGKKALQTLAIFLTEYKPVSNDANGILKLISGPGYKSATRNIIEKFGTDGGAITLESLEKLRETSEKNAEESLKKTGGKGRRPYSDVIISEVEAACGFSYLQPDGPARHAEFSVMLDHAARRVSIAHTWIKRAEAERQNFKADAQKMSDVPAAAKIWLDIFCKERTLATNALEPYRIRKRALGGWKEVVTRWNRADCETVQNRIDAAREIQDDPDIEKFGDIQLFEAIAADETLCVWKPDGNASTQPLTDYSVATDAVAKQQRFKVPAYRHPDSLLHPIFCDFGNSRWEIKFAVHEAATKLEDARKRLVKKEADFISATERLTKAKTPEKTAIAKENIEAIRVEINQAGDAVQWLSTPHGITLGLWNGVSLNRVPKMSWSSKRLAKDLALRQMGVRGSLIRATRADRLGRAAAGATQDDVISVLNVFDQANWNGRLQAPRAQFAAIAKHVSKHGWDSKARQMRDRIRWLVTFSAALQSTGPWIDYVPLFNDRSPAKPFVTRKGEFAIKHADNDKRGTKLILSRLPALRILSVDLGHRYAAACAVWEAISSEQMIKESKKLNHRAPTSTDLYLHLKCNADPKKPRTTIYRRIGADTIKDSATGKVTPHPAPWARLERQFLIKLPGEQQQPRAASSKDAHGVNELQLVETLAKQIGQVVEGDTNKKERGVHELMARAIRLIALGLKRHARRAKIAYAFDPATKVILGMGASEKEFTEGDSAHIGYIADSLIEWHSLATDTKWNDKRARDLWNQHVSKIAGGWTIEDPKATEEAPTTRKQRTQSEDGLRLKLVPIAQQLAKVNRSAIHNAWTERWESDNGLAAKIDKATGQKTFDGTGFHASLRWVTDWIMGKNLIGATGDGWKQNVGGLSVTRITTMKALYQLHKAFAMRATPLKPRGAPEKGESNIGIAQSILTAMERMRDQRVKQIASRIAGSALGLGGKWVMRDIPANKAKNRSARTKLVWLEDLSPKYSPCHAVVIENLKNYRPDETRTRRENSQLMSWASSKVEKYLGEACQLNGLHLRSVSAGYTSRQDSRTGAPGIRCCDVSVKDFQNKPWWRKCVETAKQKNKDGKGNALDRYLENLNEQYSDKSTAITIGTQFIRIPVSGGDLFVSADHSSPAAKGLQADLNAAANIGLKALLDPDWEGKWWFVPCASVTNTPVTDKVKGSQVISNVALIPIVQGGTKPGRSKAGKKERDVVNIWRDPSALPIKADGNWFGSAEYWNKVRIRVIQVIQTKNNFTKLTSTQGMPW

SEQ ID NO: 1296 - protein, 1377 aa, unidentified
  REGION 1..1377: note = Cas Enzyme sequence
QFNLVPLKWDSERKNIAEDKEFAEFKKHGIIEKDEQTSKNIKTTKFYLDILHGEFIEEALKELRFKKEDLEKIYFLSQKLEENKRDKQVNKEEGKKKYGEFKKQLSIARDNLLEELKNIFILTNQRYKLKNKYPSTNENDKNILLSKHVLELLRKRFTKEEIDKLRKNNQDSSIVYPDVEDGKGKSVFNMNAGFLDDFHKNREHSLYSVKGKKGSFGGRILDNFEIFNQNKKIFEEKYKKSDIDFSEVEKSFGRNLNDVFGFDFYNGCISQNGIDCYNKILGGESHKEERKKTRGLNEIINLYAQKKEQDYKEQKKEGNQQKAKFSRKNYPTLMPLQKRVLSKILKKEILIEGDTDLICELNDFIKKSEGKVEKARTMIDLLCSYKKNHFDLTKIYLPKSKINSFAYKVFKEPQEFMAVYRDGRKNLGLIDFGKIKDYLNGNKLEYKDFFKPLAQGESGFDAFLCIWKHEFGILISGGETIVKGGQKEKVINLDIKKSELEKWLKWFKDKVAKNEKMTDKDEGMWCSAVLDYSQTILDITKRAEIFWLNEKQEIKVSDSKDGVFYSWFNEFIDDGFTPFIYFDKFRNYLNKRSKNTAKGFRLYFNTDHLLDGWDMNKEPQYRGFLLRKGNDYYLGIGNENGKIFHKLKSGSNLVEEVPEAYTVKDGDDYYEKIDYKQLDIGKFEGIAFPKKTNSEENYQKALKKRADEFLNGNISKLQKLIETKKEYDDFKVKRQKDKAWDRRFDTKKMKELISYYITCLNTRKEWKRFNFEFKKPEEYNDKPDFVNHLQRQAYWINPKRVSKKYVDEKVAQGEMFLFKIHSKDFYDFEKKLSNNNPYRLDKKPSKTNLFTQYFLELFSDENIRNIKSKDLNKSIFELDGKAELRFRRKTDNVKLKFYKKNGKIITCANKKDGNMEKEVIEHRRFTKDVITLHLKIRLNFGKEIEPQEFNKIVNTKLSVKESIEILGIDRGENNLVYYCLLNEEGEIKECASLNKVGERIRKLGDGTCIKEPVDYYQKLVEREQQRDWEQKNWQKITPIKDLKRGYLANVINEITKIVFANIEKGVATIIALEDLGQNFKRTRFFRERQVYQEFEKDLISKLNYLVDKNKKNYRKAYQFTFKVDSVQDMEKKKQIGNLFYVGASYTSKICPSPTCGWRKRLYIKNSETKGKIVKALESIKIFYEKEKDRFRFDYQWEQKYKKEGKEKKYGDIDTVFSSVSRLRYDRGKNKTEPYKDKTENSVTNKIKDLFKNRINIIQDANITEKIIKKEKELDAGFFHDLINYFNLILQIRNYDKENGDDYIQCPYCGFDSRNSKVDSEQLREIANGDANGAYNIARKGLMLLKRIKANPEKPNLIISSKDWDEVVSEWDKFVQKD

SEQ ID NO: 1297 - protein, 1377 aa, unidentified
  REGION 1..1377: note = Cas Enzyme sequence
MNRIYQGRVTRVEIPLPNGDWNNQADGESALWQHHELFQDAVNYYLLALLALARDPVNPATAIRKRMADLASEHQVWTCFRRRGQLRCGMRDSVAKYVLPGKLEPTLEECISAVLDGNTESPEVLDLALQELLVECDGDGAIQQEGRSMFPRFCSPGYKGDFPQSVAARDKKSAKEWLPIFLHAKESATNMELVRQRLKFELFANRDLTGRVLDAVESRKRTSEMLGWLAERHAALATEKERLQTIIAALPDTFNLPAWRGGSVNKEALQQRFYAWLIFEYVESSPNTFAVLRDSFLAPKEKRKSATEKIQVEKPSSRLNDDPIKLARGTRGYVFRAFTSLPCWGTDDPNLPAWKEFDVAAFKEALKALHQVESKGEEREKERERLLERHSYMRGTLKTWKISSDVEEKEPDVLAGDPRIERLETLLKSELAIEYEMSEGEKVEYGLQPRTIRGFRDLRKEWGKIVKAGELFTEQKKESLLAALRIYQKENPNIIGSVRLYEELVEKENWLIWQEADAETVEKWAKQKFTADPLEALTEERQLLRDVERLKQPIKFTPADAVHSRRQFYFSDMTDLSVKKRFDSQKQTIEVPIAIKSGAHWKQQLVKIHFSAPRILRDQLSDETIEGSLTARWQQPMMEALGLSLKLTKKNQEVSLSDCTAVALMPEELASGDRRVLLNFPIAVETDALVKALGKATLWDGQFAAFGDDNFYLRWPKDKWPAGKEPDAWYHRLREFNLLSVDLGQRDAGAFAVIKAMTDNTFHSASRFIGEAAGRAWQTIVPAMGLLRLPGEDVRVFRDGRWQEELYGERGRSADEPEWLEAKQICETLGMKPSNIIGDDPKWFSFPELNDRLLFAIRRAQTRMARLQSWSWMIGDETRREKIRQAIIDADEDELFLKTPAKDFLWPVLAEKLIAEVNRLRNLIPLQLLILANRIVPLRGRRWEWVMRTDGSDCHLLRETDPGTDTKEKKICGQRGLSMERLEQLDELRRRFQSLNRALLQTPGQSAALGKSKRGIELPDPCPDLLEKTDQLREQRVNQTAHLILAQALGVRLRAPKKDCMLRERNDIHGEYESFRPPIDFIVLEDLSRYLSSQGRARSENSRLMKWCHRAILLKLKQLCEPYGLKILETNAAYSSRFCSRTGAAGFRAVELTPAARKEFRWRKHLDRLEKAALGEIKLDREARVESEHVKQLFDMLDQLNAGRKEAGKPLRALLAPVAGGPIFIPMQGHTMQADINAAINLGLRAIAAPDCHSIHVRIRTERKDKTLRVRTDSNREKVRWAGANPDIHMSKDSDLASLSGDRQPNFFPDSAHIARYDRAKIPDVDLQFASGRGLWGTINELQWERVNQINNERAKTKWNFTQTLLKQSLSEDDLSY

SEQ ID NO: 1298 - protein, 1377 aa, unidentified
  REGION 1..1377: note = Cas Enzyme sequence
VNRSRVFDLAATKIGASLTREELWDFLQPFFANKHSYLEMDTVASATNGDSGTDTEESKVDSSDEKAKDLSQKAGQWLSSRFGTGTGADFSRFSKVYEVLAAGCQSIAAGVSGAEAINRLATAMEEYSPHSKDIEGILGLISGPGYKSATRNNVLPQINSLQRVSQQDLDRLRDACEKDAVQSRQRVGGKGSRPYANAILRDVEVACGICYAKTAGGPSRHWQYAVILDHAARRVSMAHSWIKRAEEQRSKFEIERNKLDHVPHDARAWLDAFCNRRSSESGATDAYRIRRSAVGGWKQVVAEWAALPATAENAGSELLSGPELARIRAARELQDTVEKFGDIQLFEALSATDARCVWQPDGKSDAQPLLDYVAGTDAISKRQRFKVPAYRHPDALLHPIFCDFGNSRWSIDYAIHRAPKELTHAKQLLEKKKAEIDKAELTLAKANGTAKRADISEKIKSLRAAFIQQQSKVACLDSRHAMTMGLWDGSRIEDTPLRWQSKRFASDIGQPLSAHSLPVSRADRFGRASVAAEDNSPVKPSGLFDLPDWNGRLQAPRRQLEAIAAMRDSAKLSAGEKQHLVAKRIHSIRWLVTLSAKLQALGPWFEFAGPRGLLEYRNGEVVLSPRSSKDSWRGLAFPFWHPHNLKGRGGAVRHVLSRLPGLRVLSVDLGHRYAAACAVWETVSTGQIQKACLDAGMEAPGPHPLYLHLKQIVDGKEKKTIYRRIGADTLPDGSPHPAPWARLDRQFLIKLQGENRDARPATSEEVAAVEQMENELGVVRQLKRKGQELLVDELVFDTLRTLRLGLRRHGTRARIAFNLTATKRIRPGGIQEVLDQEGRLSLLKETLLLWYEVYSGERWRDKPAEDLWNRHIQPLLGGTILQDTVNQEDIPSAAKRRKQREETSEKLRPVAEQIAKNDSLCRQLRVLWSAQWQTEDAIWRTRLRWMRRWLLPRGIKRDAQLRKSIRDVGGLSLTRIASFKLLYQVQKAYRMRPHPEDPERNIPKRGDSSLEDFDQRVLDAMERMRENRVKQLASRIAEAALGIGDEAGIHSKDGRQKKRPTERSRDSRFASCHAVVIEDLTHYRPDETRTRRENRQLMSWSSSKVKKYLGEACQLHGLHLREVSPAYTSRQDSRTGAPGLRCNDVTVEEFKKSLFWRKQVGAAEKNREAGNKGDARERYLLWVDEKISADETKETDSFLIPSDGGEMFVSAFEDNKTQSASRRKKPSALQADLNAAANIGLRALLDPDWEGRWWYIPCDAATFCPDTKKFIGCKAVDPSKPLRVVAEEGAISASGIGSKKSGRKRNAAIDGTRIVNLWRDPSSMPVHLDASGSGEWQRYHEYKNNVQSRVIQNLKARYKQTWQQENAFVPQNEDTPF

SEQ ID NO: 1299 - protein, 1378 aa, unidentified
  REGION 1..1378: note = Cas Enzyme sequence
MNRIYQGRVTKVEIPDGKDAQGKPLDNWQDTLWQHHELFQDAVNYYLLALLSLARDPANPATSIRKRMDDPASEHQIWTSFRRRGQTRRGMRDSVANYLCPGKTEPTLETCFAAVLDGNKENSEVLDLALQELLDECDGDGAIQQEGRSMLPRFCSPSYKGDYPQSAAAKDKKSAKEWLPTFLYSAESASNVNLVRQRLKFELFANRDLTGRVLDAVESRKRLNEMLGWLTERHPTLASERERLQKIIAVLPDSFNLPAWRGGSVNKEALQQRFYAWLIFEHVESSNITFNILRDSFPTPKEKRKNAGGTTQLEKPSIELGDDPIKLARGIRGYVFRAFTSLPCWGADNPNLMAWKEFDVAAFKEALKALHQVESKSEERNKERERLLQRHAFMRGSVKTWKASPELEETEPDVLAGDPRIERLEKLLETELADEYEMSEGQTVEYGLQPRTIRGFRDLRREWNKIVKPGEPFTQQKKENLVTTLRNYQKENPNVIGSVRLYEALVEKNNWLVWQEADSTTAEKWVKQKFASDPLEALTKERQLLRDVERLKQPIRFTPADAVHSRRQFYFSDMTDLSVKKRFDTKQQTIEVPVAIKGDSQWKQQLVKIHFSAPRVVRDQLIDEAMEESQAARWQQPMMEALGLSLKLTKKNAEVSLSECTAVALMPENLASGDRRILLNFPITLETDPLVKALGKASLWDGQFAAYGDDNFYLRWPKNKWPAEKEANAWYHRLSEFSLLSVDLGQRDAGAFAVIGAMAGKPIRPASRFIGEAIGQSWHATVRATGLLRLPGEDAQVFRNGQWQEELSGERGRSADSTEWTEARRICETLGLKSDEILDDDPKWFSFPELNDRLLFAVRRAQTRLARAQSWSWMIADESRRENIREAILAADEDELFLKTPAEKSLWPMLAEKIASEVNRLRSLIPQQLVLLANRILPLRGRRWEWVKRDDSSGCHVLRETNPGTDTANKKVCGQRGLSMKRLEQLDELRRRFQSLNRALLQTPGQSAALGKSKRGIELPDPCPDLLDKTDQLREQRVNQTAHLILAQALGVRLRAPQKNHALRKQNNIHGEYETFRPPVDFIVLEDLSRYLSSQGRARNENSRLMKWCHRAILLKLKQLCEPYGLKILETNAAYSSRFCSRTGVAGFRAVELTPDARKEFRWRKHLDRLEKAASGEIKLDREARAESEHVKHLFDMLDQLNAGRKEAGKPLRTLLAPITGGPIFIPMQGHTTQADINAAINLGLRAIAAPDCHAIHVRIRTERKDKTLRVRTGSNREKVRWEGKNPDVQMNKPADLASLTGDRQPNFFPDPSAIARYDRAKIANVELPFASGRGLWGTINELQWTRVNQLNNDRAEMKWNLTRSLPEQSPEEDDVRM

SEQ ID NO: 1300 - protein, 1380 aa, unidentified
  REGION 1..1380: note = Cas Enzyme sequence
MNRIYQGRVSKVEIPNPGDKGKPWQPLPNWQDILWQHHELFQDAVNYYLLALLSLARDSANPATPIRKRMDDPASEHQIWTSFRRRGQMRSGMRDSVAKYLCPVKTEPTLDECFAAVLEGNKENPDVLDLALQELLDECDGDGAIQQEGRSMLPRFCSPSYKGDFPQSAAAKDKKSAKEWLPTFLHSAENASNLKLVRQRLKFELFANRDLTGRILDAVESRKRLTEMLGWLTERNPSLAAERERLQKIIAALPDTFNLPAWRGGSVNKEALKQRFYAWLIFEHVESSRITFDILRDSFPTPKEKRKSVSETIQSEKPSLELSDDPIKLARGTRGYVFRAFTSLPCWGADNANLLAWKEFDVAAFKEALKALHQVESKSEERNKERERLLQRHSVMRGSIKWKPSPESEEKEPDVLAGDPRIERLEKLLKTELASEYEMSEGQTVEYGLQPRTIRGFRDLRKEWNKIVKPGEPFTEQKKGNLVTALRSYQIENPNVIGSVRLYEALLEKGNWLVWQEADSATVEKWAKQKFASDPLEALTEERQLLRDIERLKQPIRFTPADAVHSRRQFYLAEKGDLSVKNRFDPQNQTLQVPIAIKNDDHWKQQFVKIHFSAPRAVRDQLIDETMEESKEARWQQPMMEALGLSLKLTKNNAEVSLSECTAVSLMPEELASGDRRILLNFPITLETAPMVKALGKASLWDGQFAAYGDDNFYLRWPKDKWPAEKESNAWYRRLTEFSLLSVDLGQRDAGAFAVIGATTGKPTRPASRFIGEANGQSWHASVRATGVLRLPGEDAHVFRSGQWQEELYGERGRSADATEWTEAKRICETLGLKFDEILGGDPQWFSFPELNDRLLFAVRRAQTRLARLQSWSWMIADETRRENIREAILAADDDELSLKAAAEKSLWPVLAEKLASEVNRLRNLIPQQLVLLANRILPLRGRRWEWIKRDDTSGCHVLRETNPGTDTTSKKVCGQRGLSMKRLEQLDELRRRFQSLNRALMQTPGQTAGLGKSKRGIELPDPCPDLLDKTEQLREQRVNQTAHLILAQALGVRLRTPQKGDALREQNNVHGEYETFRLPVDFIVLEDLSRYLSSQGRGRNENSRLMKWCHRAILLKLKQLCESYGLKILETNAAYSSRFCSRTGVAGFRAVELTPDARKEFRWRKHLNRLEKAASGEIKLDREARAESEHVKRLFDMLDQLNAGRKEAGKPLRTLLAPIAGGQIFIPMQGHATQADINAAINLGLRAIAAPDCHAIHVRIRTERKDKTLRVRTGSNREKVRWEGKNPEIQMNKAADLASLTGDRQPNFFPDPSAIACYDRAKIEGVQLPFASGRGLWGTMNIELQWTRVNQLNNDRAEKKWNLTRSLPEQSSEEDYIPM

SEQ ID NO: 1301 - protein, 1380 aa, unidentified
  REGION 1..1380: note = Cas Enzyme sequence
MPETPAYTTRAYTLRLAGATPEDHAWRGRLWQTHEAVNKGARVFGEWLLTMRGGLDHTLADQQDPQQRRDHRVALALSWLSVESPAEAVASDLIVSRGKDPHEDRSQALEIALREILQQRGLSDADIDSWLVDCRATLGARIRDDAVWVNRSKAFDAITEQPRRPQARVDCQVLLWHLFTHDYLTLPRASLRRRQEQQAQREGADQDPDEGQGEDKRSAVVRSGRGAGTRTRHLFSHIFGGSPTFGKDKHKEKEKERVLALRGHWLAYLQPLVEGAGIPLRDPSQPRRANDGAVPTELHREMLSKAAARLAQIHTKQKQQEIEREQRERADEALRRLEDDPAYKEALALLEAYCDDRRAEWGDYTIRPRALEGWRDVVAAWALCGSEEERVDEVKRLQDEDPDRKFGDPNLFCELAQEKYVPVWRHCGKEDPDLLTRFVKGNAARADAKRLRVAAYRHPDPCFNPVFCQFGISRPAIKFARLGQLRKSKEPGSERSTAVSLLLWDGKAARTTILQALGARLDREIGTVDQQQPLDRDPTLVTRRTRQGFAVAAQESASGEGSRVIGVFDEQDIEKRRPEHDQAAAGKVARKAPEWNGTLQADRRALAAIGRAADAREAARAREQLQWWLTVSIELRPQGPWPTYADKHGIELDRGREGIVTLPTKKADEWRGLAYPCWVDDNKGRHGRDRLVLARLPGLRVLSVDLGHRAAASCAIWETLTRPQVEEICRACGHDAPGEGDIYLHLKRKVLKQDKGGSAREAEATTIYRRLAADTLPDGSPHPAPWARLDRWFTIRLQGEEAQARFATRAEQAAVRDFEKWLGWQAGNRRRSQRIDELVAHAVDLARRGLRRHADHARIAWGLAAPKKQLPGGRRPDGEMSREERVAHLQGVLLRWHDIAFSTQWKDDWAQELWNATLPDYQKPEPIAENASAKEKKAARERNLETLRPAATALAEDSARRLALHEAWKSRWAQDDGAPAQVDRQASGCKQSQGTGWHAHLRWLHDWLLPRGNKSRKRTLRQVGGLSLMRLGTIRDFHRKVQKAFFTRLRPDGTKAEAPESFGQRTLDDLAAMRENRIKQLASRIVEAALGVGSENPLHREGRRRPRQRIADPRFAPCHAVVIEYLANYRPHQSRMRRENRQLMDWSTGRFKQYLAEACALNGLHLREVSAAYTSQQDSRTGAPGIRCEQVVLREFLQSPFWRKKVSSAAKRAGNPFTQLWRDLVNRARKSSPADAATTVLYLPREGGRLFVSASPCLCCQPSSQGLAPINADLNAAANVGLRALSDPDWPGTWWYSPYNLTQSQPCLDKAKGSAAISAGSPPAAPAQATTQEKVINLWRDVSAKPITPENGQPYSRYWNGVQERVVARLRPALGLHHEP

SEQ ID NO: 1302 - protein, 1381 aa, unidentified
  REGION 1..1381: note = Cas Enzyme sequence
MENLNQFIGLYPLSKTLRFELKPEPETLNLFEKWLADEVRDENLLYKDKKIAEAYVVLKPIMDKLHECFINISLLSETAKKINFAPYLEAYRNADVSNELEKDIRLLIGETFDVGELYFKDKFEKLGLKYKKQCLQNSSILLYIQNTLYEYAPSNYNQSEKEKFTTELKKHIESFKSFYTYFSGYNENRKNYYHIEEEKSTAIATRIVHDNLPKFCSNIIRFENRRDEYQSIYNWLNDKERITEIKNSFKGEFEKALPIEEKFFVISYFNQCLAQSEIEEYNRIIGNFNLLINLYNQNKKREDKSFRKLEEFTTLFKQIGCGKSMIAYQPIIKDFEHELTDSEKIQSKQGSILTVEALLNRVIYAGQKYLSPFGESNITVYSFNEFLRNCNDWRGIYWSKSAVNNISKSYFSNWHAIKDKLKNKRSCATYDKKREEQVQLRDAVELSDLFEVLDTEESTYLFKEWLKEENKIDLQKRPSENLISLLCADIEAYTHAFIDKAESIFDIWNKNAGRKEENDEVAVSIKGWLDNVSDAMHIIRYFSVRASKMKGNLANPEMENILNHLLNSDDADWFGWYDLIRNYLTQKPQDKTKENKLKLNFGKGNLLNGFTDSATDSDNGTQYGGYLFRRKHQACNEYEYFLGISKNSKLFRCHLKEKVAENDKSEFERLEYYQMKSTTPYPNEYGKNKKDIQKIVQELTIPSSDEEEKESASINKAKSDGEILPTELIKRLNKSKHFKHVLADESLVKKINETIALILNNCTRFTRIEAIADLCKQSYSGPEGLSKLLNDLKEITKNTKIFEFFNVSNREMKEHHGKDLFLFKISSKDLSYCDTHAKGLRQERTIQKENLHTLFFRALMHEEGFDDCVDLGKGEIFFREKAYEYSAEKWAQGHHAEELNGKFKYPIISNRRFAEDKYFLHLSIMLNYKADDKPADEKISNAIKEIENINFIGIDRGEKHLVYSCIIDKYMNILSCQHYDEINGTNYVKKLEEMAELKMNQRKNWKQQDGIRNLKDGYISHVVHRLTESAIKDNLGNIYPHAYIVLEDLNTEMKRGRQKVEKQVYQKLEVALAKKLNFVVDKNAKGSDIASVSRALQLTPKINNYGDIEGRKQFGVMLYTRANYTSVTDPATGWRQTIYIKDGNDGDIKKQIMSSFSDFGFDGTDYFFEYIEANVGKVWRIYPSKNGEPLDRFQNKKEKKEDFNVWVPEKVNTILLLDRLFENFDKTKSFKVQIEEGVGLTKNEDKKTSWQSLRYVIGIIQQIRNCGNTPADDNFLCSPVRNEYGIHFDTRNAENNGALSKIVDADANGAYNIARKGLIMDAHIKCNSDVSDLDLFISDKEWDMWLLDRNKWNENLQYFSSKSMKNAATSTKKKEGKKARK

SEQ ID NO: 1303 - protein, 1381 aa, unidentified
  REGION 1..1381: note = Cas Enzyme sequence
MNRIYQGRASGISIVSSGVKVPLTIGSADTCPLWHHHQVFQDAINYYVVALGALAGSGTRNRVVSDLRGRLETSWEKFPRDAHGADSLRDSLRRSLPALNADATLQHAFDLILAGNDASPMARTLSLAVLLAKCGGDAAIQQGGRAYLPRFCDAKSNPTWDFSRSALESGTGAARLASVLHAESSAEELNAIADEMDLSWTVKTQPGKTYHGAEAKARLTEALNHLLKLLRAPSARLAETLASLSQPPDSFLQACLESVGGLGDDFSIPRNRKAAPDLTFATIAFKQFPHQVTQAFLKLGLKAPKAAAKAATKTTEDQLLASLGDDPVKLARGSRGFVFSAFTALPKWNPVSPGLPVWKEFDIAAFKEALKSLNQFNQKTIEREGKLAAASQTLAYMLGTGETLPKVTEGEGETKAPARPGKDPRWEKVGELEKELRLNLNEGDWELSRASLRGLRDLAEEWNKNPDATTEQLQAVVKKYQAEDKNKRGIGSVQLFLTLCEDRYRALWRATASRNEDEDTQHSADILFDAVQVHQLDREVKRFSDPIRLTPAEPRFSRRLFMFSDLTDKLAKVKFGDAASESGDDKTRYFETAIAFREAGEYRATRVRINYTAPRLHRDELLGGEGSRWLQPMTAALGLSVPAASGTFDSAVALMPDRRDDEQVRHLLNFPVSLDPAWLHESLGKAMRWRGQFNGTKDNNLHLHWPGTERDVTKKNRWWENPAIIEKGFTVLSNDLGQRSAGAWALLRVTCWKPDTKRPVRAIGNDGNREWFAEVLRTGMHRLPGEDVKVQANGDWAVERFGKRGRTATEPEYLGAVRLAGHLGVETGSIENWLDHPGGKSFPELNDQLVKIANRRLSRLGTYHRWSCFSPDKIDSDTKRDAAIKNLENELEAYKDSRVCELQALLEARNIETFRAVAGGLFEDLRDELEVILVTLADRISPLRGRAWQWQRRKADGGYGDLVPRVDADRKPGIRGQRGLSMPRLEQLEGLRRLFLRYNRSLDRKACIPALFGREDRGRDSGEPCRMLLEKIDRMKEQRVNQTAHLILAQALGVKLAAHTSSDPERRVRDLHGEYLKIEGREPVDFIVIEDLSRYLSSQGRAPSENSRLMKWSHRAIRDKLKMLAEEPFGVPVVEVTPAYSSRFHAGNGQPGSRLHELHGLDGFQRRALETLADRKEPKEKHRAKAAAELLTQFEEIRPENERRMEMNRSREPGTPPLPLFTLYFPRAGGPLFLATRDGNPVQADLNAATNLGLRAIAVPECMDIHRRVRAKKEKDSYRPRLDNAREKAAFSAHGVITLCGELSKKFGGSTSPNFFHEPDALLQADGSTMFDRAEYKGQPLVSGVALWSLVNNTIYMRCAELNRKRLARWAEEDPTDDIPK

SEQ ID NO: 1304 - protein, 1381 aa, unidentified
  REGION 1..1381: note = Cas Enzyme sequence
MAAEPTKRAYTLRLTGTDPTDQTWREALWHTHEAVNQGAKVFGNWLLTLRGGLDHRLADEVAQDSKNPDTVRRNARILLALSWLSVESDDGAPAPYVVATAADPQRKEKVVAALQDILKSSGLEAADIAAWVRDCQDSLSAAIRDDAVWVNRRAAFDELANKWNSLAPADARQVISEFFGEPADYLSLPESAAATARETDEDFSHIARAWLSTNWGSGKKSDKTQIATALETLADADLSPLDGRPGPELAPALLDCLGVKLAPGQDAEEELRKLVGWTTGRPSKGRSALTTAAKLPTLTRDELSKLQRKFADEAAEKRPQTGAPSSAWSTNLRQAVEQATTMRFKLHRDLIGEYSTMLDQAARRVSQAHTWLKRAEARRQKDLADKQKLKQVPAEVCDWLDRFCEERSLASGALAGYHIRPRAIDGWDNVVKAWSKTDCETEADRIAAARAVEADPEVEKFGDIQLFEALAADDAIVVWQSDGKANPQLLKDYVAAKAAEDRLHRYKVPAYRHPDPLLHPVFCEFGCSRWTIKFGIHQAWQALAKAKGILASARSEDEKMKANVRVLKAQKKVEQRRQEFEQARAAQRLTMDLWTGNDIKTTEMRWQSKRMPGDLAFATALSDSPVFLPRADRLGRAAGGAALSDAPAVSGLFEQNEWNGRLQAPRPELEAIARCQDPQRKTRLRSRLNWLITFSAELQPQGPMIAFAAAHDLQIRNSPLSTAKFLHVNEPRLSTNEGRKGYARFTLPPLSGLRVLSVDLGHRYAAACAVWETISETRLAELCKAAGHRPPQPKDMALHLPGQRNGKKVKTIFRRTGPAMWARLDRQFTIKLQGEDKPSRKASTHEFEAVVRFEKELGRTRSDENPRPHDVMRLMAEAVRSARLGLRRHGDRARIAFNLTTKTKLLPGGRTEKLTPETSVELLQDTLVLWHNLRNSPTWQDDFAESCWNESIAPLLENVVLPEPPVEGAAAQTVKAFRRTLRDKLKPAAQKLAGNPQLRQKLHTLWATRWRKDDEAWRGRLRWLRDWLLPRGKAKSDASIRHVGGITLTRLATIRGLWQTQKAFALRPDPDDLRRNVPKRGASSERFGQRVLDALDHLRENRIKQLASRIVEAALGIGKEQPKVNRRDPKRQRSQVHSPCHAVVIEDLKNYRFADSRPRRENRQLMQWSARNVRRYLAEACRLYGLHLCEVFAGYTSRQDSRTGAPGCRATDLPVPDFLKRYDRLVKNAEGEERKFLEALKARWDGCTDRSKLVRILDRAGKLFVSADESSPAVKGIQADLNAAANIGLRALLDPDWPGKWWWVPCGKDGKPAKEKCKGTRAFDLNLQLLPATECRGKDIVNAWRDVSADPIVPGEGMSYAEYWNRVKARVVVNLRRQAGL

SEQ ID NO: 1305 - protein, 1383 aa, unidentified
  REGION 1..1383: note = Cas Enzyme sequence
MNRIYQGKVTAVEIPDGKDGWKKLDDGESTLWQHHQLFQDAVNYYTLALAAMAAGLKADSPNGKAMLEWRTAVSKSWLQAKRKAIPFHGPHKRLAEWLHAETSEPDTEKAFTACAKTLLKKSPATPEARAKALLQLLEEADESDLNQFCVSRLPWLCSAHGKLDATPKNVAQQQETRMLKIIRDIHQSSASQIVAVVKRLELGWFVTQMPKESMSGAEARAEAERLFKSASSKAKGLAAVADKFSKRLDQIGDKLKLPRLGRKPKGAYPVAVVLKLFPTPETWEAFKSTTETLRKKAEKLKDFPLEIGADFIAEARTAADQPIFDYFTNRVLIRETGNEDRAVWFDFDLAAFIEAIKSPHRYFQDTLSREAAAAELREKLHAIDPDASWIKWSTTDQIVEKKNPKESASDTEDETPTFTFSGDKRIVLLRKLVTKTLGYLAESENPDSEKTEYTIQERTLRGWLKIREEWRKLAENGKTTPDELWKVVKAEQGEHRDDFGSALLYEKLTETEFQPIWREKGTQPSHADDPLQAWLQYKELQFELEDKERPIRFTPAHAVHSPRYFIIPKAGKFGSEHETGTLSFTAGMILKTPDGLRPSLVHMHYSAPRLRRDELRTNDEKNLESTNWLQPMMKALGLPEHDTQDFSNCRITLQPSDAQNIQLTFPVEVIPDKLVAGIGKANLWARQFNLHPDGDNFYNATLRWPHEKQPAKPPPPWFDVLDKFSCVSVDLGQRDAGAYAVLLASANAQKDFGKRPSRFIGQTGEGPAKKLWRAALIASGMLRLSGEDRVEWRAPSKLEQGQTEFGWREELFGERGRSATPEETEQCAKLFSDFGIKEEDLLPNTWRDSLSFPEQNDKLLRAASRAQWRVSRLHRWCWFLADEKKRGDALKEIRESFTAPAERNERWLPDKIKTPAEKENDPRLANELASLLRDKLNKLPGLFELLANRILPLRGRSWKWERHPIATNENRVYLLTQKGAALPDVRLRGQRGLSLERIEQIEELRRRFQSLNQTLRRDIGGKPRVRRDENVPDTCPDLLAKLDRTKRQRVNQTAHMILAQALGVRLAKPPTNKADLRQDHDQHGVYEKFREPTDFIVIEDLSRYRASQGRAPRENSRLMKWCHRAVRDKLKELCEPFGIPVLETPAAWSSRFCSRSSVAGFRAVEVHPGLKTESPWSWHLKRLELHRENPGQHPLSDDARTESEQIEKLFADLDEANKDAHGEHPKWRTLYAPKAGGPIFIPICDRIAKPDHDKLQPAVIQADINAAINIGLRAMADPRLWSIYPRLRTQREKDGTLLAREKRKYGENVKIKIDPPKEDKEVSATNRNPNFFADLSRSVPWGHAQLQGDIQFPLVSGKSLWSEVRKLQWKRVHEINQRRQQPK

SEQ ID NO: 1306 - protein, 1383 aa, unidentified
  REGION 1..1383: note = Cas Enzyme sequence
MNRIYQGRVSKIQILNTEGVSKNAPLGNSVSCVLWQHHRTFQDAVNYYLAALGSLADSGSDNRVIGDLRARLLESWEKFPRDLHGASSLRDSLRRSLPGLKQTATLQEGFDSILAGNEASPHVRTLSLTLILAKCGGDAAIQQGGRAYLPRLCDAKSNPTWDYSAAALESGSGAARLAPILHVDSSQEELEAIAREMDLSWVVKVQPGKTYAGDEAKARLKEAVSHLIKLLDSPSPRLAEALTSISEDPDVVLRGYLDEIPKLPDDLTIPRNRKAAPDLTFAAIAFKHFPSPVTRCFLKLGVKAPKPASKASSQSSEEALLSSLGDDPIKLARGTRGYVFPAFTALPQWSPLSSGEPVWKEFDIAAFKEALKSLNQFNQKTIERDEKLQAAKQTLDYMLGKSATLPKSSDGEGETKAPSRPGKDARWPKVAELERELGENLNEGAWQLSRSSLRGLRDIVELWQKKPNASPADLQGDVKRYQADDKHKREIGSVQLFLLLCEERYQDLWRSDSQHHDDEEADQAVGILSDAIQVHQLEREVARFREPIRLTPAEPAFSRRLFMFSDLTDKLAKVKFGESDGNDADGKVNFVETAIALADGTGLRETRVRINFTAPRLSRDELLGGAESRWLQPMTAALGLAQPKPDGKFDSAVALMPDRLSDGSIRHLLNFPVSLDSTWLQEALGKASRWKGQFNGIKDKNLHLHWSGTAKDATKKNPWWESKAIIADGFTVLSNDLGQRSAGAWALLKVTCWKPETKRPVRSIGHDGTREWFAEVLKSGMYRLPGEDQQVQKNGGWVPEKSGKTGRMAEDDEYTAAFSLAKKLLGAETDEAVGSWLGPKGERSFPELNDQLIKIANRRLTRLGTYHRWSCFRPENFDDPKRKANVIEGQIVELEAYQDKEVLAWRELLKAGDIAGFRDQAGRAFETLRSDLEDHLTNLANLTAPLRQKLWSWQPRSGDSKYGDLLMVDFEDSHPKVRGQRGLSMPRLEQLDGLRRLFLRYNRSLDREKYTPAKFGRADEGRTSGEPCQALLDKIDRMKEQRVNQTAHLILAQALGVRLRPHQVSDDERRDRDIHGEYEKIDGREPVDFIVIEDLSRYLSSQGRSPSENSRLMKWAHRAVRDKLKMLAEEPFGVPVVETVPAYSSRFHAHPKNGQPGSRLHELHELATYQIQSLENLAAKTDSKERHRAKAAADLLEQFKAIRPENERRKALNRGRAKGVPALPLFTLYFPKAGGPLFLAVRDGNPVQADLNAAINLGFRAIAAPECIEVHRRVRATKEKEVYRPKLGNAREKAAFSKDDSISLDGALSKKFGASSSPNFFLEPDGLVQVEGDPLFDRATLNGHSLVSGVALWSTVNNAIYPRCAELNRQRIKLWNLEDDIPM

SEQ ID NO: 1307 - protein, 1385 aa, unidentified
  REGION 1..1385: note = Cas Enzyme sequence
MAIFDEKFTNLYSLSKTLRFELKPVGETQQMLLDENVFQKDKLIRDKYQKTKRFFDKLHREFVGEALAGLDLDYKNYFDALKIFKKDKKDKDAIKNLENAEKSLRKSVVETFDATAKSWASEKYSDCDLKKKDIGIFFEENVFKMLEERYKNEDDVMIDVLEETEYGTEVKIGEQSIFAGWKNFTGYFTKFHETRKNFYKDEAKKGHGKAGQISTRIVDQNLRRFCENLEDFKKMEKMKDKIDFSEVENNFKKSLSEVFTLDFYNRCILQDGIDFYNDILGGKTLENGEKLKGVNELINHYRQNNKGEKLPFLKSLDKQILSEKDNLTFGIESDEKLLEVLSEFVNIADVKIDIIKNLFRDFIDNNSKYDLAETYMSKEAFNTISHKWTGDTDMFEKNVFEVFKVNKDKSAKYVKAEDKYNFPNFIPLKYIKDGLEKVDTTNKFWRERYYEDTNDNTNNGFLTLGANEVWKEFLSIFDYEFSSLFSKTIKKGSDDEKIIGFDFAGKDLKKLLNDDNFALNKGEKLNPEEKIIIKDFADNFLRIYQMAKYFALEKDRKWNPDGLELGDFYTNSKFGYESFYLDAYEKVVKVYNDLRNYLTKKPWEDAQKWKLNFENASLAGGWDKNKEDSSLTVILRKEGQYFLGLMKKGCNHLFDDRHSMEFSQHCEDGKYEKMVYKYLPDAAKMIPKGSTQLKSVKEHFSTNDESFTVDTKAFIEPLTISKRVFNLNNVLYDKSDISKTTSDKGGVKQFQKDYLRLSEDFSTYKSALNDWIDFCKDFLSKYKSTINFDLSTLRKTKDYESLDQFYKDIDKISYKISFQDISEEYVNKCNKEGKLYLFQINNKDWNKGSTGTKNLHTLYFENIFSDENVARNFIIKLNGQAELFHRPKISEENLGYRKDNNGKTVIQHKRYNENKTFLHLPLTLNRGKGDPFAFNDTVNEFLANNPDINIIGIDRGEKHLAYYSVINQKGEILEGNTLNRIEKLDHDKQAILSNEKEIVEKRDNKNEIIDYKLKETGKKVRYIDYKLLLDYKEKKRRIERQSWQTIEGIKDLKKGYISQVVHKLANLAIKYNAIIVFEDLNMRFKQVRGGIEKSVYQQLEKALIEKFNFLVDKGETNSEKAGHLLKAYQLAGPEKNFKDIGKQTGIIFYTTASYTSKIDPVSGWRPNLYLKSGNAEVNKANILKFSRIEFRKGRFEFTYDTKNFILNAKAYPQKTEWTVCSCVERYKWNRKANNNKGGYDHYKNLTVEFEKIFKDAGIDISGDLLGEIERLETKGNEKFFSDFIFLFRLVCQIRNTNNSDKAKKDGKDDFILSPVEPFFDSRKNNGKDLPKNGDDNGAFNIARKGLIMLKRVDEWAKDEKKKYPDLFVGNVDWDNFCTEKKCSKK

SEQ ID NO: 1308 - protein, 1385 aa, unidentified
  REGION 1..1385: note = Cas Enzyme sequence
MKIMSNLSQLTQQYQVAKTLRFELKPIAETLDWIKKHNIIEHKNHILQGKDAERATNYQYLKKLLDEMHRIFLQQALVVEKNSAEKQELERIISNIHQQTLEGEYPSIINDKTIKIRDGLKILFERLYNKTLTYWVYQYKEEMPIFWQQDIDELNKKIADTDDKKLIKNYQRIISTLIKKQQKVEFKGKDYKALTSGGLALQLLEWLIRKEKIQLTYQELQLPNSALTTLCTWQDLLKIVRCFDGFTTYLTGFNENRANVYHVGDKQGFISTSVLYRCFEQNLQFHLANGQKWQTIWKNIQANKAQLLEKGFDIDSKLAQLEQVFDVSLDAFFAPETFAEFISQEGINKYNQVLGGLASKIGEHKTQGLNEIINLARQQISAKRSQFPPFQLLYKQILSKGEKPFIETFENDQEVIAALNEFISEHIDNPEGFISKFASELNDTLLAAIDDKAHIYIAKDKLNVISHALSGNWHSIKGWFEKVYTDKEVGKILNTKYINVEQLDSAMACIVEDENFYQAHIRTSKNELAQHIDEQNVFLSWFEYQLKSTLTKILIAAERYKQLNLSNIDKNRSKIGEKGFEQIAIIKNLLDECNELNRFLTHFKWQKSIPQQHADYWYSFIQSQLDAFPIFELYNKVRNYVTKKPFSTDKLKINFDNSTLLDGWDRNKESANYGVLFEKQGNYYLGIMTPNSNMIFDYDELPSDSENKIKQKNELKKQVLATSGESAYRKINYKLLPGPNKMLPKVFFAKSNIDFYQPSDEIIKIKNEKLYSKEAIKQFGIENLHKYIEFCQQSLLKHPEWAKAYGFTEESFKPSTSYNSVDEFYREIEQKGYSLTFDEIKESYINQKIANGELYLFQIYNKDFSANKKRPGTDNLHTSYWKCLFSKDNLVNTVLKLNGQAEIFYRPASIEYEPEKRIKGHHAETLKDKFNYPILKDKRYSEDKFLFHCPITFNFKAQSQPIGFNQTVRQFLKNNQQVNIIGIDRGEKHLLYYSIINPQGEILEQGSFNTITNNYKTDEGFKSKSIDYRQKLDEKEKLRDTARKSWSAIENIKDLKAGYLSHIVHKLAQLIIKYNAIVVLEDLNQGFKRGRFKIEKQVYQKFEKALIDKLNYLTFKDRESRTQAGHYLNAYQLTNKFESFQKMGKQSGILFYTTAEYTSTTDPVTGFIKNIYKSYKNVADSITFWQQFDAIVYNHVKDRFEFTYNVSKFSTANETLNKQIWTVCSNVQRSFYVAETNTHELFLVTDKIKELLANAGHNYSSQPNIKEFLIQCQSKQVHKDMLRQFNFILTMRVTDSNYESGTSENDFILSPVEPFFDSRKARTLLPENGDANGAYNIARKGILMLQAINTSETVDKVDLMVKKEQWQNYCQAEQVVKIQLKKLTQ

SEQ ID NO: 1309 - protein, 1386 aa, unidentified
  REGION 1..1386: note = Cas Enzyme sequence
MAKEKTGSIFDNFTHQYSLSKTLRFRLIPKWNTQNLLNLIEEDRIRNEKYKKTKIWFDRLHQEFINEALADFKFKDLKKYYSALNDLQKDRKSREKQNDIAKAENELRNEVVIKFEITANNWADKYKNLGLKKGGMKILFEADVFKLIKEKYKNEQDASMDGKNIFDDWGNWTGYFKKFFETRKNFYKSDDTSTAIAFRIVNQNLRYFCKNIKSFEEINKKVDISEVENNFSISRKDLFSTDYYNKCVLQNGIDAYNKIIGGEIRQNGQKIQGINELINKYRQDNRGENLPLLKELDKQIHSDSEKFIEDISSNAEFLEKLAIFYSEANSKLMSIRRLVDDFSKNYSDYGSLGDIYLSKEALVHNSNYFSDYENFEKDLFAIVADRQNKKDYDSLRIHRNDSKIENKDGVLRFPDFIKCIHIKQALDKQTNKIWKEKYYEKINNLKNVNDKFVQFLIVFRFELERLFLNDDNELKFGYDIFAKKIKTILNADKLAIGEDERIAIKNFADTVLAIYRMGKYFAVEKRRTWLANYDLNDKFYNEPENGYFQFYRDGFEKIINPYNLIRNYLTKKPYNLDKWPLYFENPTLADGWDKNKESDNMAVIFEKDGNFFLGIMNKNYRKIFIDEKESTIVSDKNYKKMIYKYFPNPSRMIPKCSTQLGEVKDHFKGSADDFEIYDKDNFIKPLKISKRIFELNNYEYPKSYLQSINGADIDELRRVKADSSKTNQVKLFQKDFFDLSKNEEVYKKALTDWVNFCKKFLESYKSTAISGFDYSRIKNADDYNSIDEFYRDVEAGSYKLTWGSWSDDYLKEKNQKGELFVFEIYNKDWSLGPKDKKRKRTKNLHTLYWENLFSGINFKKNFPFKLNGGAELFFRLKTAEEKLGYKIKIWDEKEKKYKWKIDKKQDGSVINRKRYTNDKAIFFHCPITINRISENKTETNINTDIRTAMSKNEEKMNVIGIDRGEKNLIYYSLIDRAGNIIKTESLNIIDSVNYAVKLGNRAKEREEARREWRDVENIKDLKNGYMSRVAREIADLAIQNDAIIVLEDLSMRFRQIRGGVEKSVYQQLEKVLIDKFNYLVFKNKSCDETGGSLNGYQLSAPFKSFREMGKQTGAIFYTQAGYTSKTCPKCGYRRNIKIPFNESIERIKNFIIALDFIVYDSSKNAFDIGYSKDKFIDSRDRENKKANRLYQNLTKVEMEKLNKFVLSTKGSLRYKWYDRYSEKSKLRRRGEKEYNGEIKENETKKGIVKEFNITEYLKGILDNASIDINSDIKKQILSVERKKEFYREFLYALFLLTETRQSISNTNVDYIHCPHCGFNSLKGFQGIEDFGGDANGAYNIARKGILIIEKIKQFKKNGGDLAKMGWGDLSVGIDEWDKFTQLKNTH

SEQ ID NO: 1310 - protein, 1387 aa, unidentified
  REGION 1..1387: note = Cas Enzyme sequence
KPKWKRLDAGESALWQHHELFQDAVNYYTLALAAMAAGLKSDSPKGKAMLEWRAEVLKSWVKARRKAIGFDGPHKRLANGLNADETETDAEKAFAACAKTLLKASSATPEACAKALLQLLEEADESDLNQFCVSRLPWLCTAHGKLDATPKNVAQQQETWMLTIIREIHEAPASQIAAVAEKLELGWFVTQMPKESMSGTEARTEAERLFKSASAKSKALATVADKFSKQLDKLGDKLKLPILGRKPKGAYPLAVVFKLFPAPETWEAFKTNTESLRKKAEKLKEAPLKIGTDFIAEARTAADQPIFDYFTNRALIRETGKEDRAVWFDFDLAAFIEAIKSPHRYFQDTLSREAAAAKLREKLHAIDPEAKPSWIKWSSTEKIVEKKKSKESITDTEDETTSFTFAGDKRIELLRKLVTKTLGYLAESVNPESEKAEYTIQERTLRGWTKIREEWRKLAAKGKTTPDELWKVVKAEQGQHRDDFGSAVLYEKLAETEFQPIWQDKGTPTNHADDPLEAWLQYKDLQFELEDKERPIRFTPAHAVHSPRYFIIPKAGKFGSEHEAGTLSFTTGMVLKTADGLKPSLVRVNYSAPRLRRDELRSNGDKNLESTSWLQPMMKALGLPEHDPQDFSNCRILLQPSSEQSIQLTFPVPINTDNIFKQLGHHEKWNYQRSGKKGEMNFAQFNYSADEPRAEMSLRWPSDIEFAKEAGKSRTREPIPWHTKMDSFSCVSVDLGQRDAGAYAVLQASANAQKDFGNRPSRIIGETGEGAAKKSWRAALIASGMIRLSGEDRVEWRAPSKLEKGETEFGWREELFGERGRSATPVETEQCAKLFSDFGIKENDLLPDDWRESLSFPEQNDKLLRAASRAQWRVSRLHRWCWFLADEKKRGDALKEIRESFTAPAERTERWLPDTVKTFAEKDNDPHLANELAGLLRSKQDKLPELFESLANRILPLRGRSWKWEKHPVATNENRVGLLTQNGAALPDVRLRGQRGLSLERIEQIEELRRRFQSLNQTLRRDIAGKPPIRRDEAVPDPCPDLLEKLDRTKKQRVNQTAHMILAEALGVRLVKPPANKAALRVERDQHGVYEKFREPADFIVIEDLSRYRASQGRAPRENSRLMKWCHRAVRDKLKELCEPFGIPVLETPAAWSSRFCSRSGVAGFRAVEVHPGLKSKSPWAWHLKRLELHRGNPEQHPLSEDALKESEQIEKLFAELEKLNRDVEGERPKWRTLYAPKAGGPIFIPICDEIAKPDHEKLQPAIIQSDINAAINLGLRAMSDPRLWSIYPRLRTQREKDGTMLAREKRKYGEKAKVKIEPPKEDKEIAATNRNPNFFADLSHSIPWGFAQLENDRRFPLVSGKALWSEVKKRQWDRINQINQQRLKPK

SEQ ID NO: 1311 - protein, 1388 aa, unidentified
  REGION 1..1388: note = Cas Enzyme sequence
MNDETKKEFKSFEDFTNLYALSKTLRFELRVPEDFCGTQVMLDQECVFEKDRIRREKYEEARPWINRLHREFIRDAFLNCDDHGFSAHEKFAFGYEDLSSYHKAIEDWKNDKKSKDTKKKLMQVEIGLRQKIVHQFDVCAKSWVARYPDLKSKKIDVGVLFKAGVFRVMAQKYKDEEGVVIDIEGKKTNIFDGWKGWAGYFKKFFQTRENFYSAGDESTAVAYRIVNQNLKRFCDNLASFEKIKDKLDIKKIESDLGVSCDDVFSLQYYNVCFLQEGIDAYNRVLGGYVGENDEKVHGINQAINEYRQRNKGDKIKFLAMLDKQIHSEKDKFIDEIEDDVQLLENLKKFVKAADYKLQAFRLLIEHFTEHLSDYGNELNKIYMSSEAFERNAGRWFADYASFERALITIGKTKGWKDAYSILGQKAPTEKDGGIKYPDFLVLGHIAQALELVGVSVFKEKYSEQIQNFLSLTSINAFVEVLRYEVAYQFAHFEADKNQTGYDVFKQQVDQIIASKPESINTDVKIAIKRYADTALVIYQIAKYFAVEKKRGWLENYELSDLFYSETNRGYLTMFYEATDSHADAYTEIVKGYNALRNYLTRKPYSTDKWLLNFDIQTLADGWDKNKEKANGAIILRKEEQYYLGIMHRDHMDLFTEKYAPMYSGVGFEKMEYKYFPEASKMIPKCSTQLQNVHQHFEGSDADFVLFKKGDFTKEVILSRRVYDLNNVLFRKDNVAVSFAPKNDEQKKEGVKQFQKEYLELSKNEFLYRAALKDWIEFCVLFLKAYNSTSIFDFTNLKKAREYNSLDEFYRDINALTYSHVFVSLSEDYVRERNNSCELFLFEIHNKDWNLKDGKKKTGTKNLHTMYWEQLFSDENQKEKFLFKLNGEAELFFRPKTDESKLGTKFISGEKRVNHWRYAHDKIFFHCPITLNRVSEDKTEYEMNANVRALIAKKQVNIIGIDRGEKNLAYYYVIDQDGNRKAQGSLNSLGETNGKTVAYAEILEKRAKDREEARREWQDIEQIKDTKRGFVSQMVRKITDLAIEHNAIIVLEDLNMRFKQVRGGIEKSIYQRFEKQLIDKLSFVVDKNEIEPIKAGHPLRALQLAYPISAFKDMGKQTGIVFYTAASYTSRTCPICGYHRNVRFQFEDKKQAVGLLKSLDGFSFNEEEDTFNISYSLDKMLTKEQLGGSKAKNKLYEDKKRKDTFVLTTKDAIRYKWIPKESPRLRALSDSMGVEICEEEGTDEQATRRGVTKKFDLTAYIKAALSKANITFTTGDFKSAICHEDRNVEFFQKIFFALFLLTETRQTISGKDVDYIHCPECGFDSRKGFQGKEFNGDANGAYNIARKGLMVTKKIRQYAKDADVEKMGWGELAVGLEEWDKFTQRDNAK

SEQ ID NO: 1312 - protein, 1388 aa, unidentified
  REGION 1..1388: note = Cas Enzyme sequence
MILMAIFDEKFTNLYSLSKTLRFELKPVGETQQMLLDENVFQKDKLIRDKYQKTKRFFDKLHREFVGEALAGLDLDYKNYFDALKIFKKDKKDKDAIKNLENAEKSLRKSVVETFDATAKSWASEKYSDCDLKKKDIGIFFEENVFKMLEERYKNEDDVMIDVLEETEYGTEVKIGEQSIFAGWKNFTGYFTKFHETRKNFYKDEAKKGHGKAGQISTRIVDQNLRRFCENLEDFKKMEKMKDKIDFSEVENNFKKSLSEVFTLDFYNRCILQDGIDFYNDILGGKTLENGEKLKGVNELINHYRQNNKGEKLPFLKSLDKQILSEKDNLTFGIESDEKLLEVLSEFVNIADVKIDIIKNLFRDFIDNNSKYDLAETYMSKEAFNTISHKWTGDTDMFEKNVFEVFKVNKDKSAKYVKAEDKYNFPNFIPLKYIKDGLEKVDTTNKFWRERYYEDTNDNTNNGFLTLGANEVWKEFLSIFDYEFSSLFSKTIKKGSDDEKIIGFDFAGKDLKKLLNDDNFALNKGEKLNPEEKIIIKDFADNFLRIYQMAKYFALEKDRKWNPDGLELGDFYTNSKFGYESFYLDAYEKVVKVYNDLRNYLTKKPWEDAQKWKLNFENASLAGGWDKNKEDSSLTVILRKEGQYFLGLMKKGCNHLFDDRHSMEFSQHCEDGKYEKMVYKYLPDAAKMIPKGSTQLKSVKEHFSTNDESFTVDTKAFIEPLTISKRVFNLNNVLYDKSDISKTTSDKGGVKQFQKDYLRLSEDFSTYKSALNDWIDFCKDFLSKYKSTINFDLSTLRKTKDYESLDQFYKDIDKISYKISFQDISEEYVNKCNKEGKLYLFQINNKDWNKGSTGTKNLHTLYFENIFSDENVARNFIIKLNGQAELFHRPKISEENLGYRKDNNGKTVIQHKRYNENKTFLHLPLTLNRGKGDPFAFNDTVNEFLANNPDINIIGIDRGEKHLAYYSVINQKGEILEGNTLNRIEKLDHDKQAILSNEKEIVEKRDNKNEIIDYKLKETGKKVRYIDYKLLLDYKEKKRRIERQSWQTIEGIKDLKKGYISQVVHKLANLAIKYNAIIVFEDLNMRFKQVRGGIEKSVYQQLEKALIEKFNFLVDKGETNSEKAGHLLKAYQLAGPEKNFKDIGKQTGIIFYTTASYTSKIDPVSGWRPNLYLKSGNAEVNKANILKFSRIEFRKGRFEFTYDTKNFILNAKAYPQKTEWTVCSCVERYKWNRKANNNKGGYDHYKNLTVEFEKIFKDAGIDISGDLLGEIERLETKGNEKFFSDFIFLFRLVCQIRNTNNSDKAKKDGKDDFILSPVEPFFDSRKNNGKDLPKNGDDNGAFNIARKGLIMLKRVDEWAKDEKKKYPDLFVGNVDWDNFCTEKKCSKK

SEQ ID NO: 1313 - protein, 1388 aa, unidentified
  REGION 1..1388: note = Cas Enzyme sequence
MAAEPTKRAYTLRLTGTDPTDQTWREALWHTHEAVNQGAKVFGNWLLTLRGGLDHRLADEVAQDSKNPDTVRRNARILLALSWLSVESDDGAPAPYVVATAADPQRKEKVVAALQDILKSSGLEAADIAAWVRDCQDSLSAAIRDDAVWVNRRAAFDELANKWNSLAPADARQVISEFFGEPADYLSLPESAAATARETDEDFSHIARAWLSTNWGSGKKSDKTQIATALETLADADLSPLDGRPGPELAPALLDCLGVKLAPGQDAEEELRKLVGWTTGRPSKGRSALTTAAKLPTLTRDELSKLQRKFADEAAEKRPQTGAPSSAWSTNLRQAVEQATTMRFKLHRDLIGEYSTMLDQAARRVSQAHTWLKRAEARRQKDLADKQKLKQVPAEVCDWLDRFCEERSLASGALAGYHIRPRAIDGWDNVVKAWSKTDCETEADRIAAARAVEADPEVEKFGDIQLFEALAADDAIVVWQSDGKANPQLLKDYVAAKAAEDRLHRYKVPAYRHPDPLLHPVFCEFGCSRWTIKFGIHQAWQALAQAQAELTKAKGILASARSEDEKMKANVRVLKAQKKVEQRRQEFEQARAAQRLTMDLWTGNDIKTTEMRWQSKRMPGDLAFATALSDSPVFLPRADRLGRAAGGAALSDAPAVSGLFEQNEWNGRLQAPRPELEAIARCQDPQRKTRLRSRLNWLITFSAELQPQGPMIAFAAAHDLQIRNSPLSTAKFLHVNEPRLSTNEGRKGYARFTLPPLSGLRVLSVDLGHRYAAACAVWETISETRLAELCKAAGHRPPQPKDMALHLPGQRNGKKVKTIFRRTGPAMWARLDRQFTIKLQGEDKPSRKASTHEFEAVVRFEKELGRTRSDENPRPHDVMRLMAEAVRSARLGLRRHGDRARIAFNLTTKTKLLPGGRTEKLTPETSVELLQDTLVLWHNLRNSPTWQDDFAESCWNESIAPLLENVVLPEPPVEGAAAQTVKAFRRTLRDKLKPAAQKLAGNPQLRQKLHTLWATRWRKDDEAWRGRLRWLRDWLLPRGKAKSDASIRHVGGITLTRLATIRGLWQTQKAFALRPDPDDLRRNVPKRGASSERFGQRVLDALDHLRENRIKQLASRIVEAALGIGKEQPKVNRRDPKRQRSQVHSPCHAVVIEDLKNYRFADSRPRRENRQLMQWSARNVRRYLAEACRLYGLHLCEVFAGYTSRQDSRTGAPGCRATDLPVPDFLKRYDRLVKNAEGEERKFLEALKARWDGCTDRSKLVRILDRAGKLFVSADESSPAVKGIQADLNAAANIGLRALLDPDWPGKWWWVPCGKDGKPAKEKCKGTRAFDLNLQLLPATECRGKDIVNAWRDVSADPIVPGEGMSYAEYWNRVKARVVVNLRRQAGL

SEQ ID NO: 1314 - protein, 1389 aa, unidentified
  REGION 1..1389: note = Cas Enzyme sequence
MNRIYQGRVTRIEAKKEDGTFEQVAFGQDQSTCPLWQHHTIFQDAVNYYLMAMASLAKEQIKGADKLMSDLPKRMVDAWETFPRTDAARAGARSLRDSVAPWIGLDGSSTIAQAYESILDGNTNDKKALSYALALVLEECSGDSGIQQGGREYLPKLCDAESKATFNYSSEALASGDGKDRVAGVLHGDPSEQDLKALASEMDLSWMVKVSPGEFYEGTEAITRLNQAIDHLAKMIAEPSDRLALSLKDIPGAHAEIIRMREAVKSLPEGYRIARNRKAAPDLTFSSIVFMAFPSRLTAACLRLGVKAPAKSAAPRKTKEKVDFAALGDDPVKLARGTRGYVFRAFTALPGWNPSNPGKPSWKEFDIAAFKEALKALNQFRLKTEERENKKKDLEGLIAYQIGSPIKGWKLTKDDSGEEAELPTPLDPGLLKLAWDLEEEMTRGLSDIVVGEKKLLPFGEGHLPIREGGWTVTRASLRALREIVGDWLKILAKNPEAPTAELEEAVKEHQRKEGKAGSIGSVGLFLTLCDPRYRPLWISPAPEDADNDGDSNRFLHRLADLHDDVGDYLRCQESVNLTPAEPRHSRRAIMFSDLNGRSAAKYLNEDTVEVSIARLSAGIVGEMRCRLRFSSPRLRRDGLLGEGWMQPMTRALGLKIDQSEPEPFDSALSLMPDFDSSGSIRFLLNFAANIDAEPLRGALGKATRWDRQFNGTKEKNIHLHWPGTADPAKMKVTPWWDNPSIIDDGFTVLSTDLGQRTAGAWALLRITSSRPETPRPVRSIGHDGTREWFAEVLKTGMHRLSGEDAMIRGKDGHMGQELSGKTGRMASEDEWNEAVELAKALLAEEPENWVGSYRVEKSHPEQNDSLLVLANRRLSRLSTFHRWSCFDPDKETDPARRDSLIAKLSAELDRWEDSDVLSWAAKLAAGDVTAFRAAAGEAFAKYRQDLLPLLLKLANRVAPLRDDLWGWKERGDGSPYGDLVRIPGREGAKPAIRGQRGLSMARIEQMENLRRLFLRYNRSLDRSPGTPAKFGSADAGRTSGEPCQELIAKIDRIKEQRVDQTAHLILAQALGVKLAPHSLDAATRRSGDHHGEYVRISGRSPVDLVVIESLERYLTSQGRAPSENSRLMKWSHRAVRDKVKMLIEEPFGIPVLEVPAAYSSRFCAITSEPGSRCEERASLDDYLQELHGRRANTPPTAGHSDMRPWNRKLLGQFERLAGINATRLAAGKSPKTLLIPKTGGPLFLGAKESPVVQSDMNAAINLGFRAVAAPGALHLLHRVRSQSDGQEITTLVKNAREKATYGGKGVPITIKGAASPKLSKSANFFHDAKGIARFDSGEITLGGKAIPVASGIGLWHAVNEAFLPRIVALNEERLMRILPVFDEKDEIPM

SEQ ID NO: 1315 - protein, 1390 aa, unidentified
  REGION 1..1390: note = Cas Enzyme sequence
MGMNRIYQGKVIAVEIPDGSDEPSHPKWKKLEEWPSALWQHHLLFQDAVNYYTLALAAMAAGVKSDSPKGNAILVWRAEVLKSWLKARRNAIVFDGPHKRLAAWLDADPAEADTDKAFTACAKALLKKSPATPEALAKALVQLLEEADQSDLNQFCVSRLPWLCTAQGKLHATPKDVAWRQEARMLTTILDVHRASASHLAALAEGLPLGCFVAQMPARTLTGATARAEAERLFVSASARAKGLLAVADEYSKRLDQLGGQLKLPHLGRKPKGAYPLAVVFKLFPTPETWEAFKAATEGICKKAEKLKNSPLEIGADFIAEARTAADQPIFDYFTNRALIRESDRENRAVWFDFDLAAFIEAVKSPHRYFQDALVREAAAAKLRATLHAIDPHASWIKGSDTEKIVRKKTSGESGNMEDEMPSFTFAGDTRIALLRKLVTETLGYLAESENPEAEKAEYTIRERTLRGWTNIREAWRKLVENGQTTPDEFWKAVKAEQGQHRDDFGSAALYGKLTETEFQPIWREKGAQPNHADDPLQAWRQYKELQFELEDKERPIRFTPAHAVHSPRRYIIPKAGKFGSEHEAGRLAFTSGMVLKTAEGMKPSPVRVHYAAPRLRRDGLRTNFGENLESANWLQPMMKPLGLAEQDTLDFSNCRIILHPSDAQDIQLIFPVEITPDKLAAGIGKGKLWERQFNLHPDGENFNNATLRWPHEKPPARPPKPWFDLVESFSCVSVNLGHRDAGAYAVLLASANAEKDFGKRPSRFIGETGEGSAKKSWRAALIASGMLRLPGEDRLEWRAPSKLEPDETGFGWREELFGERGRTAAPEETAQCARLFADFGIQEDDLLPEGWRTSLSFPEQNDKLLRAASRAQWRVSRLHRWCWFLTDKKKHDDALKEIRASLAAPGDLYERWLPDTLKTFAEKDNDPRLASELASLLRGNLAKLPELLESLANRIVPLRGRSWRWEKHPVATNQNRVYWLTQHGTALPNVRARGQRGLTLERIEQIEELRRRFQSLNQTLRRDIAGKPPIRRDEAVPDPCPDLLEKLDRIKEQRINQTAHMILAEALGVKLARPPANKADLRQECDQHGVYEKLREPVDFIVIEDLSRYRASQGRAPRENSRLMKLCHRGVRNKLKQLCEPFGIPVLETPAAWLSRFCSRSGVAGFHAVEVHPGLKTEFPWSWYIKRLELHRKNPGKHPLSEDAKTESEQIEQIFADLDAANKDVHGERPKWRTLYAPKAGGPIFIPICERIANPDHEKLQPAVVQSDINAAINLALRAIADPRLWSIHPRLRTQREKDGSLIAREKRKHGEKAKRRIEPPKEDDDVAGTNQHPNFFADLSGSIPCGHAQLEGDEQISLVSGKALWSEIKKLQWQRIREINHRRQQRNP

SEQ ID NO: 1316 - protein, 1390 aa, unidentified
  REGION 1..1390: note = Cas Enzyme sequence
MNTNFSNLFSLSKTLRFELIPEPGVREYIEKLKLSIVHKEKSTLMDADEHRKRMYDKYKLLIDECHKWYIDKKLNAFVNKNDEIEKVKELLNHHYMQFIQKVKFDKQNELIKLLCKHFADSNIFKSEAIIDVDNKKKKTKKSNDSAIKNHIQDWFVSEEYINTKRNIDEDKKTLTAFDGFFTYLGNYNNIRENLYKSDGKKGTIGNRIFYKNLDVFCKNIKLFNSLPEDLKEKINIDFDKDDLFTIDSYLHFITQKGIDNFNEIIGNKAVNTGEKQDKGVNGLINEYNQNQTKKNKIKKFKKLQNQILFRVKDSSYKRKINTNDDLVEVLNFYIKETDFINQIKTQFELLSSDSLYEIFISKRNLSNISKLIFTDLIDESHFAIKNGLRVVFENTMNKTIEKTNNKGQKIYKNKTTKQIEEEIIKFMKNDYFDLLAVENAVKYIAENENIETLKKFSIVDFFKQATIRITEETWNDAKKEKQRITVTKNLFDELKNNVVDVKNLLHDFDFEKPLYKQKNHKDRPIEIIKKYLDALQQLAQFALLCKVDEEKVENGELEVDIDFYNSLQNTTEACFGVIENYKQIAAYLTQKEYDSSKMLIRFDRQKNIGGWTESVTDNSKNYTQHGGYLFRKKRADNLYDYYLGVCKNPKLFKCIEKNKVSENDYSEFERLEYYFIDSKSFYNTQFTIDYAQFKKDFISFFVNFLKENKSKINENDYIKITNKIDKVKEDNKTPSLYFNLIYENNALNKQLLENKQFKDFNAKQINETIASMQNIKRLNFDAEFYEVGRYNYFTDIMNAVEKQLAKHRCFNYFPISKTELASINSPDNKGEINNPFLLFKIQNKDLKFLPNKKNKNATKNLHTLYFEELMRGGQATYDLGSAEVFFRKSSLHYGNSTWEKGHHFNDEKNLEAKFKQTQYDKYPQQIGEGEFATNGNARIIKDKRYGQDKYLLHLSISCNYQEPEKPNEKVLDALNINTIEFLKQNPDFKIIGIDRGERHLLYVSVIDCNGKIEFQKSLNILENKNFDKKIEYHTKLTQKENERIKARQNWSAIENISKLKEGYLSQAVHEITNLIKKYDYKAIVVLEDLNAGFIQERASIEKNIYQKFENKLIEKLGFWVDKSNSESLQNPKQMAVPLGVEKLKNVKHNGFILYVPAAYTSKIDPTTGFMFLPYIVNLSFESITKSQKIFEEKIKNFKWNEEEQYFQFDLNFKHKTKVDKKEIDVMDITYTICTLANARRYYYSSKNKSVRKIDVTQELKDVFNKYKIDYQNTHNVETEIAKMNDESFFKKLLFLLKSTLTLRHTDAEGNDNIISPVKNNYGRFFNSAETDEYNLQLPNNADANGAFHIALKGKFLLEKLFKLDKVSEKDYEYSLVNWFNDLEKYHSNTN

SEQ ID NO: 1317 - protein, 1390 aa, unidentified
  REGION 1..1390: note = Cas Enzyme sequence
MLALGWLSVESVRGAENHQHRVREINPGQSLTAELADHLLRGVLSTCKGVTQEVELARWIDDCLLALTANIRPDAVIVNRAASFAEWQRTVGPAGSEMPEQARRILFAMCGDGFASLTLPDEAALKDDAEADADTSEPDSEQAAASQAEADEAVEPSKASRGVFGDLFGGDATEKLSRAAGKHEFADDARRMLMELDGIPPTREVIIAFRKQQDWPDLEASRSEKYPQEVSSSGAPTDVAKRYRKLLVCLKLWPTSAEENGIPRPSAVSRYGKQVTARDEHSRNAHINALDLIDACPAPARDTDESSAGPASDRVFTPPWATALAEGVAAATNMPMDAKPLNEFKRLMFAMAARRISQTQTWTKRNEAERHKAAVKEDAAKKKLEELDGDNHAQTWFTAYEERRADRSGSTNGFRVTRRMIGECDAVFKAWHGTRTPEDREKQTASIQTKAEKFGDGRLYADLSEDPAGAAIWQHDQGGEILKQWVKLRQAQHDQQRLKIPRFCHPDPFHHPTWCEFGGSSKPKVWYAWKPDTKPQNPEAGGDADASRRLWMLLPDFSAKQAKAVPMRWCSKRLSNDLGGVGEVVEESIPRADRLSVAVAKLPVREANGQRIRYRPEHPFTKDAKGWNARLQVSRDTLEHLEKQWDDARCIWRDGGKALRCARWFITFAPALAVSESLGYKIHPKLHAITNSNPHGELDKKQKRKWHAQLGLSRLTGLRVLSVDLGHRYAAACAVWQTLSEAEFKKEIAGREVADGNAGKSSLYLHTRHTDPKTGKVRTTVYRRIGNDSLGDKSSHPAPWARLDRQFLIKLQGEEKPARKASAAEYESVQQLEAELGFVRDATNALPWRVDGLMSEAVRTARLALRRHGDIARLAYAFKPGAEQHAPGGGVKEHTPDTRKAALLAALLRWHDIATADRWRDQIASAAWFTHIAPRLTADLPMLAEDPDRSERKRHAAAIEKALEPIAAELAKSGTRGVPALHALWKERWEQDEGRWGIRLKSLRRWLTPRGLRARSDDSPATAAVRKARRRAAQNVGGLSLDRIATIRELYQVQKAHRYKPNPDDLRAGVKLMEDDAAKGYKFGNRTLQAMERMREQRVKQIASRIVEAALGVGRMSRTKGRDRKRPQSQVDALCHAIVIENLRNYRPEEVQTRRENKALMNWSAGKVRKYLEEGCQLHGLHLREVMPNYTSRQCSRTGRPGVRCQDVAVDAETGEAKAWWWKKAVASAAGKGDEESKLLVDLDQRIRAADGERPATVRVPRRGGDLFVAAGGDGRAIQADLNAAANIGLRALLDPDFIGKWWYVPCDTTTGKPAKDKCAGAACLDLNKPYLPEVQAKDGEGAKGNAKAREKINAWRDVGSAEGWMVHAAYWFSVQKRVAQVLRPVNGLQ

SEQ ID NO: 1318 - protein, 1391 aa, unidentified
  REGION 1..1391: note = Cas Enzyme sequence
VQFLKEGTKNEWTEPQADLTALWEHYELFQDAVNYYLVCLLALAGDECKAQKELREKLVIEPTSEKDNPLFVWGSFRRRGATRQGLRESVKKYLCPGKETPTWDECAAAVLEGNPHAESDEGRTLLDRGLRQLLDKCKTSSGIKQAAPVFQPRYCSPSYKGNYGADSTTLNREVEKALLPHVVHAADTTHESEELNAFTVHSIALPNAKEPEFTGAKALSKLKGMLQELKALFEPDDEQWDRLSAKLGELPATLSIPGYAPTAAKGVIKHQLFAMFFFKHVEKSSFTLELLRQFTRKPKEGEKRPEAKAAAATDGDPIRLARGQRGYVFRAFTSLPQWTTANDGVGDWTPFDFAAFEEALKALHQVDEKAVERANKWEALNTRHKYQRDGTKKWKGATGGEEDTRPPVLNGDPRIARLEQLVDVEMKEEYEMAEGVSVKYGLQQRTIRGFRDLRKKWNDAIKDEPAYSAGGAARVLERLRDYQKENPTIVGSVRLFEEMLREPNWLIWREPTADEMKQWRSDAGLPDDVEFAKDPLQALTDERELKEEMDRLKEPIRLTPADPVHSRRQFYFSDTTNLKAENRLNHHQGYVETELAIHEQGRWQKRWARLHFSAPRLQRDQITATEKSVESRWQQSMMAALGIQTGLSKDGKPTSFERCVAVALMPEQRDDGSNHHLLNFPIELDGDAIAKQVGKAQRWDANQFGPNFKNASWLRWPSTPDKNQRSEPWWQSGKPFSCLSIDLGQRDTAAYALILASPGDAPKSISRWLGEAGGKTWWATVKAKGMMRLPGEDAQVLREGQWQEEFSGEKGRLQSAEEWKEAQDICARLGLVADEILGTDASKHSFPECNDRLLYALRRAQSRLARMQSWSCLEKDEKRRPRIVEQILEAAGEQDQAPPDGKPAPAKEPLLVELKAAFEKQQWAVAAQTLINEANRLRELICREMVLIADRIQPLRGRKWEWALRDDGSGCHVLRQTQRGTDERKKRLAGQRGLSMERLEQLESLRQRCQSLNRALRQTPGEPARLGRSKRGIELPDPCPELLERLDALKEQRVNQTAHLILAQALGVRLKAHSLTDEERQQRDVHGEYERIPGREPVDFVVIENLDRYLASQGRSRGENSRLMKWCHGQIRDKLVQLCEVYGLAVLETPAAYSSRFCSLTGVAGFRAVELHPEHKDDYRWKKHLERLADPERAKKLSTEERKESQWVKALFDALEKLNAGVKEKNPQRPQWRTLLAPVAGGPVFVPMKGKPIQADMNAAINLGLRAMASPEAADIHLRIRAERKGDGFVVRAENIREKAQWGDKPPAIEVGNDADRKKLLEDARLNFFKDVGAVATFDKAKVSNKYGYASGRGLWGSINQKDFLRCGTLNNDRLAAAGLGRPLEEEDEIP

SEQ ID NO: 1319 - protein, 1392 aa, unidentified
  REGION 1..1392: note = Cas Enzyme sequence
MAESLPATQRAYTLRLRGADPDDESWREALWRTHEAVNKGAKAFGDWLLTLRGGLSHELADEPVKAKGGRRQPSADEKRDRRIVLALSWLSVESERGAPQQFIVASGKDNDKQRQHKLVKALRDILQKRGVGKAELDEWVKACEGPLGAAIREDAVWVNRSAAFDQAVKRIGKSLSRDQVWDLLERFFGSKNAYLAPIVLKDEAEPSEKAKDLVQKAGQWLSSRFGKGKGAKFEVLSGAYQEIERWAKSARPSSPAHLMAHLARLLKAPSEDLDGVLSIISGPGYKSATRNLLKKLSGQQRVSSEDLARLAKTAADDRVKCKSKVGEKGKRPWADTILEDVQRACGFKYIPDGGPARHRQFAVMLDHAARRVSVAHTWIKRAEAKRRSFEEDARKIGQVPSQAKQWLDDFCLERSRSSGSLEGYRIRKRAADGWEHVVSRWAGADCTTVADRIAVVRELQSDPEIDKFGDIQLFEALAEDDATCVWKPEGEPDPQPLKDYVAAKDAEFKRRRFKVPAYRHPDPLLHPIFCDFGCSRWDIKFDVHEAYKRKERKSTQTQTNPHGLTMRLWDGTDVSDVRLRWRTKRLFGDLNLGGAGAGKDVSRADRLGRAAAGAQEGEAVQIAGLFEDKDWNGRLQAPRPQLDAIARRVDAHGWDKQAVRMRARLEWLLTFSARLRPRGPWTEFAKKNDLRPDPVYWPHAAENKNRQGRGRLILSRLPGLRLLSVDLGHRYAAACAVWEAVSAEAVKKACKEAGHPNVKEDDLYLHLKRKDQGKLRTTIYRRIGADRLGQPTPRKEVAHPAPWARLERQFLIKLQGEDETPRKARKDEFKAVENLERELGRERSEADKLPHRIDELMSEAVRTVRLALGRHGNRARIAHYLVATEKTMPGGVVQSLDQSGRVRQIAYALELWYELAASSKWKDDWAAELWEKQAWAKDVPLQKRDEETVTRQALKKEKKERCGKLEAAAENLLRDGARCRDLSARWAKRWGEEDKKFRERLRWLRDWILPRGKKAAKNPAIRHVGGLSLTRLATIRSLWQVQKAFFTRMTPEGRRRDEDGRPLTAGEGFGQKVLDALDRMRDQRVKQLASRIVEAALGVGKEQEKCANRDPRRPRECVFEPCHAIVIENLTNYRPEETRTRRENRQLMRWSAGKVKKYLSELCQLHGLHLREVGAEYTSRQDSRTGAPGIRCQDVPVREFMRSPFWRKQVAQAEKKLEKGEGGARERLLCELNANWKDSSEKELKEAGVIRVPLNSGEIFVSADAKSPAAKGLQADLNAAANIGLRALLDPDWPGAWWYVPCDAKTMKPSKEEASGSAAVDMEKPLVQVSEAKPGARGGRGKSEKPVVNLWRDVSARALEPGDWRRWEPYWNDVSARVVRLLRKQQGLPDFA

SEQ ID NO: 1320 - protein, 1392 aa, unidentified
  REGION 1..1392: note = Cas Enzyme sequence
MNRIYQGRVTRIEAKNKEGIFEPQDFGLDQSTCPLWRHHRVFQDAVNYYLLSMASLAKEQIEGADKLMADLPKRMVDAWERFPKADAARAGAGSLRDSVAPWIGLDGSATIDQAYAAILEGNSSGSNVLSYALSLVLKECSGDSGIQQGGREYLPKLCDPDSKATYGYSVETLAAGDGKEKLATVLHGEATEGELKAIAGDMDLTWAGIKVSPGEFYTGKEASGRLKEAVDHLEKMLAEPSPRLAKHLASLPDIAAEIPRMREGLEKLPGDCRIARNRKAAKDLTFSAIAFMAFPSQLTAACLKLGVKAPTKSAASKKQDGIDFTALGDDPVKLARGSRGYVFRAFTSLPRWNPVKPGKPAWKEFDIAAFKEALKTLNQFRIKTEEREKRKQQLMGQIAHRIGTPVPGWKPSKEESGEEGEIPDMLNRELLELGWELEEEMTRGLSENVVGELHRLPFGAGSIPVREGGWKISRASLRGLRDIVPEWSKLMEKHGPAVPTVTLGNAVKAFQSKEGRASSIGSVGLFLTLCQPRFRPLWMVQDEEEGEDFEENRFLQKLADLHESVEEFLRCGEAINLTPAEPRHSRRLFMFSDMPGKSAPKYHGMDCLEISLATGMDQVMEGRFRLRFAAPRLRRDGLLGGEGGWLQPMARALGLRLPDQEPKSFDSAVSLMPDFGDSGSLRYLLNFAADIDTDPIRTAIGKASLWDRQFNGTKDKSIHIHWPGTADPVKMKATPWWEKSAVIEKGFTLLSTDLGQRTAGAWALIRITSRRPETPRPVRTIGHDGTREWFAEVLKTGMYRLPGEDAVVRGKDGNMGEEPSGKTGRMASEGEWNESLELAKALLAEEPENWIGAHRFEKSYPEQNDALLKLANRRLSRLQTFHRWSCFDPEKEDDPERRSSLVSKLVAELEHWEDDDVSAWATKLEGGDVAAFQIAAGEAFATYRAELLPLLVALANRVAPLREDRWSWKLRGNESPYGDLVRIPREPRSKLPVRGQRGLSLARIEQMENLRRLFLRYNRTLDREPGKPAKFGRADEGRDSGEPCRDLLEKIDRIKEQRVNQTAHLMLAQALGVKLAPHTLDPQTRREGDHHGEYTRIPGREPVDLVVIEDLGRYLSSQGRAPSENSRLMKWAHRAVRDKVKMLIEEPFGIPVLEVPAAYSSRFSAVTGEPGSRCEERPFLDDYLEESLLRRSHTPPGTGQSDMRPWNSKLIAQFERLAEINAQRKASGRTPLTLLLPKTGGPLFVGAKASPVVQSDMNAAINLGFRAVAAPDALHLLHRIRSERDGKEIRTVTRNAREKAAFGKKGIVIGLRSEASPKLSKSSNFFYDEKAVAMFDRGELSLEGKTMPVSSGIGLWHAVNSAILPRIVALNEERLLRMGSGFGNDPRDEIPM

SEQ ID NO: 1321 - protein, 1394 aa, unidentified
  REGION 1..1394: note = Cas Enzyme sequence
MSTYTGSIFDEFTKQYQLSKTLRFELKPVGKTAEWIKQHNIIGVENNELSGIDAVRAQNYKYLKRIIDQMHRIFMQEALCNLEQEYAVELSDKIVALFKEKDFDLKKDKDLPKILEKIFDSKAEEWIKFYKVDMPKFWQEDIEKLNQEKDLLTSNQDIKKKDNLIKKIEKKITNCKIGAKDIKIMHSNEDTLNFLEWQVRLDNIHLTWKDIDYNESNELIPNAELIKFIHSFDRFTTYFSGFNENRANIYDLKDLKSTSILYRTFEQNMRFHFANIEKWEQVKKSIKKYEEIYNNKGYHWQKELEQYQINLDFSVEKFFIPESFVSHLSQSGIDKYNQILGGLPDLEGNRKIQGLNEYINLTRQQANAKRGGFPPMQKLYKQILSKSDSVFIEEFADDKDLFDAVKLFYKENFQIKEDNEQSLICSFAEKMTQMVNDYSSDSEIDKLFLDKENITKISQALTGSWAAINTQLLDITGDKKFEKQKVFSFLEIEQALKEGVRNDVFTLKVSSETSVVLTYCLEYLKELLNNVYKAWNDLKVNGLLERSQIDKNRTNETDKGFIEIALLKSFLDATNEIAFYMRTWSLKNKPSFEVNEDWCSSIDEFLHNYNVIGIYNMTRNHVSKKAYSTDKIKINFNHNTLLDGWDRNKESANRSILLEKNGLFYLGIMTEDSNTIFDYDILPGDTDKKKTIKQDLCSKVIADKSESSFRKMNYKLLPGPNKMLPKVFFAKSNLDMFNPSSKIINIKEKKLYSKAMIEEFGIQNLYDYINFCKASLCKHPEWSVAYGFNINSFPDTHSYNSIDQFYKDVEMMGYKVTFDNIKESYIDAKVANGELYLFQIYNKDFSTNKKSVGNDNLHTSYWKLLFSEDNLKDVVLKLNGQAEVFFRQASLELTNEKKLKGYHADKLRGKFDYPIIKDKRFTENKFFFHCPIGLNFKSSSIPIRFNEKIRKFLKDNPAVNIIGIDRGEKHLLYYYVIDQNAHVIEQGTLNGISNGFIPRGESQERIINYHDKLHEIEKNRDKARKNWGVIENIKELKSGYLSQVVHKLSELIIKHNAIVVLEDLNQGFKRGRFGVEKQVYQKFEKALIDKLNYLCFKDRENYIQAGHYLNAYQLTNKFESFQKLGKQSGILFYTTASYTSSTDPVTGFLKNVYASYGSVEKSVDFWKSFDSIIYNHDLDRFEFSYTLGSVRSRSLQSESGENNVNQQSWTVCSCVTRSRYIKTRNPQTDEQKQDATSEQIGNKGMHETFFVTDDIKQTLDKHEVDYKTNNDLKSVLINKTDKRDAAFHKSMIYLFNAIMSMRVTDSNSESGTSENDFILSPIEPFFDSRKQHKNLPNNGDANGAYNIARKGICILNKINDAEDISRVDLLVTKQNWQNYVQNQAVVKTQMDKLS

SEQ ID NO: 1322 - protein, 1394 aa, unidentified
  REGION 1..1394: note = Cas Enzyme sequence
MNRIYQGRVGKIEVKLEDGSYQPVPFSGGGHSGDQSTCPLWLHHQIFQDAVNYYLLAMASLAKQPVQGAGRLMGDLPARVAEAWEVFPRQDAARAGARSLRESVGPWLALDQSATLQQAYEAILEGNTASSKELSLALALVLDQCSGDSGIQQGGREYLPKLCDSKSKATYSYSSSSLESGKGKEQLAHALHGEPTDADLKELAASMELSWTVKVSPGEFYEGPEAIARLSEAISHLETMLSSPSPRLAESLLGVSDWVSEIARLKASLKTQPEGYKIARNRKAAKDLTFSSIAFMAFPCQLTRHCLRLGVKVPKKEPKKASANDVDFSALGDDPVNLSRGSRGYVFPAFTSLPSWNPKSSGEPAWKEFDIAAFKEALKALNQFRLKTEEREERKKNLEGLIAHLIGTPIEGWKPSKEDSGDEGELPVSLDLTLLKLAWELEEEMTRGLSENVIGESNFLPFGKGAIPVREGGWTVTRASLRGLRDIVEDWMRIIAKNPEAVREEFVEAVKAHQRKEGKAGAIGSVGLFLTLCEPKFHPLWMNTNSTDDEADAGSNRFLNRLADLHESVAEHTRCKEPVNLTPAEPRHSRRAFMFSDLNGRSAAKYVTGDMVDVSIAHPAAKIVKETRCRLHFSSPRLRRDGLLDSEEGWLQPMTKALGLKLDQPELKTFDSALSLMPDWDSSGGLRYLINFAASIDAEPLRSAIGKFHLWGRQFNGTKDKNIHLHWPGTVDVAKMKVTPWWNNPDIIESGFTVLSTDLGQRTAGAWGLLRITSSRPETPRPVRSIGNDGAREWFAEVLKTGMHRLPGEDAVVRGKDGQMAQELSGKTGRMASEGEWAEALDLAAKLLADDPKSWVGSSRTEKSYAEQNGSLVVLANRRLSRLATFHRWSCFDPDKESDPKRRESMVAKLVAELTQWEDADVTSWASKLGEGDVAAFKRSAGEAFAKYRRDLLPLLVKLANRVCPLRNDLWAWKERGDASPYGDLVRVARDQGTPPPIRGQRGLSLARIEQLEGLRKLFLRYNRALDRSPGTPAKFGRADEGRASGEPCSDLLKKIDHIKEQRVNQTAHLILAQALGVKLAPHSLDAAARRDGDHHGEYAKITEREPVDLVVIENLDRYLTSQGRAPSENSRLMKWSHRAIRDKVKMLIEEPFGIPVLEVPASYSSRFCAVTSEPGSRCEERAFLDGYLKEMLNRRANTAPPAHQSDMRPWHNKILGQFEKLAEINAKRSADGKPPKTLLLPKTGGPLFLGAIESPVVQSDMNAAINLGFRAVAAPEALHLLHRVRSQNDGQEITTVAKNARERAAYGKKGAPISMKGARSSKLSKSANFFHDVKGIARFDRGEITIAGTTIAVASSIGIWHAVNESILPRIVAINEQRLGLPALFDDKDELPM

SEQ ID NO: 1323 - protein, 1394 aa, unidentified
  REGION 1..1394: note = Cas Enzyme sequence
MNRIYQGRVGKIEVKLEDGSYQPVPFSGGGHSGDQSTCPLWLHHQIFQDAVNYYLLAMASLAKQPVQGAGRLMGDLPARVAEAWEVFPRQDAARAGARSLRESVGPWLALDQSATLQQAYEAILEGNTASSKELSLALALVLDQCSGDSGIQQGGREYLPKLCDSKSKATYSYSSSSLESGKGKEQLAHALHGEPTDADLKELAASMELSWTVKVSPGEFYEGPEAIARLSEAISHLETMLSSPSPRLAESLLGVSDWVSEIARLKASLKTQPEGYKIARNRKAAKDLTFSSIAFMAFPCQLTRHCLRLGVKVPKKEPKKASANDVDFSALGDDPVNLSRDSRGYVFPAFTSLPSWNPKSSGEPAWKEFDIAAFKEALKALNQFRLKTEEREERKKNLEGLIAHLIGTPIEGWKPSKEDSGDEGELPVSLDLTLLKLAWELEEEMTRGLSENVVGESNFLPFGMGAIPVREGGWTVTRASLRGLRDIVEDWMRIIAKNPEAPREEFVETVKAHQRKEGKAGVIGSVGLFLTLCEPKFHPLWMNTNSTDDEADAGSNRFLNRLADLHDSVAEHARCKEPVNLTPAEPRHSRRAFMFSDLNGRSAAKYLAGDIVEVSIAHPAAEVVKEVRCRLNVSSPRLRRDGLLGSEERWLQPMTKALGLKLEQPELTPFDSALSLMPDWDSSGGLRYLINFAASIDAEPLRSAIGKFSLWGRQFNGTKDKNIHLHWPGTADVAKMKVTPWWNNPEIIESGFTVLSTDLGQRTAGAWALLRITSSRPETPRPVRSIGNDGAREWFAEVLKTGMHRLPGEDAVVRGKDGQMAQELSGKTGRMASEGEWAEALDLAAKLLADDPKSWVGSSRTEKSYAEQNGSLVVLANRRLSRLATFHRWSCFDPDKESDPKRRESMVTKLITELAQWEDADVTSWAIKLGEGDVATFKRSAGEAFAKYRRDLLPLLVKLANRVCPLRNDLWAWKERGDASPYGDLVRVARDQGTPPPIRGARGLSLARIEQLEGLRKLFLRYNRALDRSPGTPAKFGRADEGRASGEPCSDLLKKIDHIKEQRVNQTAHLILAQALGVKLAPHSLDAAARRDGDHHGEYAKITGREPVDLVVIENLDRYLTSQGRAPSENSRLMKWSHRAIRDKVKMLIEEPFGIPVLEVPASYSSRFCAVTSEPGSRCEERAFLDDYLKEVLNRRANTVPAAHQSDMRPWHNKLLGQFEKLAEINAKRSADGKPPKTLLLPKTGGPLFLGAIESPVVQSDMNAAINLGFRAVAAPEALHLLHRVRSQTDGQEITTVAKNARERAAYGKKGAPISMKGTRSSKLSKSANFFHDVKGIARFDRGEITIAGTTIAVASSIGIWHAVNESILPRIVAINEQRLGLPALFDDKDELPM

SEQ ID NO: 1324 - protein, 1395 aa, unidentified
  REGION 1..1395: note = Cas Enzyme sequence
MADNGRSLANFTNQYQLSKTLRFELKPVGQTAEWIKKHNIIDVDGDKLTGEDADRAVNYKYAKLLLDELHRQFIEDALKLAPEAEFTKKLKDKIIELYSASEIKDADLPGNIFKQILNNKADEWIKLYQQEMPQYWQKEFDAKIANETSEKKIKYLRNSFDKLNKRCQEQPFKNSGVDVLYGSNEDPIKLLEWAVRKEKVRPTFGDIKHEGNPEAIMPKERIIEYIIRGFDNFCTYFAGFNENRANVYDVTGAKSTSLVHRIFMQNMQFHFNNIRKWEKIKASLEKYAKDLSEKNYNCHARLAECERELNFSANEIFSPEAFINFINQSGIDRYNEILGGLAQEGGKTKPRGINEFINLVRQQTGAKRNEFPPLQLFYKQILSKSDRTFISAFETDEEMFDRIKDFRQKCFIESEAGKLPVIQEFIKDITRLIAESLDEKTNIFISKDKLTRISQELTGSYNTINLRMLSELGEKAFNQNGSFSIQQIDNALNAVVDGKKFSSQDQNIKAEYQSNSGNILFDFFSKRLDALFVSIEASWKILHESRVLTGKILDKNRENEGDKGFEQVAAIKGFLDNSIEILGFAKDWMLQEKKLSENINTVWYETLQLFCDQFPIIKLYNMVRNYVTQKAYSDKKLKLNFDNSTLLDGWDRNKESSNYGVLLEKDGLYFLGIMTPESNNIFDYEIADADSLNKKQEKQELANAIKSSGGEKLYRKVIYKQIADVSKDIFTLCWDENNNKAIRKTKGREAIWGENITRIKEAKSYQNNEADKKHYFGYLIKCANSYWKHFNIKLKPADEYEDFSSLIKDIDIQGYKINFDNIKKSYIDEKVAKGELYLFQIYSKDFSQEKKGGGNDNLHTSYFKLLFDEENLKDTVLKLNGQAEIFFRKASVELTEEKKAKGHHYEELKDKFNYPIIKDRRFAEDKFFFHCPISLNFKAEKSIPQDKYKPSFNSNFNLQIKTFLQNNPEVNIIGIDRGEKHLLYYSVINRNGNVIEQGSLNTIAGFKGREIDYHANLDKKEANRDKARKSWSAIESIKELKAGYLSQVVHKLAQLIVEHNAIVVLEDLNYGFKRGRFKVEKQVYQKFEKALIDKLNYMVFKDKEHRLVSGHYLNAYQLSGSYHLDSLKSQKQSGILFYTAASYTSTTDPVTGFLKNVNVTYENVEESLKLWESFDSIIYNPIKDRFEFIYTLGKIAGKSTDKEKDEEEISKKQWTVYSCVDRSRYIKPESTEEQKQASDRNSIGKLGKHEIFCVTNEMKKLFENANINYKEDKDIKKVLLEQNNASLHRSCLYFFNAIMAMRVTDSSKKSGTDENDFILSPVEPFFDSRKKYTKLPENGDANGAYNIARKGICMLNKIDAAENLPKINLLITKRDWQEYAQSDAVVKAQTAKLNK

SEQ ID NO: 1325 - protein, 1396 aa, unidentified
  REGION 1..1396: note = Cas Enzyme sequence
MNRIYQGRVSSLQIPDAVGNLRTVPLGDPENCPLWRHHCVFQDAVNYYLLAFGALASADAATSNRVILDLRERLLKSWNEDSKDRRSLKESVCKWLSLGNGATLEEAFRKVLDGIEVEAPVRNLALALVLNACGGESAIQQAGRGYFPRLCWPGYQGSFDFSSEAMVSAGGKDRLAAILHGDPSDEELRTLAAGMDLSWTVKVQPEKYFEGAEVVARVKEALAHLVKMVAQPGPRLAVWLAGIPDPAAQIAEMQASLDRLPADLKIPRNRKAAPDLTFSSIAFLVFPCQLTRHCLRQGVKEPGKQTKKKSPATDFSSLGDDPVKLARGKRGFVFRAFTALPAWGPVSLAEPAWKEFDIAAFKEALKALNQFNQKTEEREITRLGLEAELAWMLGKGGATSSSGEDDEKLPILEGDERFAAVRKLETDLTERLMLDPSDPFKISRAALRGFRDVSEKWNQEKNRTPEKLREIVTKYQADPKNQREIGSIPLMLALCETDYHSLWLAVDEAEQQRRADEHRPADMLSAMCRFHQLDADLNRARQPIRLTPAEPEASRRLYMFSDLTGRSTSKFKGTDSVEVSLACLDQGVVRECRAVLGFSAPRLKRDELTGGDSSQWVQPMTAALNLGEPSSAGVFDSALALMPGMIVENGGRKVRHLLNFPVSLEPTWIHEALGKAAIWKNQFNGTKDNNLHLHWPGTERDATKKNRWWENPALIQNGFTVLSNDLGQRSAGAWALLKVTCWKPETKRPVREVGNDGTRTWFAEVLKTGMHRLPGEEVKVLHGDKLEREKYGAPGRLATEEEYKTAIHTVGDLGIAEPEKWLGDYGSKSFAELNDTLLKIANRRLSRLGTYHRWSCFDPQKIENMSKRQTAIDNLRAELESYTDKEVTAWKPLAAQEDFTEFQRATGREFENLRDHLEEVLVSIADLTVPVRRKRWAWQARGGESVYGDLVLLDFIDNNPKIRGQRGLSMPRLEQLDGIRRLFLRYNRSLDRAPGIPAKFGRDDEGRTSGEPCQELLDKIESMKDQRVNQTAHLILAQALGVRLKAHEIAPEMRAERDIHGEYEKIPGREPVDFIVMEDLSRYLASQGRAPSENSRLMKWAHRAVRDKLKMLSEEPFGIPVVEVAAAYTSRFCGRTGEAGARCEELGALPNFLKEGLAKRAEQRPPAGRVDLRTQYQALSNQFQAVEESNCAATAWNKTRGKQVKAKPLKTLLLPKPGGPLFLNIKEGQPVQADLNAAINIGLRAIAAPESLELLHRLRGIREGDAPDLRWRPRFSEKPDKANARERAAFDKLSSIRVHGETSSKFTKTALPNFFFEKSPAFTVDVGTASFSGRQIPVVSGVALHSQCDGYVLDRILELNNTRLVKWGLPAVPITAQCVKRADASGPEDEDDDIPR

SEQ ID NO: 1326 - protein, 1397 aa, unidentified
  REGION 1..1397: note = Cas Enzyme sequence
MAAFQRSYTMNLKPATSEQDKFILWNRLFLTHWSVNEGAKIFGELFLNLRGGLSPELGIFDLNKDKDDRKKKALVMGRRRLLALGWLSVEDNLSAGDHPFRIREIPVGRNMEIKQATTLLTEILKNKGVKDEAVIKEWIDDCTPSLIANIREDAVWINRAKSFYSMNPCPTKDEVWKILSYVLNTSFLDLSLNDSSERDNTKNKKGTKENEKDVSNKSKELYGWLFTKNPNKMREAGENKDKFINNFRENFNTFTDYANLKVEIELWRKNNISNTLLITQKAKYPPEVKEANHPSKFSVGYRKLLVHLELWPSSKDENGDIPKGIEGKDKSHNQILLDYLLEVCNEGNKTTKKVIVPAWADGIKTELESKASIKVGDSTSSVLQRLMIKMAARRISQTLSWIKINEQVRHDAYQKKNKAFKLLCEIDKNGEACKWLENYELFRRDDSGGEEYHISARAISCWKQILEEWQKNDSSKALREKVKVVQAAEDKFGDARLFEDLADDNARSVWLLPDGNKTPDILNWWCEYRTADIDESRFKIPCYCHPHPFKHPVYVEYGKSNPQVIFSLKHDKARKNRIDNGWNPKNPRILALLLLDIVRQKSTLAPFVWESKRLWKDLGGDATVTYKIPRSDRMGLSSIGNIDYARPEVPFLKEKWNARLQSDRRTLEKLEKYWNPESMKWIDDGKFLIQSKWFITFGPDMETAEGPWKLYLKENINDNNYLGNRSKENQKRGYRAKKLLSGYPAGMRILSVDLGHRYAASCAIWETITKKQITEELAYQPDKNSVFEHSCKTIDKKIKNTVYRRIGDDSIDAPWAKLEKQFTIKLQGEDKSCYLLRSDEKELFRSILSKLSCLNNDTGHNILEMIENLLRIVKAKIYRQGILARISYSMTAQYKPGKGGQKSPLSDEDKIHYLSENLAAWSALMGNQEWNEDGISDWYKKYISHLVSGPKPKEGNRKSDRDKIIEYFLPAARKLYDDNETRINIHDLFKELWDENNKQLSAVLKEIKKIILPKGIRYFDKNNDSSSRWKNNQSKLKQITHRGGLSLRRIVAIEGYYKLAKAYKNHPEPDNLTKNIPLPGDNSSAGFNQRIRDTLERMKEQRVKQIASRIVESALGLGIEGYKKRPLTPESKPCQAIVIEDLSHYRPDELQTRRENRRLMQWSSSKVKKYLSEACEMHDVLLVEISPEYTSRQDSRTGVAGLRCIDINIREFLKDSSSWQNKIKTIQMKPTNKKSNLDQYLIELNESLGERYKDKVIPSDKFVRIPRKGGDIFVSSSKESPVSKGIQADLNAAANIGLKALLDPDWAGAWWYILIEAKSNHVIPYGKKYKGAECLRDFKFSGLENQVMKNNMNLWRDLQSQFSSEDKWMSYKEYNELTEKRVINILRERAGLELIEE

SEQ ID NO: 1327 - protein, 1398 aa, unidentified
  REGION 1..1398: note = Cas Enzyme sequence
VEDAAHAPKQFVVASGEDPRSIRDEKVLRAFKSILKKRGLDEKEVEAWVTTCEPSLRSNIKADAVWVDRSAAFDAAGDLPGLTRAHAQDVLEYFHGPIGAFLSLPRTDADNEISEPQNGELEKSFAQKASGWLSFNCGEGKKSDKATIARRLRLILQDLNRLEGRPGEALLEHALSVLGMKSCGDRAGKLDLLRKGVGWRPASPSKALRAIRDASQREILEATDLELLKQKLREEALTRDNEAAQSPVPWAAALRRHIENVVGFEYRKARFTVLLDHALRRFSSTHSWMKRVEAKRRTFDADVAKLDTLRATNPEACNWLDTFCNRRSQSTGVAADNQYRIRKRALGGRKALAWKAVLEAWSQEDCRTREDRIDAVRRVQSYWDDEEKFGHADLFEELASEEDVCVWKKNGRTSPQILIDYVAGCEAVTNRIRYKVPMYRHPDALKHPVFCDYGESRFAIHFQAQRSGRPQEGKKLLKHTDHRALTLQVLANGTVSTIPLMWACKRLEKDLAMKAPQRTENASPVSRADRLGRAACGSHDPVEVMNVYGRKHWNGRLQVPRHQLERLASLSRDPVRAESLRRRLHWFITFSPQLQPQGPWLDYARSRGLLSIRRGEVEISPRDSDKDAWRGLAYPVQHPANEKGRKGLAKHILSRLDGLRILSVDLGHRFSAACVVWETLTKKEFETQFQEAQAKQEDGWITFRSDLYAMVMGPEQPSHNGRSRRFRPTTVYRRIGPDVLPDGTPHPAPWARIDRQFFIKLQGEECPARYASHQEMKLVEGFAERYGLRLHDDDRRRCRVDKLMARIIRNAKLALRRHAQAAKIAWALSPNTSSIPTTGGGEIAFQAGDDNHVKLLTDTLLEWYRLATDSKWDDQEARRLWNREIASLPEGFPIQDAIDRNASCETPRQQHREAEDDLRAKLESLARALARKDRSELHRKWRTRWELEDGQPAGDFDRKTTIDRKNRRVSYTVPRTPATGWHAELRWLTDWIMGRRFPDTTSKCWPRRLGGLSLTRVSTIRALYQLHIAFSMRPTPDQPKGAPEKGDSNAGIAARLLKALERLREQRVKQLASRIAASALGLGGHWKPIEVPHHVPSGKPTKKTRWVWVEDTEPRYPACQAIVIESLTNYRPDERRTRRENRQLMSWSSAKVKKYLAEACQLNGLHLREVSPAYTSRQDSRTGAPGIRCADVPIDEFLSVPWWRKRVRQAYSKSEKERTPLDLHLVQLEQKWSQTAQSERKERCIRIPVRGGDLFVSAWEPPGVATNPLRAIHADLNAAANIGLRALMDPDWSGRWWYIPCNAKDGKPAKNKVAGVPPTVIPDAPLSPPASRDQRRSKKRRDEDIVNRWRDPSAGAICEGEDWRGTKDYWHDVEARVVQILARRQWTNCQEEVDNSVF

SEQ ID NO: 1328 - protein, 1398 aa, unidentified
  REGION 1..1398: note = Cas Enzyme sequence
MNAYTGSIFDEFTKQYQLSKTLRFELKPVGKTAEWIKQNNIISVENNELIGVDAVRAQNYKYLKRIIDQMHRIFMQEALCNLEQDYAVELSDKIIALFKEKDFDLKKDKDLPKILEKIFDSKAEEWIKFYKIDMPKFWQEDIAKLNQEKELLSNNQDIKKKDNLIKKIEKKITTCKISAKGIKIMHSNEDTLNFLEWQVRLDNIHLTWKDIDYNDSNELIPNTELIKFIHSFDRFTTYFSGFNENRANIYDLKDLKSTSILYRTFEQNMRFHFTNIEKWEQVKKSIKKYEEIYNTKEYHWQKELEQYQINLDFSVEKFFVPESFVNYLSQSGINKYNQILGGLPELEGKRKVQGLNEYINLTRQQANAKRGEFPPLQKLYKQILSKSDSVFIEEFSNDKELFDAVKLFYKENFQIKEDNEKSLICSFAEKMTQMVNDYSSEGEFDKLFLDKDNISKISHELTGNWAAINTQLIDVIGDNKIEKQKVFSFQEIEQALKEGVKHDVFTLKFSSDTSVVLKYCLEHLKELLNNAYKAWNELQVNGLLTRSQIDKNRINETDKGFTEIALLKSFLDAANEIAFYMRMWSLKNKPSFEINEDWYSSINDFLHNYNVISIYNMTRNHVCKKAYSTDKIKINFNHNTLLDGWDRNKESANRSIIFEKNELFYLGIMTENSNTIFDYDILPGDTKKKKTIKQDLFSKVIASESESSYRKMNYKLLPGPNKMLPKVFFAKSNLNVFQPSSKIIDIKEKKLYSKAMIEEFGIQNLYDYIDFCKDALCRHPEWSIAYGFDINSFPDTNSYTSIDQFYKDVEMMGYKVTFDNIKDSYINEKVTNGELYLFQIYNKDFSINKKSFGNDNLHTSYWKLLFSEDNLKEVVLKLNGQAEVFFRQASLELTNEKKLNGYHAEELKDKFDYPIIKDKRFTEDKFFFHCPIGLNFKSPSIPGHFNEKIRKFLKDNPEVNIIGIDRGEKHLLYYYVIDQNANVIEQGTLNGISNGFIPQGESKERIINYHDKLHEIEKNRDKARKNWGVIENIKEMKAGYLSQVVHKLSKLIVKYNAIVVLEDLNQGFKRGRFGVEKQVYQKFEKALIDKLNYLCFKDKENYIQAGHYLNAYQLTNKFESFQKLGKQCGILFYTTASYTSSTDPVTGFLKNVYAAYGSVEKSVSFWKSFDSIIYNQDLDRFEFSYSLGSVHSKSLQRESGENNVSQQSWTVCSCVTRSRYVKKRNPQTDEQKQDTTSEQIGNKGMHETFFVTDEIKETLDKYEIDYKSNHDIKSVLLQKADKKHAGLHKSMIYLFNSIMSMRVTDSNSESGSSENDFIFSPVEPFFDSRKQYKNLPDNGDANGAYNIARKGICILNKINEADDLSRVDLLVTKQNWQNYVQDPDIVQAQIGKMTKTKI

SEQ ID NO: 1329 - protein, 1399 aa, unidentified
  REGION 1..1399: note = Cas Enzyme sequence
MNRIYFGKACLVEIPHGKDDSGKPAWKKLDDWQCALWQHHELFQDAVNYYTLALAAMAAGLQADSPRGKAALAWREQVRNAWVKARRKAVNFPGPHTRLAKLLAVNPQESDAEKAFELCAKALLKSSAASVEALAKALLQMLDEVDQSDLNQFCVSRLPWLCTPHGKLDATPKNVAQQQETRMLAIIREIHESSTAQIPTIADKLDLGCFVTQAPKERMSGEEARAEAERLFKSATAKATSLAAVAEQFTKHLNQLGDQLALPRLGRKPKGAYPLAVVFKLFPVVETWEAFKNATVSLRKKADKLKDSPAVVSADFIAEARTEADQPVFDYFTNRLLFREPDNKDRAVWFDFDLAAFIEAIKAPHRYFQDALTREKEAEGLRKKLAAMEGCGGDLDDEHEEDDESAGGFGFEGDKRIDLLRELVTDTLGFVAEAENPGEETERIEYTVQERTLRGFEEIKEKWHKLAEKDQATPDKLIEALNEQQAKQRDDFGSATLYRALTQPKYHPIWRDAGTQKWHAADPLKAWRAYKELRFELADKERQIRFTPAHPEHSPRYFIIPKQGRLGSDHQSGQLAFTCGVVLQGEHGLEAAEVRITYSAPRLRRDALRRDGKEDLESAPWLQPMMQALGLPETDAQDFSNCRVTLQPDSPTNIQLTFPVEVNPEKLIAGIGKASLWNRQFNLHPDGDSFYNASLRWPHEKQPAKPPVPWFEQVDSLRTLATDLGQRDAGAFARLVAGCQNEFGKKPSRFIGTINSKQWRAALERSGLFRLPGEDALVWREISKCDRLKPEDSGERFDFREELWGERGRPARDWEAADTADLMARLEVPTDVPELSLLSGNWRTELSFPEQNSKLLIALRRYQSRISRLHRWSWFLKGEEKHQKSAFDEIVECEDTRLVSAEQQAAAVKHDPRLLGELESQLRDRLKIVPKLLERIANRVLPLRGRSWCWESHPATAKDNALHQLTQAGPSLDSKERPVWLRGQRGLSLERIEQIEELRKRCQSLNQTLRREIGGKPPIRRDESVPDPCPDLLEKLDNLKEQRVNQTAHMILAEALGLRLAPPPADKKKLRQEIDQHGVYEKILDNKGKWIGPVDFIVIEDLSRYRATQGRAPRENSRLMKWCHRAVRDKLKQLCEVFGLPVLETPAAYSSRFCSRSGVPGFRAEEVAAGFTQKGQWAWITGKKDEKGNITEEAQRLVKLDAELGRAQQDLETLWAQEKRPGQCPKRTLLVPASVAPVFVPVVDKVKDWEMQPAIVQADINAAINLALRAIADPSVWSIHPRLRTQRDKKDASLAAREKRKFGEKNPPKLSVTAAESPIKESANPNFFADHAGLVDVAGELGLAWLNKEWTSATLPDDKSAPVPLLHSKSFWGTVKAYQWKRIETINAARLSGWKTKGA

SEQ ID NO: 1330 - protein, 1400 aa, unidentified
  REGION 1..1400: note = Cas Enzyme sequence
MLNRIYQGKVTQVELQGESLIDWAEKLWQHHELFQDAVNYYTLALAAMARGIEGDSDAAKALRSWVDRVRETWSRATRKAATFDGPRRHLAPLLKLAPEQADFDTAARTVLHTSRATSAQRAAAVQQLLTEKGDLNRVCRALLPWFASAAGILDATSKADASSQEAKRQRAVRQFHQWSDQEALQNAASLDLGLFITQPPKKSVKGRNAAKMLLGYFEKASAKFEELKPAESDFRRFIGTEANSLVIPSPGRRFSDLYPIAALFKYFPRAETLAAFRRATKTLAEAKDKAIATTDAVAEARVDDQPHFDYFTNLALVSGDGDDERDTRAVWFEFDLAAFIEAIKAPRRYFEDTLKRAAAASRLREQIAAMEGKGREASGTDDEDDESLPGFEDDCRIVLLKKIVQEKLAWLAEAEGEVDSASPKEYEIRERTVRGFAKLKKRWRAAAEKGQATEDRLLKILAQEQTEHRDDFGSAPLYRELAKPENHPIWRDPGIRPWHADDPLAAWLHYKELQADLHDKERPIRFTPAHPVHSPRYFIFPKKAAAGGRWGSVHEMRVLAFTAGIAIRSDNKWQPQLVSIRYSAPRLLRDGLRSPNEQNLDAALWLQPMMKALGLNEEPERVNFANCRITLQPASERDIQLTFPVEVSTEKIRAAVAREAVWKKQFNLHPNGDDFYNASLRWPHEKQPSKQPVPWYEQITSFRCLAADLGQRDAGAFARLLVRCDGSLGQRPSRFIGTTGDKHWRAALERSGLFRLPGEDLIVWRQKSRLDETDPDDSGKPFDFREELWGKRGRPARTWEANETEELMRALEAVEKDTDGQERFTLLPNDWRKALSFPEQNDKLLIALRRYQSRIARLHRWCWFLSGDERQQEIARAEIAECDDPRLISADLKSRVEKRDPRGLGELEEQLRHRLELAPKLLIRIANRVLPLRGRSWKWELHPNATDENRIHLLTQNGDALDSAERPVWLRGQRGLSLERIEQIEALRKRCQSLNQTLRREIGGKPPIRRDESVPDPCPDLLEKLDHLKEQRVNQTAHMILAEALGLRLAPPPDNKKELRRAKDQHGVYEKIRDREGRWIGPVDFIVIEDLSRYRASQGRAPRENSRLMKWCHRAVRDKLKQLCEVFGLPVLETPAAYSSRFCARSGVAGFRATEVTAGFTKQGQWAWLAAKKDDQGNPTEDACRLIELDRKLTEAQAQLERVWKEQRRSGPCRKRTLLVPLAGGSVFVPVTDRVKGVDLQPSIAQADINAAINLGLRAIADPRLWDIHPRLRTERMSGQIGERGKERTLETASTPSAAPCLKVREKRKYGTNGPQLELGTPPEGSAVEDGRNPNYFFDLACLATWDKAQIPDPRTGEMMWLPSGKALWGAVKIAQWKRCQEINQRRLRAWRNKLDPLPD

SEQ ID NO: 1331 - protein, 1400 aa, unidentified
  REGION 1..1400: note = Cas Enzyme sequence
MAAFQRSYTMNLKPATSEQDKFILWNRLFLTHWSVNEGAKIFGELFLNLRGGLSPELDIFDLDKVKDDKKKKAFVMGRRRLLALGWLSVEDNLSAGEHPFRIREIPVGRNMGKSQASTLLTEILKNKGIKDEAVIKEWIDDCTPSLIANIREDAVWINRASSFNSITPCPTKDEVWIVLSGLLGLRFLDLSLEEVKGKETEYLYDLGEKETQSKSDPSKKARELFGNLFTQNPVLMKNSRDKKDTFAKEFYLAFKEFKDYEKLKEKIESWRKEKEFPLIENPVAEKYPPEVTFTGSPCTVSKRYRKLLVSLELWPSSQDENGNIPKTEKTEDKTHNQVLLDYLLKACNEGNKGTQKIITPVWANNLKAELELKMNEIIRIGESSSTELQRLMIKMAARRISQTLSWIKINEQTKHDAYQKKNKAFKLLSEIDKNGEACKWLENYELFRTDDSGGEEYHISLRAISCWKQILEEWQKNDSPKALREKVKEVQAEEEKFGDARLFEDLADDNARSVWLLPDGNKTPDILNWWCEYRTAEIDESRFKIPCYCHPHPFKHPVYVEYGKSNPKVIFAMKNNKVKKGHIEHGWNPQNPRSIALSLFNNGNRESSLVPFIWESKRLWKDLGGEATQIGDIPRSDRMGLSGKRESVKPKAPFQKEVWNARLQSDRRTLEKLEKYWNPESMKWIDDGKFLIQSKWFITFGPDMETAEGPWKLYLKEKYVDNKILGNRSKENQKRGYRAKKLLSGYPAGMRILSVDLGHRYAASCAVWETITKKQITEELAYQPDNNSLFEHSCKTIDKKIKNTVYRRIGEDSIDAPWAKLEKQFTIKLQGEDKSCYLLRSDEKELFRSILSKLSCLNNDTGHNILEMIENLLRIVKAKIYRQGILARISYSMTAQYKPGKGGQKSPLSDEDKIHYLSENLAAWSAIMGNQEWNEDVISDWYKTYISHLVSGPKPKEGNRKSDRDKIIEYFLPAARKLYDDNETRIKIHDLFKELWDENNKQLSAVLKEIKKIILPKGIRYFDKNTDNPSKWKNNQSKLKQITHRGGLSMQRIVAIEEYYKLAKAYKNHPEPDDLTKNIPLPGDNSSAGFNQRIRDTLERMKEQRVKQIASRIVESALGLGIEGYKKRPLTPENKPCQAIVIEDLSHYRPDELQTRRENRRLMQWSSSKVKKYLKEACEMHDVRLVEISPEYTSRQDSRTGAAGLRCIDINIREFLKDSSRWQNKINTIQKKPANKKSNLDQYLIELNESLGNKYKDKVIPSDNFVRIPRKGGDVFVSSSKESPVSKGIQADLNAAANIGLKALLDPDWAGAWWYILIEVKSNHVIPYGEKYKGSECLRAWKFSGLENQVMKNNMNLWRDLQSQFSGEDKWMSYKEYNELTEKRVINILRERAGLELIKE

SEQ ID NO: 1332 - protein, 1400 aa, unidentified
  REGION 1..1400: note = Cas Enzyme sequence
HPDRRVLLALSWLSVESPASLAPAAHIVARAADADRAEKVVRRFQEILARLNIDNAQEWVDACEPALTARIRDDAVWVDRSAAFAALQGQFPALTAQWAADTLFGFLGNSDDYFALPDSEATVAAEAKDFVQKAGGWLSRNWGSGEKSDSSAIHECLVKLSSIGDAQIVGRSGRDALAALLEGLETEPQPDSDTTKLFKQLKQAIGWKGRPSKGAMALEKIRDADTVSADLWQRTVAKLQEEATALASKSTASDRPTWMQDWRGEMETRLGFPYRIKRDLIWEHGVMLDHALRRVSAGHTWIKRAEAERRRFKEDAAKIDAVPEEARAWLDAFCDRRSARSGALGDYIIRKRAIDGWEKVVNAWAALPADATRRDRIDAARDVQANLDENDKFGDIQLFAGFGDDEDESPEPCLADDDALCVWRHPDGRVDADILKNYVAATVAEHDQRRFKVPAYRHPDPLRNPIYVDYGNSRWTITYSALKAASDRQKAIDKLAGAKTEQAKEKLRSQLASSPELRGLSLGVWDGQTVGTLPLRWQGKRLWKDLDLAHFAQEATGNAVARADRLGRIVAGQPQQSAVLVAEVFAQKDWNGRLQAPRDQLDRLADLVYGKRNAPDYAKLADIFTNPKAAGQWNHLRWFLTTSAKLQPQGPWLDYVAAGLPDGIAYKKGRSGYYLDYAANQGRKGRARLQLARLPGLRVLSLDLGHRYAAACAVWETVTGDQMREACRTAGHPEPAASDLFIHLRRPTNKLQKSGRNKGQRIVETIVYRRIGADQLPDGSPHPAPWARLERQFLIKLQGEDRPARPARPDEIDRVNEFRRFLGLEALVENLRVDALHKETVRLARLGLRRLGEMARIAYIMTATTKPISGGRRTDLTADQRIEYVQDALVLWHGLASPGHYDDPWARQMWEEWIVGKLGGPQAVAEADDEPGTQRRKKNNATRELLKPIAEKLADATSAHAVELNRLWSAEWEKRQQEWRKHLRWLRRFILPRKGDVNDDVAKLRGLGGLSVQRLQTIRDLYQVLKAFRMRPEPDDLRKNVPQPGDESLARFGRRILDQLERMREQRIKQLASRVVEAALGAGRMQQSLGRDRKRPQVRTDQPCHAVVVENLEHYKPEDSRLRRENRQLMNWAARNVRKYIMEGCQLHGLFFAEVSPTYTSRQDSRTGAPGIRCEDVSRKVLDEAARRAIAGTAGSPADSAPATRFEREVRRWTHEIARVLAVADTAELKPRERVLRAVVQSLSSLPTNRSVVRLPRRGGEIFLSADANSPLAGGTQADLNAAANIGLKVLTDPDWEGAWWFVLVNPANGEIIKEKVQGAAVWDGDRHSAVIAPETNGSPESSKGRRARRQKAAVYAFSPLFGPSSSTSEWMQTRPYWEAVERHVANRLEFDQSQPDSPF

SEQ ID NO: 1333 - protein, 1401 aa, unidentified
  REGION 1..1401: note = Cas Enzyme sequence
MKTLTNLYQVSKTLRFELQPIGKTSETFKQWLEDMNMNELVVDNDGNLFAKDKNIKEAYLAIKPIMDRLHEQLIEMSLLSEEAKQIDFSDYFEAYKNKAVKAEMEKGLRKAFAKPFQFAGQCFIDMISNDPKVGIEIKTKKDKQYECLTDAKMYNYLLANVKDLAEQNGIAEQKLAKHIEQFKGFWGYLDGYNQNRENYYEVDKETSTAVATRIVHENLPTFCSNILRFEKRLEEYLSIYQYLKDNNRETKIKDSKGEEIDVEAISDDIFQIKHFNECLAQSQIEEYNRIVGNYNMLINIYNQLRRSEKDFKKVDEFETLYKQIGCGKKKSMFETLQGDSDVKELLRKASEAGKQMFKDATDTIEIKTLPDFIKFLKECDNWDGIYMSKTAIDKISSLYFANWHSIKDKLKEAKADACITYDKKREDPIKLRDAVELSGLFAVLDTEQSEHFFKDSLFKDDESNDYRGVLDKALMPSKNLINLLCFDIEQNTKAFLNESNNIVALEKYKDENNQARVEDKTIKQIKDWFDAATDAMRIVRYFAVRKSKMKGNIPNTTMEQALSNLLYCDEARWFKWYDLIRNYLTKKPQDDAKENMLKLNFDNSTLMEGWDINKEHDNTTVILRKKGLYYLGIINKKYNNILDKDNAISDGECYEKMDYKQIALPMGVGAFVRKCFGTAQNFGWCCPQNCLNEEGKIIIKDDEAQPNLKAIVDCYKDFFDKYEKDGFKYKDFNFRFLESDKYKKLSEFFREVEPQGYKIAFRNVSVDYIEDLVENGKLYLFNIYNKDFEDKATGTPNLHTIYWKMLFDENNLKDVVYKLNGKAEVFMRNPVAKESPIKHSIGSKLVNKRDKDGNSIPEQIYREIYLYANGKTKAISVEAKKYIDEQKVVIKDVKHEIIKDKRFYGETKYMFHCPITINFKAKSSSGSEVNAKITDALQQSKNLNFIGIDRGEKHLVYSCTIDNDGKIIKGKCHDHDIISVIIKDKDGKDITHKTNYVQKLEAVADERIIAKKNWQAQNKIKDLKNGYISHVVHHLVEETIKVDGNISPHAYIVLEDLNTEMKRGRQKIEKQVYQNLELALAKKLNFVVDKNAKQGELGSVFQALQLTPPINNYQDIEGKKQFGVMLYTRANYTSVTDPATGWRKTIYIKNGKEEDIRKEILSKFDDFGFDGQDYFFEYTEANAGHIWRLYSGKNGKALPRFQNKKQMLQDKNVWVPEIINVVEILDNLFADFDKAKSFKKQIENGVELRKIEGRNETAWQSLRFALDIIQQIRNSGEKNSKDDNFLYSPVRKNGEHFDTRNYEYNGELSEIRDADANGAYNIARKGLIMDAHIKYWIDKGRPMMSSKKDKKTSDLDLFISDKEWDLWLLDKNQWRKELPTFASRSAKEGNTESKTGKRKKK

SEQ ID NO: 1334 - protein, 1401 aa, unidentified
  REGION 1..1401: note = Cas Enzyme sequence
MNRIYQGRVTKVEKLKPGRKGISADDWEELKDWQDVLWQHHELFQDAVNYYTLALVAMAEGLLDSCPINKLRKRIEEAWKEFPRKTVTPAKNLKDSVCSWLGFSKSVSFKDALKKIVSISSENRETCALAVALLAERTRSLKPQKASESYWGKFCDVLKREQNWDYSREELARKARSGDWSASLWAKDASERIKKLAKSLKISSLVKCVPRIQISEEEGRDLLKRAFEHLQGIVKGIKNDTELAKRTNNWLRQNKKDVKNFLDKQIKHLASVPGGSLITERVRGGGININKTYAGVLFKAFPCQFTFDYIRFVVPQPKIIKKAGRRKQDNQSSNWEGLEERILKIGDDPIKLARKDNKPIFKAFTVLDAWSNNTKPSWADFDKCAFEEALKTLNQFNKKTEEREKRRLEVEAELNYMMGENPSWKPKKETEEEDDREVPILKGDPRYDKLIKLLTDLNEESSECAIGQIYGPTRASLRGFGKLRGEWLDLFEKAKDNLKEEDLRDAVMDFQREHRLDMGYSTFFLKLCERDYWDIWRDDTEGEAKERKEKGWVKNVVYAAADARELAEELERLKEAVRYTSAEPNFSRRLFMFSDIKKEGYGVKYINGGLVEASLVIKDSDQKYNPCRVRLHYSAPRLIRDHLSDGSSSRWLQPMMAALGLRESDLGYFTRDSKGKVKEPAVALMPDFVGRKRELHMVLNFPVDLDVSKLEERIGKKARWEKQMNASYERNKVKQRFHLIWPGMELKENQKPSQFWWHNSTIQEKGFYCLAVDLSQRRAADYALLHAWTQRDSKVFVELGQAGGKSWFARLSTAGSLRLPGENAKVLHEGKNQIELSRKKGRNATQLEYDDAVSLARQLLHSEKQDELVAAAQDWLGDNAKRFSFPEQNDKLIDLYHGALSRYKTWFRWSWRLTQQYKDVWDKTLDEIRKVPYFASWGGFASNGMDEASIRQLQRLIADASANLRCLLVETLLEIAHRVLPLREDTWQWIERGKDKKGKPLHLLVSGGPAPAKTPWLRGQRGLSIARIEQLENFRRAVLSLNRLLRHQIGIKPEFGTIVRGEILHDPCPDLTDKIVRLKEERVNQTAHLIIAQALGICLKNHSLSDEERKKADIHGEYEVIPGRSPVDFIVLEDLSRYKTDKSRSRSENSRLMKWCHRKINEKVKLLAEPFGIPVVEVFASYSSKFDGRSGAPGFRAVEVTVEDRPFWGKIIEKQVVAREAFEWLDKLTAIGSNSIRLILPQNGGPLFIAAIKKDQPIPAIRQADINAAVNIGLRAIAGPLCYHAHSRVRLVKGSSGENKGKWLIRRDNKREYVQFDANKRVEFKNLVDDSNVLKGENTNLFHDPMEIAAYGFAQIKECQHPPLAHASAIFGKKNGAVTRLSWELCRRINNDRLKKAGYQN

SEQ ID NO: 1335 - protein, 1402 aa, unidentified
  REGION 1..1402: note = Cas Enzyme sequence
MSSIVRIYQGRVTQTEFCEAAHAGLFTTDLTSTEHPLWQHHALFQQAINYYLVAIAALADPKQQDVLAKLHERVVAEWTGGQRKRGIVKGFGESVAPLFDLPVNATPTDVFAALLPPIAGLTDARHLAGLLLLEKCQGDAGIQQGGRGYWPRFCDPDSNPTYDFAASSLASAAGKEQLAAHIHNPEVSDSTLRTLADKMDLSWTVKIHPGKYFVGEEARARLGEGIDHFLQVIDDADEPRVKAWATLHKGPSLLADLRKRLPALPQDLQIPRNRKAAPGLTFATLLFKTFPSHATASLLALHVKAPPKATKSEKKNDLTSASTAKPDFARLGDDPIKLARAGNVVFNAFTALKSRWQPVSPGKPMWSEFDISAFKEALKAVNQFRLKTEERTARQAALLEQLDYQRALRASAPRIDNATKDADESESLVRLGDDSRFRQLEAVLDTLAKASEHPDEGYGLTRASLRGWSELRRDWLALKKSQGEPQAYIDAVSAWQVAHRDDAGDPNLFRALAKPENHGIWQPPEPIKGDTHERAEDMLRAAAMLFEDEAEAEQLKTPVRLTPADPVVSPRQFMFSDLGGRHASKRIAVDQWEVTAAARTNESVFNLPVRLRIRFSAPRLRRDHLDGIGEAASVRWLPPVLAGLLGSDENAHAPTLAKDPAIGLMPDFDPLATPPRIKRVLLNFPVTLDSAELSKRLGRADYWRLQFNRIGRGADETLLHLLWPGMKNAPTDNAWWLNPAGVSVLSIDLGQRAAAAAAVIELRADGKFSSARKPLPFSLGLTGDLVWQAAVQSARHLRLPGEDRALSAHERSSGRDEELSGKSGRMATALEWHEALDLARAFGESDPIRRLGGDSRRMSYPEHNDELLRLARSAANKLRRLHGLSWRILNADKQADAHVEIAADTELSAFIGTDHAGTGLALANEFRRAVSRYSRHLEKLANRIVPLRERRWVWQPRTDSPGKTWHHLVMKAVSQDELNETTKLAGQRGLSLSRVEQLEDLRRRFLSLNRFLEFEPGRQNKRARFGDQVPPEPCHDLLEKIERLKDQRIDQTAHLILAEALGVRLRAHTISTAERTAQDLHGEYEPTPGRRPVNVIVMEDLSRYRSSQDRARNENHRLMQWSHRALIEKLRELAEPFGLSVAVVPAAYSSKFCARTGVAGFRAEETHSAQLNEFEWWQLNEREAQKKPRIGDDMLLRFSKALRLLPKRTTKAGEAVPFTLLRPKAGGQIFVPLAGMGPSQSDINAAINIGLRALAAPDCLHARPRWRVEFATDKSQKVTLQPITPKEQRNKLEIALWSEASLTWEKPAELASLASDGRKRTLLFHDPARLARFDRGNMMLLGRNHPIATSRGIFTAVKQHAWARAFELNRARLGKAGLLTPELNALLTLSAEAKTDLEGDPS

SEQ ID NO: 1336 - protein, 1403 aa, unidentified
  REGION 1..1403: note = Cas Enzyme sequence
MNRIYQGRVTKVEIFNDGKSVPLDNWQQALWQHHQLFQDAVNYYIVCLLSLATDPQGDACKIRERITAKESEFFVWGQFRRRGATRRGMRESVRPYLTPGSREPTFEECAMTALAGNEATGTVRDLALRELLFACSGDSPIKKEGAWMLARFCVPSYKGGFPFDAAAAVRDAGETKLSTKLHALNTQAELENFAGNLEISWVVNLAKDVDPFSGEQARGRLQKAVDHFQQAFGGSATTKMGDRVATFLRARNSASDALTSIRQRIKAIPLEKLPTIPANNRSIPDRLEACLLFKYLPGPFTAELLKVSFPQPKVAATSAAVSTDDPALQFLGLGGDPIQLARGSRGYVFRAFTSLACWNPADMPDPQWKEFDFAAFKEALKALHQVDAKGEERQKERARKQAQHDYQRGKIAKWKSGGTNEEEQRPPVLVGDPRIVRLEQLVDVELRAEYEMSEGVEVKYGLHPRTIRGFHELRKKWNDTLKPGESYSAAVREKLWRILTDYKKENSEVIGSPVLFDALVNEPNWIIWRDPTTEQLREWRKAAKIPDDAEFAKDPLQALTDERELLEEIERLKQPIRLTPADPEYSRRQFYFSDVANLTERGEYRHEPNQRTVIVPLAVQEGGGWKQARIRLHYSAPRLLREGLRAEKGENLGAMPWLQPMMAALGLPDPVPQDFRECPVALMPDVAASGERRILLNFPLTLDEQPLLRQLGKAARWDVFQFGGADGESYWLRWPSTWLKDKPDRKKPLPKPWWESSDSFRCLSVDLGQRDAGAFSLLEVTASNQPPKKQSRKLGEAGSKSWWATVRATGLLRLPGEDAIVLRDGKWQEEFSGERGRLATREEWDEAYDICTKLGFTPSKTLGEDPKRHSFPELNHELLYVLRRAQSRLARLQSWSSVAHKDTVEKRRQRIAEQIAEAEDDPLDLKPLVAKEAWALIAARLNIELEKERAVIPRELVRIADRIQPLRGRRWEWALRDDSSRCHVLRQTVPGSDPRPKLLAGQRGLSIERIEQLESLRQRCQSLNRALLQTPGQPAKLGRSKRGIELPDPCPELLDRLENHKEQRVNQTAHLILAQALGVRLRQHTVNSATRQLLDIHGEYEKFREPVDFLVLENLDRYLASQGRSRGENSRLMKWCHRAILGKLKQLCQEVYGLRILETPAAYSSRFCSLTGVAGFRAVELTPANRDDFRWRKHLERLADPERAKKLSREERSESGHVKAMFEALDRLNADLLENRSDRPKWRTLLAPVAGGPLFVPMHGNMQQADINAAINLGLRAIAAPENQAIHLRIRSERKGEKFLVRAENQREKARWGATPHEIAIPDVKSRAALLTEAHPNFFADIGRVAKFDRAEIDGEQAFASGRGLWGTIKNNQTDWFRVNTLNNDRLEKAELERLLQEDDVLP

SEQ ID NO: 1337 - protein, 1403 aa, unidentified
  REGION 1..1403: note = Cas Enzyme sequence
MIKETSIFDEFTGKYQLSKTLRFELKPVENTQKMLNEECIFESDGIRRKKYEETKPWINRLHREFIKDALSSFRFKNLKSYHRVFEEWQKDKKSKPAKDVLRKEENKLRGEIVSQFDATARKWAEQYANLKLKKVDVGTLFEAGIFQVLKERYENEDGTIITTENGEKVNIFDDWSGWTGYFKKFFQTRRNFYSDGDESTAIAYRIVNQNLRRFIQNIQFFEEAKQKIDVVKIEKDLGISCEKTFSLENYNNCLLQDDIDEYNRVIGGYIGKNDEKIPGINQAINEYRQENKSDKIDFLVMLDKQIHSEKEKFLDAIENDEELIKHLGFFANAADAKLGIFRKLITDFALNSNGNKYDLNKIYISSDAFERNAGRWFANYAVFERALIDTAKKYKDAYNTLDQKPPHEKDGQIKYPDFFICKHIKTALDEINERIFKDKYYDEIFGIKNLSLFEQFLRIIQYEIEQQFLTRDASGNPTEVGYDKYRKRVALIPDSSNFKIGKKEKIAIKNFAVSALAIYQMAKYFAVEKKRRWLDYFELDAQFYNAADKGYMLFYSDTEEFKSAYDEIVKGYNALRNYLTKKPYSTDKWVLNFDIQTLADGWDKNKEKENGAIILRKDDRYYLGIMHYDHKDIFTEKYKKESKGKGYEKMEYKYFPEASKMIPKCSTQLNNVRKHFNNSNSDYTLFKKKDFITKVVISRRVYDLNNIYYRKDNIASAFIPENKAEKKEGVKQFQKEYLDISKDKKRYRAALKDWIIFCIDFLKAYKNTSIFDFFKLKQPQEYKSLDEFYNDINALTYSHIFIPVSEEYLQKKNLDGELFIFEIHNKDWNLKNGKTKKGAKNLHTLYWEQLFSEENKRQNFVFKLNGGAELFFRPKTDGKKLCYKIKHNGNWIKIIKEDEKYFYVENKDKNKEEPVKVDKKEVKVVADRKRYAENTILFHCPITLNRVSENKTGAQMNADIRKAISDNEKVRIIGIDRGEKHLVYYSVIDQSEKIIEDGSLNVIGEANDKSVPYAKILEQRAKEREAARREWQEVEQIKDTKRGYVSQVVRKIADLAIQHNAIIVLEDLSFRFKQVRGGIEKSIYQQFEKQLIDKLSFLANKKETNAAKPGYPLNAYQLASPITAFKDMGKQTGIIFYTAAGYTSRTCPVCGFRRNVRFHFENIDKAREVIKNLNKFAYDARNNCFTITYSLNNFLSKEQQKESKAKNKLYEDRKRKDSFTLTTKNTIRYKWFQNESPRLRAIKNDEGVRNYEGVDKQQTKRGIVKEFDITKYFKGLLENAGILLQMNDLRVAISSYKDEKEKEKKFYEKLLFTLFLLTETRQNISNTEIDYIHCPECGFNSDKQKFQGRNFNGDANGAYNIARKGILILKKIKQFKKKNKDVVKMGWGDLSVSIDEWDKFVQK

SEQ ID NO: 1338 - protein, 1403 aa, unidentified
  REGION 1..1403: note = Cas Enzyme sequence
MAKEKTNRNFDEFINLYEFSKTLQFSLVPLKLDKINNKIIEEREFNENVVESILSKAIQKDVQISENIKTTKFYLDILHREFINDALGKLRFSVENLKKIEQILDKIKKVKRGKVVTDDQKAQKKNQIIELEKEFNRVKELLLSGIKNVLIGKNNEKNILITEKCLNILKERFTKEKVEELRRENKHKEIIYPDIVYMDGKEEKSVFEMKAGYLDEFHKNREFLYSIGNKNGSLARRIVDNFIKIFCKNRRIFEEKYKNSQIDFSPIEKAFDVKIDDFFAYEYYNNCISQVGIDEYNRLLGGESRKQEKKASIEGLNQIINLYRQKKENEHKEKQKTLGKKKTKFNKKDYPFFESLQKQILSQIFRKEILIESDDDFIRELRFFIEKSKEKNQKAQEIINFFYNYETNGLDLSKIYLPKKKINSFAYKIFKEPQAFLSIFRNKTSSLEFVDFKKVEQFLDEGQFEYKDFFKALVNDRKGINAFFYVWKHEFDILIDGGETVVKGGKEEKIENISTKQIELEKWFKWFEGKVEKQEKMTDEDEGLWCFAVLDYAQTILSITKRAEIFWLNDKQTTKMSESGKNQKFYSLFANFVEDDFVPFFYFDKFRNYLNKRSRNTAKGIKFYFGNEHLLDGWDLSKENAYCGFLFRKDNNYYLGIGEKDALLFHDNNGQEIDAAYQIDGSGFYEKIDYKQLDIGKFEGIAFPKKTESKKSYEKALRNRADEFLGGDIEKLKYFIDIRKEFKEFKEKRSKDKAWDREFDVSKERELIKYYITCLQTRNEWRRFNLVFKNFENYQSVDDFKSNIQRQTYWINPKKVNEDYVNRKVGEGKLFLFRIHTKDFYDFRKKVSNNNPYKEDGQSSKVNLFTQYFLELFSPENIENIKKKDKNGSIFELDGKAEIRYRRATDKVKQKTYKKDGKVVTYIDRWGGNREKEVLQHRRYLKNTLTLHLKTRLNFGKQINFREFNEQINTELLNNVSVKILGMDRGENNLIYYCVLNEKGEIEKCGSLNKIGKRIKKLEDGTTRMEQVDYYKLLVEREERRDWERKNWQRMTPIKNIKEGYLGNVKNWIVKEIFYNLDDGYATLNVLEDLNGGFKRSRFFRERQVYQNFEKELIEKLNYVVDKDRSNYRNAYQFTPIVPTVGEMEKSKQVGTLVYIPAGFTSKICPRCGWRKRLNIKNSETKEKIAGTKKTKGLLEEAMKIFYQKENDVFIFEYKWEQECNRNGEKEKYNGIDKVFSSVSRTRWENSRKANVEFIDGTERSITGLLKKLFKDNQIVIEKDINQQLIKRREELSLEFFRSIIFYFNLIVQIRNYDREKQGGDADYIQCPAKKNGKPCMFDSRDTMSSDLKEIVNGDANGAYNIARKGFILLTRIRKNPKNPNLFLNNKDWDEAASDWDKFVKEN

SEQ ID NO: 1339 - protein, 1403 aa, unidentified
  REGION 1..1403: note = Cas Enzyme sequence
MNRIYQGRVSRAEIIDEKSNVVSAPDWNWESALWDHHALFQDAVNYYVVCLLALAQPGNAVYAIRAKLDAKNEIGGDDELMVWRSFSRRGARRRGLRDSVGPYLCPGKEDATPEDCFEAVLAGNECAKSDEGKKQLDAGLKQLLGECTGAAGCKQAAPVFLPRLTTPAYLGSYGEDATTLAREDEAARLPFIVHDVAICPDSPALDAFGVHSIALPNEKKPKFIGAEALKKLRGMVSEWRERQPATVHDWLRLEAAIGKLPEDFEMPGYAATSAKNEVKFRLFAMFLLRYVERSDFTLELLRATTKKPAPEEKPPVAKPVAAGLGDPIRVARGKRGYVFRAFTSLPCWGGNATGTPEWIKFDFAAFEEALKALHQVDSKSEERRKAREQKQAQHDYQRGKSKKWKGGSGGEDERGPDILGGDPRIARLEYLVDVELREEYEMSEGVSVKYGLQPRTIRGFRDLRKKWHDALAEGERFSEAARARLLGKLRDYQRENANTIGSVRIFEELLKEENWIIWREPTAEQLREWWGAAKLPDDAEFAKDPLQALTDERELIEEIERLKGPIRFTPADPEHSRRQFYFSDVTALEKKGRLRHDRQTLETEVAVGLDGKWERNWVRIEFTAPRLLRDQLNNVGGADAAWQQAMMAALGLKTGLMKNGKASTFADCAAVALMPDVLSTGQRRILLNFPLTLDGEAIAAQLGKVARWDALQFGGADKESYWLRWPPTWIDEKKARKKAPPAPWWRGREPWRCLSVDLGQRDAGAFALLEATPGSAPKVQSRKLGMAGSVTWWATVRGTGMLRLPGENALVMRDGELREELYGERGRLASDAEWEEARDICGCLGLSADEIIGKERTRYSFPELNDQLLFALRRAQSRLARLQSWSCLAHEDTKPVRRDRIVQQITEAEDDPLKLKPLVEQQQWVRIAGVLCEVLKKDRARIAVELGRIANRVQPLRGRDWEWAKRDDANHCHVLRQTPRGSNDRKPLLAGQRGLSLRRIEQLESLRQRCQSLNRALTQEPGTPSKLGRSRRGIELPDPCPELLDRLEALKEQRVNQTAHLILAQALGVRLKAHSRNTADRMERDIHGEYERLPGREPVDFVVLENLDRYLASQGRSRGENSRLMKWCHRQILGKLKQLCEPYGLRVLETPAAYSSQFCSLTGVAGFRAVELTPDSVKEHRWKKHLDRLREEAEGKRKLDPGDREESERVQALFNQLEEQNEDLLDEAKKARAEGRAFRPKWRTLLAPIAGGPIFVPMHGKPMQADINAAINIGLRAIAAPDVPDIHIRIRAKREGEKFFVRAENAREKARWPGKLPEIVVEKDSDRKKLLEDAHVNFFADPGIVAEFDHATIDGQAGYSCGRGIFGTIKGNDRRAPGNWRRTEEINRARIAKWKDGNDHIPM

SEQ ID NO: 1340 - protein, 1406 aa, unidentified
  REGION 1..1406: note = Cas Enzyme sequence
MKNQHLFSDFTNQYPLSKTLRFELKPIGKDGKPLEENQAASLLSGIREKDKEIKEAYIALKPVMDKIHENVINASLTSNEAKQISFSDYYEKYKKKENLDSEEKTLRGKIVETYKIGIIPIKEKAGKDKKGNSILKKNDTKCLSESGILKYIENNFDTFVTDKLPKEGLRKQLEIFKRFFTYFSGYNQNRENYYSKEEKSTAVATRIVHDNLPKFCENWMQLSQDRVIKKKKSNETITIPCRKDEYLSAYQYLKNANKTTQIKDAETNKMIEAYPIEEKMFDIANFYKFLPQSGIEEYNRIIGHYNLLINLYNQARKDEPDFRKLDEFKTLYKQIGCGEKKVFQSAIKYNTRKEQDEKESTEEILNLKETLKNISFIGQKYLKKATDSPNVINIYNLIEWLKNREDWDGVYWSKAAVNIVSNKYLANWYDIKNRLKNYKECASFNKKREEQIKINDAVELSGLFEVLNQNNQTDWSKILFKESVWKEKQFLIDENLAPSKNLINLICADIEDFAKVFCDKSEDILKLINYKNEDNKLAIKEWLDTAISIIRIVKYFLVKESKIKGNAVDSELSNMLSAILNADDAKWFDWYDAVRNYLTKKPQDDAKENKLKLNFEKGNLLDGFVDSHSDSDNATQYGGYLFRKKVGTDYEYFLGTSQNSKLFRCHLQKSIQNNDKSEFERLEYYQAKGTTYFDNKYNGNKLNLIKKVESVINEYVKDKEDKIKNEAELVKKRDSKGEITPSKLFDNIKKKKEFVHILSNENVLSMVNRTIQDLKISCNNFIERAPKLKDVQGKEYSGIEGYKQIIEDLQTTAKENKVFNFFNVSQKEFDSALSDEKRPIYLFKISNKDLSFSETSQKDEYGKQKRNLKGTENLHTLFFRALMREYDNCNSIDLGKGEIFFRDKAIPKPEVIHFANKPIYRRSDGKTESIFTHNIIKDKRFTETKYQLHLSISLNFNPTQKNVTEEVNDKFTQTDDIQFLGIDRGEKHLIYYSLIDVKGNIIEQNHFDVINKKDYLQAINKAAKERKEKRQNWQEIGNIKNLKDGYMSLVVHEIIEKMKDKETGVFKPTFIVLEDLNTGFKRSRQKFEQQVYQKFELALAKKLNYLVDKNAKMGEIGSVAKALQLTPPVANYQDIENKKQVGIMLYTRANYTSITDPATGWRKTIYLKKGSEVDIQKKVIDTFSEIGIDNGDYFFQYTDKKNGNTWKLWSGKDEKSLERYRYRRGKGKNEGIIESYNVKEMLDKLFKIFDKKKSLLEQIKKEDVQLAKINENTAWESLRFVIDIIQQIRNSGDINKKQDDNFLQSPVRDENGYHFDSRFYQKQENSILPKDADANGAYNIARKGLIMYEHIKLWQSIDNTEKKNLNLDLFISDEEWDLWLFNKQQWEKQLQVFVSKKQNDTKNLKS

SEQ ID NO: 1341 - protein, 1406 aa, unidentified
  REGION 1..1406: note = Cas Enzyme sequence
MTQFTNLYQISKTLRFELKPVGKTKETFKQWFEELKNAELIVDNDGNLFLKDKNIKEAYLTIKPIMDRLHEQFIEMSLLSEEAKQIDFSEYFEKYQAKSVSEKLEKGLREKIGNTYIVAGKYLSNEIGIVLDKELNTKKGKPYDCLTDAKMYNYLSANVKVLAEQNGIDEQVLDKHIKQFKGFWGYLTGYNHNRKNYYEVDKEATTAIATRIVHENLPIFCCNIMRFVKRREEYISIYQYLKEHNRETKIKDSKGNDMDVEAISEEVFQINHFNECLAQSQIEEYNRIISNYNMLINLYNQLRRSEKDFKKIDELETLYKQIGCGKKRTMFETLQDDSDVKRLLQKVSKAGDEMFRVRSNSLEIKTVPDFITFLKDCDNWDGIYMSKAAISKISNIYFANWHSIKDKLKRAKANSCITYDKNREEQIKLRDAVELSELFAVVDTEQTEHFFKESLFKDSDTNEYRGVIDKKITPSKNLIKLLCYDIERNKKVFLEKTDEIVTLKKYKEENNQTSEEDQTIKTIKDWFDAVTDAMRIVRYFSVRKSKMKGNLPNATMEQALSNLLYSDNAQWFKWYDLIRNYLTKKPQDDAKENKLKLNFDSSSFLRESGWDNDYSKNGAFIVIKDNDYYLVVIKEKLEEEDINKLKNLSDNSAKRVVYKQQKMDFKNFPRLFVFSKGDNLAPAVSKYNLPIDTIFDDYRKYRNLKGKEKDVFIEEHPKFRYNLIEYFKKCAPLHESLSSFKDKFEEVWKRTEDYNSLSEFYKDTANACYELSFEHINFEELCSSDKCHLFQIYNKDFSIGENGGNGSIGKPNLHTIYWNMLFDETNLKDVIFKLDGQGAEIFMREPVAKESPTKHPIGSKLVNKRDKDGNTIPAQLYREIYLYVNGKAKIISKEAQEYLDNEKVVIKEVKHEIIKDNRFYGDSAKYMFHCPITINFKAQPGNESEVNSIITNALQQSDNLNIIGIDRGEKHLVYSCTIDRNGKIIKGKCHHYDNINGTNYVQKLEAVADERIIAKKNWQAQDKIKDLKNGYISHVVHRLVKEAIKDGDIIDPHAYIVLEDLNAEMKRGRQKIEKQVYQNLETALAKKLNFVVDKNVTQCELGSARKALQLTPPISNYQDIEGKKQFGIMLYTRANYTSVTDPATGWRKTIYIKNGRDEEIKKQILDRFIDFGFDGKDYYFKYTEDNVGHTWQMYSGKNGEPLSRFQNRKQILKDKNIWVPEQVNVIKILDKLFAEFDKSESFKAQINNGSELQKDDERNETAWQSLRYALDMIQQIRNSGEKNSENDNFLCSPVRNNNGEHFDTRRHEKNGELSEIIDADANGAFNIARKGLIMDAHIKYWIGNGRPTTKRDGKVISDLDLFISDKEWDMWLLDRAQWVKQLPSFASRNVKDSNENPPTAKRGKKS

SEQ ID NO: 1342 - protein, 1407 aa, unidentified
  REGION 1..1407: note = Cas Enzyme sequence
MEQLTNFTNLYSLSKTLRFELIPQGKTLETFSKWIEEFNEKETSAENLFAKDKNIFDAYVALKPILDKIHEEFITYSLESEIAKGIKFEKYYELYKKRQNKEKDDDSLSKIEKALRESIGETYKAGKELFDKNNEDVQESIIEEPESYDEDDNESDNEENKKKKSVIKFLMDKSIINHIDKFVKKYVSEDLTEEKLKAHLATFKGFYTYFSGYNINRRNYYEFKEEKATAIATRIVHENLPTFCDNVIRFEDNKDDYLKIYEFLKDKNIITEIKNATTDTMTEIECIKDDIFKISHFSDCLSQLQIEEYNRYIRSYNYLINLYNQSHRNDKDYKKIDEFEILYKQIGCGTKKELLFALIKSKENELTEKQKQQRNAILTVEKTLNIAIETGKKYFEKDDSSQGIRTIPDFMDWLRNCEDWNGIYWSKVAVTKISNTYFANWHDLKDKLKGNKACVSFDKNREEQIKLNDAVELSGLFTVLDQNDVRTVFKNSVFENFKDVINYDLSPSKNLINFLCADIEKNIIQFLNDADNILNLEKYKEDKNEEEEDKIIKQIKDWFDCGINVIRLIKYFAVRKSKRKGSTNSTIEQALRNLLYSDDTNWFKWYDAVRNYLTKKPQDDVKENTLKLNFGSSSLLGGWSDGQEKVKRATLLKNEDDVYLCILKETSIFDTSKEDNPIYTKNGTSGRLILRTLGFKTLSGKGFVSVFNETYSNMSIRDPQKAIKSLQQIIKDRYSQKYPLLNKFVENVYTEKKEFDAEIQKTLKDCYECYFRPIDWQLVLDKEKQGDLFLFKIHSKDLKKESKSKQDNKSKDLQTLYWENVLKEDSMHQLCAGAEIFMREPIKTKKTYKHKLGEYLVNRKDKDGNSIPELIYRELFKWVNDGKKDKLSEEAEKYRNKISIKPVKYEIIKDKRFYLEEKYFFHCPIRLNYNSKSYKEPKFGYQEVNTEINEKLQQIPNLYFIGIDRGEKNLVYYCIVDKNENIIECEDCNIINGTNYLQRLEEKTTERQKSRQGWQAIGNISNLKDGYISHVVHEIVTKASKGLLLEEPQNGAYIVLEDLNTEMKQSRQKIEKQVYQKLEVALAKKLNFVVDKTVAIGRGSVENALQLTPPIANYGDIEGKKQFGIMLYTRANYTSITDPVTGWRKTIHLKAGTEEDIKNQIEDNFTEIAFDGQDYYFEYTEKHVGKKWRLYSGKDGKSLPRFKNNKQKKEDKDIWEPELIDVRSILDKVFEFFDKKQPLLAQIKNGTQLEKIPNRKETAWESLRFAIDLIQQIRNNGKEKEDDNFLYSPVRNNAEEHFDSRSYLNQTNPELPQDADANGAFNIARKGLIMNAHIEQWIKNGKKKVKKDKKEVSDLDLFVSDQEWDMWLLDREKWEQTLPVFASKSEMDKYRNLEKSETKVKPKRKRK

SEQ ID NO: 1343 - protein, 1407 aa, unidentified
  REGION 1..1407: note = Cas Enzyme sequence
VSRDDNTWREKLWLTHKAVNNGAQVFGDWLLTLRGGLCHTLADEKVKQKSKQGGEQFRLPTEEEKRDRRIVLALSWLSVESERGAPAERYVVARACGGKPGANNSVATVAALKEILESRGLNEAQIEPWVRDCRPTLSAAISSDAVWVNRSKTFDDIVPLAKRTVARDDCRKLLFHLFSDDYLVLPRRTKVRDQSEQNDEGSDITAEDAERRKDTLIKSGKGAGHKTRHPFSHLFGSSAYFTKQGKKTTLVLRDLWTAHLRPLVERVGIKFRSGDSCNREGSSATELQREMFSKAASRVAQLHTKIKQQEIDRANRGAADEKLASMERNPKYRVAVDLLVQYCTEQTQQTGSLDEYRIRPRAIVGWKEVVSAWSKLTPQTGQRAEEARRETAKTIAADQREEKFGDINLFIALATDSYKPVWNCNGSADPEILRIFVNGSTARYDVRRLKVDAYRHPDPLGHPVFCQYGDSRPHILFHRLRKNKLTDSTKDYRVVGLLVWDGDEGQRHPFLAVGSRFDREIGTIDSQGPKGGATTTEISRMTRHSEAAIALEQGKRVRVASVFDNLPIKPRKPTVVEKQPSKATGAVEYRKMKEPQWNGTLITEREVLDRLAVLAETNAEKAEAFARTRLNWWISVSLDLQPMGLWNSFAAARDLSPNPKLYPNNEANKGRGDRARLILSRLPGLRLLSVDLGHRYACACAVWEALSAEAFEDECRQAKMDGCDVTICDLYAFIDFPEREARRKKKGTPLSGKGKKFRPRKIYRRIGPDHLDGSVYPAPWARLDRQFTIELQGEDESARKPAQSEIEMVEAMAREFGKASSRCRVPPVDELMSDAVRTAELALRRHGLRAKIAYNLKTDKIWVAGTEKELRPQEQTEWLTKQLADWYSVAHGKLWTDDSAKRLWDTLIAPMLGGVSLPVPEEEECRTSQEKRSYQAELQAKLSAVANALGAAERATLHDKWSEIWHEEDKKWPRYLGTLKKWILPSAHGNDGPEIRHVGGLSLMRIATVQSLYRLHRAYAGRPEPDDPRKHITTRGESGAPVGREMLKAMEQMRENRVKQLASRIVEAALGIGIEQSCHGKKSQPRPRQQINAERFAPCHAIVIENLTHYKPEETRTRRENRGLMRWSASKVKKYLQEACELHSIHLRTVAAAYTSKQDSRTGAPGIRCKDFAVAEFVKQSGFLWPRIKAARGKDVKKRRAIDQFLVDLYARWDLAQSIWTDADNVRWQLDANGHWNRLDCKDNGGDSPQPVRIPVRGGEVFVSASGAPTAAAGLQADLNAAANIGVKALLDPDWEGRWWYVPCFKGSLEPVKDHTKGCRVLQEKVALKIHVASEPDAGSQGRNAAKKPGRQAKSEEIVNLWSHPSTSPLQAADGGRNWMIYPEYWNKVEERVIRKLRRLHGLDRKK

SEQ ID NO: 1344 - protein, 1407 aa, unidentified
  REGION 1..1407: note = Cas Enzyme sequence
MSDPTTRAYTIKLSGEGDWRSHIWSTHVAVNRGAWAWGEWLLTLRGGLPASLADEHPERRVLLALSWLTVESPATLVSAPIVARAGDSDCANKVLQAFEGILAHQGVSDAESWRAACEPTLKARIRDDAVWVNRHAAFLAAKDSLGCPIGMNEIWDVLGRFFGSIESYFALPKREEEEASSKASEDKTKELVKEALGWLCDRFGDDDKGADFSGLSDAYFKLSKSINAQAVSSGHELVAAIAQVFECNVNLEGVLGCFSGSGHKSKTRNSIKKFAKQAKLSEDQINELTSIATKDGEECGKKVGKKSHHLWSDAILKEVENRSGVVYRSGNGSKPNRSEYSVLVDHAARKLKVAHSWIKRAEVSRLEFQAEASKDVPAAAKEWLDQFCEDRTSETGGQQDYVIHKRALDGWEKVVRAWEELGDQGLHQVRIAAARQMQADMEEGEKLGDMTLFERLASDDARCVWQNKDRKADSQILKDYSAMQVARHNQQRFKVPAYRHPDPLRNPIYVDFGNSRWSISYSALKAAQDRPRLQQKLATAKTDATRSKLRAQLDESPDLRCVTLGLWTGDRVESVPLHWQAKRLWRDLDLDHFDHPGEATVTRADRLGRAMQDVPKGGVSVAEVFSAQDWNGRLQAPREQLDRLADLVYGKTGDFRNGADYGKLELLSALPQAAKQFGHLRWFLTTSAKLKPSGPWWKLVEAGLPAGIEYKKGRSGYYLNHQLNSGRKGRALLHLAGIPGLRILSFDLGHRYGASCAVWETLSQESLQAEIASHEVISGSLEVSALYLHTLRHDERGKPRRTIYRRTAADMWARLDRQFVIRLQGEDRAARWAIAEEMAGFTAFRKFLGITSLAEFGIEKMRVDELQYEAVREARYGLRRMGDVARIAYAMSAKNKPLSGSRDSADFTGDERAIYVAEGLARWQQLARQGNGWAAERWQRYIVDRLGAETLPETANDGAAVAGKRGIKKSVEALVPVARKLVECAELDAELNRLWSGYYRELEIEWKEHLRWLRRMILPRKGEFKQGNVGGLSVQRLQTIRGLYEVLRAFRMRPEPDDLRKNVPAPGHESLARFGRRILEKLEQLREQRIKQLASRIVEAALGAGRAKTSRGRDRKRPDICLDKSCHAVVAENLERYQPEETRLRKENRRLMDWAARNVRKFIVEGCELNGLHFAEVSPAYTSQQDSRTGAPGVRCEDIPAEVVSAAINRDSSSLRSLKQKRHAEWLSGEMQKLPSEERDCTPRHRILRAIRDHQINYQKNTVRVLRRGGELFVSLSTSSPASGGLQADLNAAANIGLKGLMHPDFIGSWWYVLVDKESGKPVPEKLKGCPIWDDSESADSLLAADMVHGLSNPKKSKQRQRTTVYAWNPLHGNTGQWKPTAEYKAEVELLIAQKLLQQPVLAETPW

SEQ ID NO: 1345 - protein, 1407 aa, unidentified
  REGION 1..1407: note = Cas Enzyme sequence
VSRDDNTWREKLWLTHKAVNNGAQVFGDWLLTLRGGLCHTLADEKVKQKSKQGGEQFRLPTEEEKRDRRIVLALSWLSVESERGAPAERYVVARACGGKPGANNSVATVAALKEILESRGLNEAQIEPWVRDCRPTLSAAISSDAVWVNRSKTFDDIVPLAKRTVARDDCRKLLFHLFSDDYLVLPRRTKVRDQSEQNDEGSDITAEDAERRKDTLIKSGKGAGHKTRHPFSHLFGSSAYFTKQGKKTTLVLRDLWTAHLRPLVERVGIKFRSGDSCNREGSSATELQREMFSKAASRVAQLHTKIKQQEIDRANRGAADEKLASMERNPKYRVAVDLLVQYCTEQTQQTGSLDEYRIRPRAIVGWKEVVSAWSKLTPQTGQRAEEARRETAKTIAADQREEKFGDINLFIALATDSYKPVWNCNGSADPEILRIFVNGSTARYDVRRLKVDAYRHPDPLGHPVFCQYGDSRPHILFHRLRKNKLTDSTKDYRVVGLLVWDGDEGQRHPFLAVGSRFDREIGTIDSQGPKGGATTTEISRMTRHSEAAIALEQGKRVRVASVFDNLPIKPRKPTVVEKQPSKATGAVEYRKMKEPQWNGTLITEREVLDRLAVLAETNAEKAEAFARTRLNWWISVSLDLQPMGLWNSFAAARDLSPNPKLYPNNEANKGRGDRARLILSRLPGLRLLSVDLGHRYACACAVWEALSAEAFEDECRQAKMDGCDVTICDLYAFIDFPEREARRKKKGTPLSGKGKKFRPRKIYRRIGPDHLDGSVYPAPWARLDRQFTIELQGEDESARKPAQSEIEMVEAMAREFGKASSRCRVPPVDELMSDAVRTAELALRRHGLRAKIAYNLKTDKIWVAGTEKELRPQEQTEWLTKQLADWYSVAHGKVWTDDRAKRLWDTHIAPMLGGVSLPVPEEEECRTSQEKRSYQAELQAKLSAVANALGAAERATLHDKWSEIWHEEDKKWPRYLGTLKKWILPSAHGNDGPEIRHVGGLSLMRIATVQSLYRLHRAYAGRPEPDDPRKHITTRGESGAPVGREMLKAMEQMRENRVKQLASRIVEAALGIGIEQSCHGKKSQPRPRQQINAERFAPCHAIVIENLTHYKPEETRTRRENRGLMRWSASKVKKYLQEACELHSIHLRTVAAAYTSKQDSRTGAPGIRCKDFAVAEFVKQSGFLWPRIKAARGKDVKKRRAIDQFLVDLYARWDLAQSIWTDADNVRWQLDANGHWNRLDCKDNGGDSPQPVRIPVRGGEVFVSASGAPTAAAGLQADLNAAANIGVKALLDPDWEGRWWYVPCFKGSLEPVKDHTKGCRVLQEKVALKIHVASEPDAGSQGRNAAKKPGRQAKSEEIVNLWSHPSTSPLQAADGGRNWMIYPEYWNKVEERVIRKLRRLHGLDRKK

SEQ ID NO: 1346 - protein, 1408 aa, unidentified
  REGION 1..1408: note = Cas Enzyme sequence
MDNFIRKYSLSKTLRFELKPVGKDGELLDESQASNLLSDVRAKDKEIKDAYIALKPVLDKIHEDVINESLNSEQAQKIDFSNYYEAYKNKTASKAVENSLRGEIVKTFDEGVKPVIKKAETDKKGKNIFKKKGIKCLSEAGILKYIKNNIDYFVSDKSSKDELLKHLDIFKGFFGYFSGYNQNRENYYAKEEKATAIATRVVHDNLPKFCDNCILFSQDKVIKRKNSKEIKTIPSRKEEYLKAYQYLKDSNKITQIKDAETGEMIEAYPIEEKIFDISMFSKCLSQNGIEEYNKVIGHYNLLINLYNQARRNEPDFKKLAQFKTLFKQIGCGEKKGLFFEIKYDTKAQQQKENKESSEILSLEEILETISESGRKYFEKPSNKEEGQTVYHFINWLKNRQDWEGVYWSKAAVGIISNKYFANWHALKDKLINGLQGKDKNVKGIYAGIATFKKKRDEQFKINDTVELSALFTFIDKESCQEGWSELFFKESILKDEDRKFVIDEKLAPSQNIINLICNDIEILAEEFCSKSSEILELSDYKDDKNKLKIKEWLDRAKFLLWIVKYFNVKERKVKGTPIDSELSNMLKSILYPDDVNWFNWYDAIRNYLTKKPQDDVKKNKLKLNFKKDNLLNGFVDSYTKNSDNATQYGSYLFRKKVIREDITEYEYFLGISENCKLFRCHLQNEILSDDKSDFERLEYYQAKSTTYFDSKYSKNKLKLVELIEELVDEKTQSDSSLDENAKKIKQRDGKGEITPSKLIKNIKKSKNFTNILFDTRLVSLLDQTICDLIKHTETLSERAPQLKVIKNNNYSGYEGYEQIIQDLQDIAKNNKIFNYFKISKQELKKAFDDKSKPFYLFRISNQDLDYYTKPQKNKKGIENLHTLFFRALMREYKNCNSVDMGKGDVFYREAMKGKKKIIHCAKKPIYRRSDGKTKSRFDHDIIKDKRFTKPKYHFHLSVLLNFNSSQSDITELVNQKYVEDDDIRILGIDRGEKHLVYYSLIDNKGNIIEQDHFDVINKKNYLQTINEAADKRKDSRQNWQEIGNIKNLKDGYISLVVHEIIEKMKDKGGNFKPTFIVLEDLNPGFKRSRQKFEQQVYQKFELALAKKLNYLVDKNAAMGELGSVSNALQLTPPVTNYMDIENKKQAGIMLYTRANYTSVTDPVTGWRKTIYLKKGSEDDIKKQIIDSFTEIKMDESGDYYFQYTDNNSGKEWKLWSGKNGEPLERYRFKRGKDKNERIIEPYNVKEMLDNLFKDFNKEKSLLTQINDSVQLSKISEKSSAWESLRFAIDLIQQIRNSGDVEKGQDDNFLQSPVRNSEGIHFDSCLYKNQENAKLPKDADANGAYNIARKGLIMYEHIKWMYSQSNKHKDSKLDLFISDKEWDLWLLDNKQWKQQLENFAQRDKDQIWI

SEQ ID NO: 1347 - protein, 1408 aa, unidentified
  REGION 1..1408: note = Cas Enzyme sequence
MARVTKTDRASPVYQTTRRAYTMRLRGDDGDESWRDDLWKTHSAFNTGVRLFGEFLLTLRGGLPHELADEAADDEGRRTRRILLALSWLSVEDQRAAPTGALRIAEATDPDRGERVASALRSILAARGVKGSRAEEWIEDCRPSLSARIRDDAAWIDRSLAFDELRRGHGGLDRGFARDQIMDFFGPEERYFALPGPDSDELADEAPDFRLKSRGWISNYFGTGKKSDKQAIAGKLRQLAEAPLARLAGRPRSALVAEMARLVGGRAEATDALVELCGLAKGRPSRARLAIEKLPDPASREAIEGLQRVLREESEKKQKEASLRRRPPWIDRLRDGIERGCGVPYVVGRDLTGEFGAMLDQGARRVGTGHSWIRRAEAERRRLETGAMRLEQVPEAAARWLRDYIESRTESSGSLAEDGYRIRGRAIEGWRQVVQRWSAKDVRNLEQRVDEVRLVQSEWNEDEKFGDQQLFEALAADDAEPVWRLDGEPNPSILGDFVKAAEAEHDRRRFKVPAYRHPDPLRSPVFVEFGKSRWRIAYGAHQRGAHKKSPTSSRSVDLDVWDGHELRRRSLRWSSKRLARDLGLDAAPAGGCIDASRVDRLGRVAAGAGEGDAVRPSGLFEQEEWNGRLQAPRDALAAIAARVDARGWDESSRARLSRLKWSLTLSAELECRGPFVEYAAERGIRPARKGGWFPHSEANKGRSGMAKLQLCRLAGLRILSVDLGHRHAAACAVWQALSAGELAADLRGSRVVSGSKDGDSMFLHAVRRGRDGRERRTIYRRIADDRLDRKEHPASWARLDRQFLIKLPGEDSEPRRCSPQEHREVEELERELGLTRSAGEPLPRRVDLLMSHALRRMREGLRRLGDAARIAHAFKPDSRRHLSGGRVVDHDRDSRRREVADALARWHERASEGADAAVVASWTSLSMRLAGLPAPATEEVPRRERKKRRAALAEALLPLADAAIAMGTAPLYEDWCRRHRELEPIVRARLRWLRRWLLPRGTRPAKDDSPEVRREKSRRRGASRHVGGLGLVRIANLTALHRLQRSFAMRPAPEDPRLNVPAEGDSRTAGLGAAAMRALDRLRTQRARQVASRIVEAALGAGRVRRRGERDPRRPEVSVDPACHAVVVEDLRFYRPDDLRTRAENRALMAWSSGKIRDFVIEGCELHGLLFRETSPNYTSRQCSRTGRPGVRCEEIPLRDLVESPWWRARVESAEESLRSGGEAKRDRLLAALAVASREAVGDPTGRTRNIVVPRRGGELFVAAPGGSDAGVIQADLNAAANVGLRALTDPDFAGRWWWIPCEMQASGAAEPVEEKFKGSACFDRATLDRLRLGRAEADGVRPSKRGRGRKADADGRKFVNYWRDPSPRPLSELDRGGSWRSTTEYWTGVESRVARALAARCGVPLLD

SEQ ID NO: 1348 - protein, 1409 aa, unidentified
  REGION 1..1409: note = Cas Enzyme sequence
MNRIYQGRVSKVEIPDGKDEHGKPKWKRLDAGESALWQHHELFQDAVNYYTLALAAMAAGLKSDSPKGKAMLEWRAEVLKSWVKARRKAIGFDGPHKRLANGLNADETETDAEKAFAACAKTLLKASSATPEACAKALLQLLEEADESDLNQFCVSRLPWLCTAHGKLDATPKNVAQQQETWMLTIIREIHEAPASQIAAVAEKLELGWFVTQMPKESMSGTEARTEAERLFKSASAKSKALATVADKFSKQLDKLGDKLKLPILGRKPKGAYPLAVVFKLFPAPETWEAFKTNTESLRKKAEKLKEAPLKIGTDFIAEARTAADQPIFDYFTNRALIRETGKEDRAVWFDFDLAAFIEAIKSPHRYFQDTLSREAAAAKLREKLHAIDPEAKPSWIKWSSTEKIVEKKKSKESITDTEDETTSFTFAGDKRIELLRKLVTKTLGYLAESENPESEKAEYTIQERTLRGWTKIREEWRKLAAKGKTTPDELWKVVKAEQGQHRDDFGSAVLYEKLAETEFQPIWQDKGTPTNHADDPLEAWLQYKDLQFELEDKERPIRFTPAHAVHSPRYFIIPKAGKFGSEHEAGTLSFTTGMVLKTADGLKPSLVRVNYSAPRLRRDELRSNGDKNLESTSWLQPMMKALGLPEHDPQDFSNCRILLQPSSEQSIQLTFPVPINTDNIFKQLGHHEKWNYQRSGKKGEMNFAQFNYSADEPRAEMSLRWPSDIEFAKEAGKSRTREPIPWHTKMDSFSCVSVDLGQRDAGAYAVLQASANAQKDFGNRPSRIIGETGEGAAKKSWRAALIASGMIRLSGEDRVEWRAPSKLEKGETEFGWREELFGERGRSATPVETEQCAKLFSDFGIKENDLLPDDWRESLSFPEQNDKLLRAASRAQWRVSRLHRWCWFLADEKKRGDALKEIRESFTAPAERTERWLPDTVKTFAEKDNDPHLANELAGLLRSKQDKLPELFESLANRILPLRGRSWKWEKHPVATNENRVGLLTQNGAALPDVRLRGQRGLSLERIEQIEELRRRFQSLNQTLRRDIAGKPPIRRDEAVPDPCPDLLEKLDRTKKQRVNQTAHMILAEALGVRLVKPPANKAALRVERDQHGVYEKFREPADFIVIEDLSRYRASQGRAPRENSRLMKWCHRAVRDKLKELCEPFGIPVLETPAAWSSRFCSRSGVAGFRAVEVHPGLKSKSPWAWHLKRLELHRGNPEQHPLSEDALKESEQIEKLFAELEKLNRDVEGERPKWRTLYAPKAGGPIFIPICDEIAKPDHEKLQPAIIQSDINAAINLGLRAMSDPRLWSIYPRLRTQREKDGTMLAREKRKYGEKAKVKIEPPKEDKEIAATNRNPNFFADLSHSIPWGFAQLENDRRFPLVSGKALWSEVKKRQWDRINQINQQRLKPK

SEQ ID NO: 1349 - protein, 1410 aa, unidentified
  REGION 1..1410: note = Cas Enzyme sequence
MKTSIFDEFTNQYSVQKTLRFALEPVGETAKHIKDGELLKKDEELARKYKLAKIIIDEYHKDFIHKRLSGFSFKIEDLEDFKSAYEALKADKKNKDEQDKLGEKQEALRKLVSEVFKNDRLFQKEFIKEDLPTWLEQHPDKVENNEEAIGIVKDFEKWTSYFDGFNENRKNIYTAESHSTSISYRLIHENLPRFIDNILRYEKAKELGVDFSEVGNYFDVKLDNVFSLSYFNNCLTQRGIDEYNKIRGGQSKRGNIKEQGVNEKINEYAQQLASQKNNTVDEKKKELKDKRKTVLSCKLEKLHKQILSDRTEISSRLQNINNDGNLCEQIQLFQLNEKDELIGREEIEDEKGNKNTEDFNITKQLREILESISEADAQSIYIKNGKELANISQFLFGDWDVIKRSLENYAENRLLGKNKKGESKRFTEQARESWLKSTYFSFDTIHKALKKDFEQYKDEDLVDNKDEGVTIEMKKKAMSEPLFRYFENLMFRKKNEETDVFEEKELLDEIIKLAPPAFNVLKQYKGEKTETLKNNKKEVSKIKVYLDAVQDLQQFLKPLFVKQKEKEHADVLTEKQPHRKKVKQKEKEHADVLDKDSAFYGDFDRLYEVLEQITPLYNQTRNYLTKKPYNIEKYKLNFENITLADGWDKNKETDNTCVLLRKGEKYFLGVMDRRTAKLFESDNLSPKSIEDSMAENIKKIEEHKAILLNKKEGTKAYDDLKNKLENMEKNIKKQAKSLEALKNTSDNYQKMEYKLLPGASKMLPKVFFSKENINYYNPSDEILRIRNHATHTQKGTPQKGYEKEEFDVKDMRNIIDFFKESINSRPEWRGFGFKFSDTSQYNDLSGFYKEVEHQGYKISFQDISVSYIDQCVEEGELYLFEIYSKDFSPHAKGKPSLQTLYWRNLFTPENLKNVVYKLNGKAELFFRKASIKYDEKIWEQGHHYEELKGKFDKNGKRLPIIKDKRYAKDRYLFHVSIGCNFKALGAPHFNDKINAFLKDNPTVNILGIDRGERHLAYYTLINQKREILQDVNGKYLQGSFNVIESDNKGKIYSKDYHYLLNKREVERDKSRKSWGSIERIKDLKEGYLSQVVHKICRMIVEHNAIVVLEDLNFGFKKGRFKVEKQIYQKLEKMLIDKLNYLVLKEKEPSHAGGVLKALQLTAPFKSFQKMGKQTGVVFYVSAYHTSKICPVTGFVNLLYPHYETVKKAQEFFNKFDLIKFNTEKQYFEFHLDYKKFTDKAEDSKQKWTICSYGKRLENFRTSKNDKWDTREINLTEKFKELFKNTVIDYENKEDIKSDIENQNDTGFFKELIRLLRLTLQLRNSRINSDEDWMISPIPDANGNFFDSRDVGGDVPQNADANGAYHIALKGLWALEQINKGEERLNITNKEWYQFVQEKSPDLDNEKILTV

SEQ ID NO: 1350 - protein, 1410 aa, unidentified
  REGION 1..1410: note = Cas Enzyme sequence
MEKGKTSIFNDFTCQFALSKTLRFELKPTPETLANMRFDFEYKEDIRTFLLDQRVEDAYQTLKPFIDKVHEEFISDSLGSKKAKEINFYEYVERRKDLIKYQRELKKILKNKEGSDNHIKEKRIKELERNTKNNEKTSDIEKEYRVAIGKLFIETADYWKNKKYKKYQWKIGSNVASGAGILKSQDILNLIVDTEKDNKIQNAIKEFKGFFTYFTGFNQNRQNYYETEKEKATAVASRIVHDNLPKFSDNAEIYEVHANEYADIYDVLVKLGRNLVNKDKEQLFPINNIIFADKYFNFCISQNEIEEYNREIGNANFLINLYNQAKNGETGFKKLPKFKTLYKQIGCGKNKSFFFALTHESETEAKAVLDSNPDKKVFSVEKIIGLAKSTGEIYLNQVSRNGQIETLPDFIGQIKDRESYEGVYWSKAALNTISSRYFADWSTLKKKLKFAKVFGKPDKGSDEDAKIPAAIELDQLFLVLDDIQDESWKEPGTFFKKNLTNEEVDAAKKRKNKIRQEIIEQALKPSSALLNLVLSDIEEHSQFFIKDIEKVEKATQEYFSATEKNREEKRRLWKETIKAWIDHVCDAYAMLKYFLVREDKSTLDSDVANGLKRILFESKMKTDILSGGIDDIVNWFEWRDALRNFLTKKPQDDLKENKLKLNFNCPYLLGGWSPIYGTYDSILLENGGRYYLVIINGSALSDEQVRKIETNCTDNNLSKRFVIHTQKIDNKNPPRWFIRSKGESFAPLVREGKLKLTDEILHIYDNDLFSKTKNKEGYREPLKKLIDYFKEGFRIHPDFNLFDFDNWKTSSEYDSIAEFYNHTARMCYKTEWRNTNWDEIIFLTKKDKLYLFEIHNQDKNDGKLKDHKDNLHTIYWNALFKDIDNRPKLSGGAEIFYRAGLLPDKQRKRKITTKDGKEKEIIENYRFSKEKFILHISIMLNFGFDKNDTNSKINEFYANNDELYFLGIDRGEKNLEYYSLVDKSGKLIEQGSLNLPFTDEKDNPRMIRVNKHTIIGGAEKIEPMDCWDYNQLLEARAGNRDYARKNWQTIGTIKNLKDGYVSQVVRIIADISTKNGKPTYIVLENLNTGFKRLRQKIEKSVYQKFELALAKKLNFLVDKDAILGEPGSVTNAIQLTPEIKTFANIENKKQVGSMLYVRPDYTSQTDPLTGWRKSIYLKKGSEEFIKEQIIGNKKKGINPAFTEIGFDGRDYCFVYIDKNTGKMWKLYSGYRGRTLDRYRTERNSKGIWVPVAQNVVNILDVVFEKFDKNRSLLEQVKEGKELTKSTETKYTKYTALESLRYAIDMIQQIRNSGTTMRDDDFIISPVRDENGEHFDSRIYWDKEQKKEKAELPSSGDANGAYNIARKGIIMNEHIKRGLNLFIFDEEWDAWLAGREIWEKWLNKNVDRIKR

SEQ ID NO: 1351 - protein, 1410 aa, unidentified
  REGION 1..1410: note = Cas Enzyme sequence
MEEFTNLYQLSKTLRFELKPVGKTAETFKQWLEELKNDELVVDNDGNLFAKDKSIKDAYLAIKPIMDRLHEQFIEMSLLSEEAKQIDFSDYFEKYQKNNVPEKLEGGLREIIGNTYKVAGNYLSEEISIVLGKEFKTKKDRPYECLTDAKMYNYLSAHVKDLAEQNGIDEEDLKKHIEQFKGFWGYLDGYNQNRENYYKVDKEASTAVATRIVHENLPTFCSNAIRFEKRKEEYLCIYRYLHDNSRETKIKNAKGEEIDVEAISDVIFQINHFNECLAQSQIEEYNRIIGNYNMLINLYNQLRCGEKDFKKVDEFEKLRKQIGCGKNKSMFETLQDDCDVKNLLRKASKAGKMMFGVASDNIEIKTVPDFIKFLRECDNWDGIYMSKTAIDKISSLYFANWHSIKDKLKESKADACITYEKKREEPIKLRDAVELSGLFAVLDSEQSEHFFKDSLFKDDDTNNYRGILNIDLKPSSNLINLLCFDIEQNIKAFLDESDNIVALEKYKDENNQAGEEDQTIKKLKEWFDAATSAMRIVRYFAVRKSKMKGNNIPNATMEQALSNLLYSDDVQWFKWYDLIRNYLTKKPQDDVKENMLKLNFGNETLMDGWDMNKEHDNSTVILRKNGKNGWYYLGIMDTKHKDVLDKEKVRTTGECYEKMDYKQIALHSGVGGFVRKCFGTAQNFGWRCPNNCLNEEGKIIIKDDEAQANLKEIIDCHKDFFDKYEKDGFKYKDFNFDFRESNKYGKLSEFYRDVEQQGYKITFRNVSVDYINDLVSEGKLYLFKINNKDFSPGKNGGKGSIGKPNLHTMYWRMLFDENNLKDVVFTLNGKSEIFMRKPVAKESPTKHSIGSKLVNKQYKDGDTKKTIPEKIYREIYSYANGETKDISAEAKKYIDEKKAIIKDVKHEIIKDNRFYGDDIEGTKYMFHCPITINFKANKYKDPKYAYPEVNKKITDSLQQSDNLQFIGIDRGEKHLVYSCTIDKNGRIIKDKCHHHDNINGTDYVQKLEAVADDRTIAKENWQAQRKIKDLRDGYISHVVHQLVEEAIKDDGKIAPHAYIVLEDLNTEMKRGRQKFEKQVYQNLETALAKKLNFVVDKDAKQGELGSESNALQLTPPINNYQDIEGKKQFGVMLYTRSNYTSVTDPATGWRKTIYIKNGKEEDIKKQILEKFSDFGFDGKDYYFEYTESNAGHLWRMYSGNNGEPLPRFLYKKQILKDKNNWVPERIDVVKILDKLFANFDKAKSFKSQIENGVELQKDEERNETAWQSLRFALDLIQQIRNSGEKDSEDDNFLFSPVRNDKGEHFDTHNYKNNAELSEIKDADANGAYNIARKGLIMDAHIKYWIEKGRPKISAKKDEKTSDLDLFISDREWDLWLLDKKLWKKELPTFASKSAKYDSDTPQTAKKRKKR

SEQ ID NO: 1352 - protein, 1410 aa, unidentified
  REGION 1..1410: note = Cas Enzyme sequence
VELHYLSESKPELIFARTLSRLCGGAFNDDAEVKNKLRSLDDLIKTKWSEEDRRQKDNPTSPSTLRFQNWKRSGLGKDNIRVELFVLFHCDGGSQFTAALLKAWLKGLYLSRLHETDKRRYIAFVEQFDLCGAAPGQEPEEKVDEARKAAAKPTYKPAVSSVTKTNFIPRLREALGYIFPSFTGMRGFLAQEGDPASASGGCMHGYFGWPKFDSAAYEEAIKSPHQIRQKQKERDKEAKQLDELKKLYEGKGREKGKSDDGGDEDFIPGGFSESGGDVRFAAMKRVHEEMAVADGVDHTKAYRYGISQAALRGYEELREAWNREVEPGEPFSGEKARKLKDRIVLYQRQHRDDMGDSRFFEELIKQGNWCVWQAAAPELESERAKMRYSTNIVRDYLRYSEVLEDLEKKRKPVQYTPADARESRRLLDFKGTSQGRFEHLGSSEGLSFTTQIAVRSCKGDKELYRRQDVRISYAAPRLLRDGARVLREDEELESANWAQPLMRALGIPADDTHNFRKHAVSLMPDWKPGSQSPQPDRLLLNFVLAPDEDRFVAHLRKQMGRKEWPWAMQFNWNADRRNSTLRWPHEDWSRIERKDEFPGHWFANAELRSFRLLSVDLGQKQAGAYAIMEMSCTLPDEDKKHARFVGRTDHNGKRRDWYARVLTKGLLKLPGEDAAVFRPEYREGKPVPGSEDFREELYGSAGRSASKSESETTLDVLRELHQLELLDENDREAAALSKHLSLPEQNTKLLIAFRRAQSFASRLHRWCWFLDPQDETARGDQAVRRRAAIEEIAEADEHAWLQKGAHMRAKARNAQLLDAKEEPESHPEIVSALKKELESLIEKLPRWLEIIAHRVYTSRTGKLVWRSQPDREGCHLLDFTLRTAEERKQLTKEEMRLAGQRGLAIQRIEQLEELRKRCQSLNQMVRREIGTKPKLSRDEGIPDPCPTILAKLDEIKAQRQNQTAHMILRQALGLTLAEPNQPKDDAEGEAREAMDSHGEYAKVDAKGQMVSDAKGNTWRGVVDFIVIEDLTRYRTSQGRAPCENSRLMKWCHQAVRDKLKQMCEPFGLPLLETPAAYSSRFCSRTGVAGFRAVELSGNPLEGSKWRWRIHKPEGGKTETKDQTKRREQWELLLRQVQKANQGRDGNSKGQKFRTLLVPDAGGSIFVPISALDTAYTRPGKNPGDTKLRRPIIELKPVSLEENQIKKPRLVHADINAAVNLGLRAIADPQLWSVHSRLRSEREFGTPPKPKTKEGKPKNKTHQPEQATAEMIKPDTFWVSERERRRYGERTADNRIGIVLCSVAQALAKSAGTKDESEKRKWLERAQEKTPKAGDSRHPNFFDDVANLKAWIHESAAILSGVPAGSPEPFHLVTGKALWGYVKDQAWKRCMAINAARLRAWGIEPPNEWGA

SEQ ID NO: 1353 - protein, 1411 aa, unidentified
  REGION 1..1411: note = Cas Enzyme sequence
MAKTQSLPTTPRAYTLRLRGVTPDDHSWRDALWATHEAVNRGAKAFGEWLLTLRGGLCHTLADARIPQSKGKPDRDPTPDERRDRRILLALSWLSVEDERGAPQDKSLIVAKGTDSADCRARKLCDALAAILRSRGVGDGDLGDSQRRPEEQPGTWLSDCMPSLSAAIRDEAVWVNRSAVFDGVCDGHDLAEARNDARTVLWFLLTEDYLLLPKRPVSNRKDLEEQEDQGATMGAAAEAVTKSGKGAGDRTRHLFSCVFGRESSQHFGKPPRTLNLRKHWRTHLKPLVAAGGIPLSDPDEKAKKVAPSPTEIHREMFSKAASRLAQIWTKQKQQEVERQLRKAADGQLKELESDQTWSKALALLDEYCSEFGLATGALGEYRLNPRAVVGWDRIVAAWERIDEANPVKATERRKEEVARLQSEDDEKKFGDANLFRSLAESEYELVWRHPGTGEADASVLTTYVKGWKARTDAGRLKVAAFRHPDPYLHPVFCQFGVSRPAIKHNRLEPTPNSDPRIVRMRLWTGCKADDISLLASSKRFDREIGSATDVVEEATGVPRRSRLGVAAVGSRHAVGPFRVARVFDRQEKRTRQRTEKDEAGGDAEDEAQSQTKKPTWNGTLQANRFELQTIARLELSDPVKARSARQRIRWSLIVSLDLQPQGPWLDYVAAGLPEGIEYKKGRSGYYLNYAANQGRKSRARLQLARLPGLRVLSLDLGHRYAAACAVWETITSKEMMAACLESGHARPTSDTLYLHLRRSTNRIQKRGRNKGKPVEATTVYRRIGPDELPDGSVHPAPWARLERQFLIKLQGEDRDARRARQSEIDAVNALRDFLGMPRLTETPRIDDLQRDAARLARLGLRRLGDMARIAFAMTATQKPISGGREVELSPEQRIDYLQESLLLWRELAGSNQYVDSWASQAWRDWVAEKFGGPTTVKTAEEARGWSRTKKKDASRELQELKPVAEWLADPCSMDAVELHGLWAAEYAAREQQWRKHLRSLRRMILPRKKDCPRGFKDARGVGGLSVKRLKTIRDLYQVLKAFHMRPEPDNLRKNIPSLGDESLANFGRRILNQLERLREQRIKQLASRVVEAALGAGRMKKPPGRERKRPKQRLDRACHAVVVENLEHYRPEDSRLRRENRQLMDWAARNVRKYIMEGCELHGLHFVEVSPNYTSRQNSRTGAPGIRCEEVSRAVFVEAARRVQNTDPVGAAAGKSTGEMRFEREVNRCSRELRFAKDQNGDPSARDLVMTALADAVASIPASRSTICVPRRGGELFVSLAADNGSIGALQADLNAAANIGLRALTDPDWMGAWWFVLVNLANGQPNKEKVQGCPLWNNRSIWEIPEATDSKPSSKRGAKRTKTDVYAWNPIFATISPSNEWLATKSYWNEVECQIADRLRLKQIEAENPF

SEQ ID NO: 1354 - protein, 1411 aa, unidentified
  REGION 1..1411: note = Cas Enzyme sequence
MENRIKEGSVFDQFTNQYSLSKTLRFELVPIGKTLDNMKKNIGYDEKIHTFLHDQEIEDAYQTLKPIFDKLHEEFITESLTGNTAKIIDFSQYLESYKNKKDLKTSEGHLRKEIGKTFDEAGENWKEEKYSKYTWKKGSNTASGTGILSTQSMLDLIKDLYSDDTEIKEIIDGTFKGFFTYFKGFNQNRENYYTIKEEKATAVATRIVHENLPKFCDNVLQFQGHTKEKKNGTKIKIDRKFEYLNAYKYLKGKEKDTQIKDAQSGKMIEAQAIAEDIFDIAYFNNCLSQNGIEGYNRIIGHYNLLINLYNQAKRLEEKDLSKKDKIFKDLPQFKILYKQIGCGEREPIFFSLTHNTTAQAKENKEKFKKPYSVEQILRQAKTAGEKYFQGKSDDGAINTVPELEEYILEKENYEGMYWSKIALNTISNKYFANWHALKELLKDKKEVASFDKKREEQIKMNDAVNLSVFFAVLDEVNDWQKEGVLFRESLTKEIENNIDEAENKKIKERREIITTAKRPSEALLKMIFADIKEHTKNFLTEAGEVLKLKKYQEKSSIEKIKTCMDYALAVNKMLKYFSVKENKTKGQPVDSTITGALDVLLRSEDAEWFRWYDALRNYLTKKPQDDTKNNKLKLNFKNSTLAEGWDINKESANSCVLLRNLNGKIFLGIMRKDKNISFQKEWCEGRGKKKTIIQNSLYKIDEGEIWEKMEYKQIAAPTGIGGFVRKCFNTAQKLGWQCPNDCLNSEGKIITKNEEARRNLKVIIDCYKDFFNKYEKDGFKYINFNFKFKNSNEYETLNDFFVDVENQAYKISFERISKNKLDELVEDGKVYLFEIKNQDANNGKKSGHKNNLHTIYWKALFENNNKPKLSGGAELFYRKALPKEKQEKIKDKQGKEIVKNFRFSKEKFLFHCPIKLNYKATGNSNPKYALYEVNNLVNERFNATHFLGIDRGEKHLAYYSLVNQNGGIMKQGTLNLPFIDKNGNLRSLKREKYFYNKQKKEWEPREVDCWDYNDLLDARASNRDMARKNWQTIGIIKELKEGYISQAIHEIVKIATDKEHPAFIVMEDLNTGFKRGRQKIEKSVYQKFELALSKKLNFMVDKTKENGELGSVTKAIQLTPPVQNYGDIENKKQLGIMLYTRANYTSQTDPVTGWRKSIYLKTGSEENIKEQIVESFDDIYFDGKDYVFTYTDKDTGKKWELYSGKNGKSLDRFYRERNEHEWVAEKQDLVKMLDGLFDDAVFDKDKDHSLLTQIVDEGKELTKINERTAWESLRFVIHLIQQIRNTGKNGNERDNDFIQSPVREKNEKNGEHFDSREWLDQNNEKETENTLSRPLSGDANGAYNIAVKGIIMNEHIKEWVKNGMEKRDLNLLVSDQEWGLYLDDRKEWKKQLPQFASWKEIKKNNKNKKRQ

SEQ ID NO: 1355 - protein, 1411 aa, unidentified
  REGION 1..1411: note = Cas Enzyme sequence
MPERYLTRAYTLRLRGPRDGGEEWRDRVWATHEAVNAGARIFGDWLLTMRGGLAPCHAEKDEDRVVLALSWLSVESEAGAPSKYVISTSKDSPNERAEKLSEALKKILRDRGVGKQKVDEWVSACRPSLEAAIRRDAVWINRAEAFNQACKDTSGSLYPGDEWDMLERLFGSRKSYLALPHVSTPESEAQSDGEPGDDSKDQDDGGSRTMDLVKEAGQWLSRRFGTGKGACFSDMAGVYKKIEKWARHQSGVIAGSKAVSLLAGALGASSQDLTGILAMISGPGYKSATRNFLSQFEKKAKLSQRDFKTLQDKAADDARKCEEKIGLKGRLAYSDKILKEAEAECGFKYLQPDGPARHSEFAVMLDHAARRVSQVHTWMKRAEAQRRVFEGGRQKKASVPQQAVRWLDRYCHDRSEASGALGEEYAIRRRALGGWDEIAGRWVRCKTAEERIEAIHEVQRDHDEEKFGDARLFEDLASDEAMVVWCDNSKAMPAWLKDFAMAQEAERQMQHFKVPAYRHPDPLRHPVFCDFGKSRWAISFAAHDHAKDHAAEADTEVHTAGGMKDVSLSLLTSGGDVAPHAMRWQSRRLERDLALGPSEGGEAGIEVSRADRLGRAAAGAKATNRLRILGVFADKDWNGRLQAPRAELDAMASVRDSARFNEAEKMRKLKAMAGRLGWFVTFSPRLRPKGPWLEYAVKYKLKPTAWPFNDENKKRDGRARLALCRLPGLRVLSVDLGHRNAAACAVWETASAAQVKDACDRAGRTAPDRNSLFIHLKVEEGGRTRTSLFRRIGDDRLDGKLHPTPWAMLDRQFFIKLQGEDEPGRRRRQEEAEAVKTLCHEVGYDLPEEFWKREGRSAGGLMSETVDLCSRALRRHGQRARIAHNLAAETRVEPGGREVALDRQGRVELIAETLVLWRELAVVGRWRDAQAASRWDEHVRPLVGETDLSALEETEEGPVQGRKRRAALMERLRPLAEKLADDPARCRELSDMWAGRWREEDGESAVDPASGRRVRSATGWYGRLRWLKDWILPRGAKAGERAIRRVGGLSLTRLATIRGLYRLQKAFHMRPMPQDLRANVPAKGSEEMDEFGQDTLDALERMRENRVKQLASRIAEAALGIGMEQTRADGLSPARPRERVRAPCHAVVVENLRHYRPEQVRTRRENRQLMTWSAAKVRKALSEACELHGLHFREVPAGYTSRQDSRTGGPGMRCEDVPVSAFLGEAGIWAREIKAARRRIEAAESKGGTGMSRDRFLCDLHAHLSALAPERRPPTVRLPRFGGEIFVPVDGRSPVRGGLQADLNAAANIGLRALMDPDWPGTWWYVPCERKTGKPDPKRVKGSSVFAKQTALGAAAGSKAVSDKRPIVNYWRNPSAAHVGEGRWQPTSEYWSGVEFGVVKRLRRQAGLDVA

SEQ ID NO: 1356 - protein, 1411 aa, unidentified
  REGION 1..1411: note = Cas Enzyme sequence
MNRIYQGRATAFELADDDSGFVAKAIAGTSEGADQSTCPLWQHHAIFQDAINYYLVALGSLVGDQAEAGDRLARDLRERLASAWTQFPRIDAHRKKANSLRKSLTNWLGLDHGASLEEAFATVLDGNLADSRTRYLAMALLLDKCSGDAAIQQGGRGYLPRFCAADASPSYDFSAETLKAASGYDRLAEALHGESPLEGTQLAALANDLQLSWTVKLQPGKTFDGDEAKARLREAVEHLQKTAANPPNKRVAEALQHHPQAVSELETLLKKISDLPDQLSIPRNRKASKDVTFTTLAFQFFPSPLTADLLRLFIRRPSAKKDAKNSDSPAIDFAELGDDPIKLARGDRGYVFPAFTALPAWQPQSPGQPTWKEFDIAAFKEALKSLNQFHQKTIERADKLAALNSRFLYSTELDAPWQAAKSSAEGEEEDSHPFKLAGDDRFSLAQSLEKQLTKELNEGAWRITHSSLRGFRDLAEKWNQLHRQRSGKVTSEELSNIVKDYQRDDKNQRSIGSLPLFLTLCEPTYWSLWLEVNEETELQRETDHRPANMLRAVADLHNLGRDLERAKEPIKLTPAEPTHSRRLFMFSDLAGRSKVKFLDEPRIELSIAHRNGDYVSELRARVTYSAPRLHRDHLLGGEESRWLQPMTAALGITGIEPKKFPKFESAVALMPGFTREGELRHLLNFPIDLDASALHEQIGNREQWTNPFHGTREKHLHLHWPGTATTDAAKRSPWWSNPHFIENGFTTLSIDLGQRSAGAWALLRITASDPRTVKPATKRPVHFIGDDGSHQWFAEIIRTGLLRLPGEDQKLVFPDGRRQTEPYGKRGRKARADESIDEYADALALANALLAHEPEQWIGADRNEKSVARQNDSLIALANQRLSRLATFHRWSCFDPDRDEVRERRGKMIENLQKELAAWTDSEINGYSDLIQEQKFAEFRRRAGELFTHLQSQLGDLLVRLANRTVPLRQRSWQWVFRKNADDAATRDGIYGDLKDNGPRPDVTPFIRGQRGLSMARLEQLSRLRSLFLRYNRCFDRKPGEPVPFGASDRGRESGEPCEALLEKIDRAKEQRINQTAHEILAQALGVRLREHRIDKKDRQQRDAHGEYEKIPGREPVDFVVIEDLNRYLTSQGRAPSENSRLMKWAHRAVRDKIKMLVEEPFGIPVVEVAAAYSSRFCSRTGMPGARCEEVADLPHFLRKHYEKKATVETGKDASSDEALYQALLSQFADLDNLNAARRRKDPKAKLHTLLLPRTGGPLFLALDGSQNGHGPLTQADTNAAANLGLRAVAAPTSLHLLHRLRSERRGEVFECVTKNAREKNAYSTRQVIECEKSENSPSKKLRSADRPNFFYDPHHVAKFDRASVKIEDKEIPIAAGVGLWKSVNDRFLETIVEMNRHRIAKWFDADDQIP

SEQ ID NO: 1357 - protein, 1411 aa, unidentified
  REGION 1..1411: note = Cas Enzyme sequence
MSINRTYQGRISGAFRVSGKKAIRGVAIVNTEWQPLLANHLEIFQAGTNYYLAAFAACARGSKVTALKNLESKVRQSWKSHDYRKSGAGTGFQYSLHSHLPHLVGPVTTFDEFADRLVADAQDPNLLHLAVEALLTDLGGESTIQQGGRSYLPYFCSPNTLANFPRSRLLLERDLSKQTLPAQLHSPQPISIDKLRKNYDVHHFANLSKGQEPIKGTKLKSSAKEWLTHLQTEKLITPSQLETWLKESEALPEETYIPHYNGASAKGAEKNRLYAFLFCKLLSPSQERLDVLRSTYPSPKEPTKKKAAKKAAKTESLVAEKKHLAAEQEARLRSLGDDPIELARGGRRAIFASFTNQLGQAPFEDGPQWVEFDIATFKQALTALNQINQKTEDRKAELAELKNQISYYTNKKGSPRNTDEPVTFHTDPRYSLLEELHQAYNQKLHTDFAEDGVTMRRATIKGWPQIRDRFVKALEKNPDATTEALIETAVTASQKRTKNIGSSDLFRLLAEEKFRPIWSKITEENAESFRKNEWSQDALTDYVTFCLLQAEATHLSENLEVNLTPANLVQSRRPLPLSDLGGASKVVHRQHPDDGTSSIITSIYAHDSESKTLKETRIELTYSAPRLERDSLSGPENRSLLQPLMKGLGLECPPLEKVFPKAKDLAVNLMPDWFTKNIRNRTTKPDRFLLNFPARLETEWISDALGKARLWDSQQFNGPNDDPLHLHWPETMKPADQKNAWWTKKEIIEKGFTVASFDLGVRTAAACAIYQVTCDKSSIPESKLRFTRTLGSSGNHTWFAYPLSREMIRLSGEDRVALHTKRPGKGKAGHSKENQHLIERSGKRGRKADPVETPQFKNHLETLANILPDWLHQEAAKSLPYLLRQNRLLLRTLKALLGHLAWCHRLFIKLKAGEELAFKSGELNERLHEIFTPEKSNDEQLAALSGQIQSQRTIAKQLLLDLANRILPLQKFHWELKEGALVELTNTKGDPEKFQPYTLTKSKNPLQSSASKIRGQGGLSAERIEDIDDLRRRASSLQRELNRIIGVEPTIGFGRNSGSVPDAAPELLDRLDKLKDQKQKQTAHFILTRALGLRLKEGDAKDADRPDYVHGEYEPIPGAKVADMIVIENLERYRTDQGRTRAGNRQLMQWSHRAVTGTLRELTAPYGIPVLAVSASYSSKFCATTARPGFRAVELSPKNKNHHALRHLLESTKPAEKNFATQVDKLLTDNPDNPRLKILVPSDGGPIFVPAFDPKQQNQKDLPRSQADLNAAQNLALRAIAPPAQLCLLHKVRIKADKGKLLLRCENIREKTALNPKAELQSAISSETIPPELLGKKFSTFFYLGSGDGVSFAPNYDHFTTTLPNGEKIHLASNRSLWPTVTQAAPACLIAINNPALAKLNLPLLSKPSPK

SEQ ID NO: 1358 - protein, 1412 aa, unidentified
  REGION 1..1412: note = Cas Enzyme sequence
LWTTHNTVNRGAQAWGDSLLTLRGGLPASLADGLPDRRVILALSWLSVEAPEPPSVPAGAIVARGTDAAEERGDLVVDRFRRVLERLAVEDAESWVSECSPALTASIRADAVWVDRSGLFEALASISGVTRGEAPGVLLDLLGGADDYFAMPTDESAAVSEAKDFVVKAGNWLSTHWGSGVKSDRATIASRLESLASQSASTLAGLSGRAALGRLGTALGLERADELDAGEVLKRLKQAVGWKGRSSKGAVALQRLVGAEAVTDGLWGEIQAKLREEGAAQRGRGSVPAADGNWSVAMRQAIEERTGMPFRAGRDLIWEYAVMLDHALRRVSAAHTWIKRAEAARRGFEEDAKKIESVPGEAREWLDEYCRDRSNESGAGEGYRLRRRAIDGWEDVVCAWARLKSPDRESRRSAAKELQADAEKFGDIQLFAGRDGDEEWPCLADNDAVCVWQRDGKPDAEILKSYVAARTAEDDQARFKVPAYRHPEPLRHPVFVDFGNSRWRIAYSALEAVQDRERLLARMAAARTDKTRLGIQQRLDAPLDLRGVTLGLWTGSSIEDIGLRWQGRRLEKDLDFGHFLRAGPEVSRADRFGRAVAGASDGAVRVAEVFAQTEWNGRLQVPRADLDKLAAHIKKHRLNINQPEEWDKRATAMWRHLRWFLTVSAKLQPAGPWLDYVAAGLPQGWEYRKSRNGEYRLRSEANRDRKGRAWLRLARLPGLRLLSVDLGHRYAAACAVWQTLARREVEAACKAAGRHPPGPEELSIVLRQPTGKIQRSGSRKGQPVQTATVYRRIGADSLPDGSPHPTPWARLDRQFLIKLQGEDRGARKPTPDELREVNDFRDWLGLAHLGGNRDAGGDLRPAGRVDELILDAVRTSRQGLRRHGDYARVAYALTATERPISGGRSVVMSREQRLGYLVDALVLWQALAGHDLWAGEMWAEWVAKKFRGPQPAEVERDASRSEQKKKVDESRGPLRVVAEQLVNRDNAALRALWAERWVERDGQWRRRLRWLRGRILPRGRRRSEKTIRRVGGVGYTRQANLRGLYQVLKAFHMRPVPDDLRRNVPELGDESLARFGQRVLGALERLRENRVKQLASRIVEAALGLGTENRKHWARGRKRPLARVADARHAACHAVVVENLEHYRPEQTRTRRENRGLMNWAARNVRKYLAESCFLHGLHFDEVGPSYTSRQDSRSGAPGVRCVDVPVAAFLSQPMWHKQVARAKDRAETAKGDARDRYLLALEAKWSAASDEEKARGGLLRIPLPGGELFTPAESRSAVARGLQADLNAAANIGLRAVLDPDWPGAWWYVPVNAQTRVPLPEKTAGSAAIPHSEPLDKPPPGDEPRQATRRGGERKEVINLFSRLDSKPLLSRKWMTYAEFWSRVEYDVVQILREQAGLPREDRGHSPADAT

SEQ ID NO: 1359 - protein, 1413 aa, unidentified
  REGION 1..1413: note = Cas Enzyme sequence
MSENLFSHFTQQYSLIKTLRFSLIPILTEKQEKDIFYQKGYKNRDQIQRQDKIEKFFNENKQDVFEVDIERKKRYRALKYYLTELHKLFIKDALGKAKVNDSLNFSSLFEKYKDFEKEKDDNKKSQLAKGINEEKARLVKFFGNKDGKGGLFQKTAEDYYDWLKDNLNENEKIQDNKDEKQKKNNILLSQNVLLILAKKIKNDNIKEKVKNDKDGNNLYALNNIEYLKKEELRKGTLTEYFQGWSTYFKNFNEIRGNLYKDDGRKVDEGDIENDIKIRKANAGQITTRILDENFEIFVMNSIWAETNKKNLKTEDFQNKDIEDGISIFTPEFYVHCLLQTDINTYNAKIVELNKFFNENKKPNSDIKYLKTLQKQLLLTDKPDGEEDYFVYEILDDDELIKGLEEFSTLSREKIKGIKTFLQGKIEYNLEDIQLNENQLHYFCNKYFGSWSYIRDLYYQQNNIVDEDQAKKDSEFKDKEGISKVAISLLEIKELLNKETVENFIETIKNGWFCRDYKYPSKTNIDLLKNAGVYKEESGNFENFLSFLKFELDSLLNGRAFLTKREQEDKEKIKATKQSLKNSQKERERVDELLLNKFSEENFTQDIADSFEKKQEKFESAFTDLKKAIENKQKLQRAKDFECKKAINEYCTRISDINRYFALFSVPEGVTSGFLNTVVTEFKEDNQIVPLFNAIRNYITKRPEETEKVKLNFDYNNLLDGWVYKNSDHPASSDYHCRLFRKNDSIFLGIVGDAENNLIDSSYELMDYYQIKGQTIFGSTYAGLFNENKYTQDRQEKSNKELLNNIDKIIDEKLIAAFPKAETYIKKIKKDRTSGLFDFEITREQIDRLFTGKTGTTYDEYRKADKKKVVLEILRKNFRNIFNFNEEADYLVNKIGELFGKTPKRKDFKGVDKMVYELTKLEPFFYKISFNAVKQNSNDTKIKALFQIYSKDFSPDKNPNSKKNLHTLYFEELFSKENEENPIFKLSGGAEVFFREKIDDYKVDQWEKKRLKNPKTDKLPNKKRRFTGNQILFHLPIVLNNINDGGSVNRKVHEYIQENEDVKIIGIDRGEKELAYYCLLDQFGTIIDEPKTLNTMGSNVIDGVRQPINYRNKLDIRERERMIARRSWTKIEGIKDLKQGYISNVVNEIAKLMVDNDAFICLEELNHGFKKDRSIRIEKGVYQRLENALVDKLNYLVLEKTPEGVRNARQLTEKNRAIKSWGNQMGALFYTDAKFTSKTCPNCGFRKRGVSDFNNRENLREKIKNGDLKVFFEKKKDRFRIEYNWNYEYRMNNKTELYSNRDLYDQENNMEYIYSDVIRSDWYRKYDPTIKLKEIFKAFYQTSKENIAIKENHFSYSVFIEVFNIILNIRNRTNEEDIISCPKCHFSTLPPKVQKINNGDANGAYNIARKGHDF

SEQ ID NO: 1360 - protein, 1414 aa, unidentified
  REGION 1..1414: note = Cas Enzyme sequence
MNRIYFGKATAVEIPDGKDTWKKLDEGEFALWRHHQLFQDAVNYYTLALAAMAVGLKPDSAKEKAILEWRAEVLKSSVHAHRKAIGFDGPHKCLAGLLGVDEKEMDAEKAFTACVKALLKKSPATPEARAKALLQLLEEADQSDLNQFCVSRLPWLCTPHGKLDATPKNIAQQQETQMLAIIREIHEASGAQVAAVAEKLELGWFVTQMPKESMNGAKARSEAERLFKSASAKEKGLAAIADKFSNRLNQLGDKLKLPCLGRKPKGAYPLAVVFKLFPMPETLAAFKTNTESLRKKAEKLKDSPLEIGTDFVAEARTADDQPVFDYFTNRALIRENGREDRAVWFDFDLAAFIEAIKSPHRYLQDTLSREAAATKLREKLHAIEPDAGWLKWTSSEKAAEKKKSKESINDTEDETPSFTFTGDKRIVLLRRLITETLGYLAESENPESEKAEYTIQERTLRGWTKIREEWRKLAEKEKTTSEELWKVVKAEQGEHRDDFGSAPLYQKLKETEFQSIWREKGTQSNHADDPLQAWLQYKGLLFELKDKERPIRFTPAHAVHSPRYFIIPKVGKFGSDHEVGTLSFIAGIILESPPGLKPSLVRVHYSAPRLRRDGLRTNGETNLESVNWLQPMMKALGLPEQDIQDFSNCRILLQPRSEKNIQLTFPVEVIPDKLVAGIGKANLWARQFNVHPDGDNFYNATLRWPHEKQPAKPPTSWFDLLDKFSCVSIDLGQRDAGAFAVLQASAQKDFGKKPSRIIGETGEGAKKKSWRAALIASGMLRLSGEDRLEWRAPSKPELKRGEKGFDWREELFGERGRSATPEETQQCADLFAALEIEKGNFLSDDWKEMLSFPEQNRELLRAVRRTQSRISRLQRWCWFLADKEKQQMALKEIREASGLKEDGHPKLEEKTGKPLSGEAWISDIIKAYAKKDNDPRLATEIKGALHQHLNRISELVTVVANRVLPLRGRSWAWTEKNKNGESYYLLEMVEDKNHRPPIRGQRGLSFERIEQVEELRRRFQSLNQASRRYKTLGKFLSKEWDKKQVDASLKEEFPDPCPDLLEKLDRIKEQRVNQTAHMILAEALGVKLAKPPSNKTELRRERDQHGVYEKFREPTDFIVIEDLSRYRASQGRAPRENSRLMKWCHRAIRDKLKELCEPFGIPVLETPAAWSSRFCSRSGVAGFRAVEVHHKLKTESPWAWHLKRLKLNETDPVQHPLSEDARNESEQIKKLFDDLETLNQDVDGERPKWRTLYAPKTGGPIFIPICDRIAKPDHEKLQPAVIQSDINAAINIGLRAIADPRLWSIYPRLRTQREKDGTMLAREKRKYGEKAKVKIELPKEDKEVSATNRNPNFFADVSCMIPWGHAQLESEKQFSIVSGKALWSEIKNGQWKRVDEINQQRIQNWQNKADKIPM

SEQ ID NO: 1361 - protein, 1415 aa, unidentified
  REGION 1..1415: note = Cas Enzyme sequence
MAEKTIFDEFTGKYQLLKTLRFELRPIWNTQQILDRDGIFKNDELRRKKYEAVKPWLDLLHREFIEIALKDFKFRNLRVYYSALQAWQKDKKSKQKKDALAKIESGLREETVSRFEKTASAWAASEQYKAVGLRKDGIDMLFEAGVFQLLKERFKNEEGTTVDGANIFDEWDKWTGYFKKFFETRKNFYKSDGTSTAVAYRIVNQNLRRFCENIQVFEEIKQKIDVSEVEKNFKMSCRAIFSLEYYNSCLLQKGIDAYNKIIGGELRNKDEKIRGINELVNKYRQDNPGEKIPFLKMLNKQIHGEKEAFIEAIENDGELVERLRTFYKNADTKIQIFKKLIADFARDYSSYDLKKIYLSKEAITHNASRWFENYESFERDLFAIVAEKYNKQEYESLRTHRNDSKISDKEGKLSFPDFIRCSHIKQALEKQEGVIWKGKYYEKEKDGGIPNFENIKDIFTQFLRVFQFELEQQFSREKTDIEAKAGEKTRITVGYEKFAKPIVEIIGEKNLTVDPRTKTNIKNFAKDAVLTIYQIAKYFAVEKRRNWLDNYELDDRFYKSSDIGYLNFYREAFEQIVRPYNLFRNYLTKKPYETGKWVLNFENPTLANGWDKNKERENSAVLFERDGRFILGIMHKDRSDLFVDENNKEVGGNASENVHRKMVYKYFPNPSQMIPKCSTQLKEVKNHFGGSSEDYKLHDEENFIEPLTISKRVYELNNYEYQKSYLQTLGGKNFDVSRRVKADSKKPSQIKVFQKDFLDLSKNETVYERALADWIDFCKSFLSAYRSTATSGFDYSHIKNTEKYESVDQFYRDAEKGSYKLSWRIVSEKYLHEKNEGGELFLFEIYNKDWGDGPKDKKRGRTKNLHTLYWEHLFSGENFKENFPFKLNGEAELFFRPATKGEKWEYKAKDLKTGQWKKVEKDKNGNLPEGAIIDHKRYTKDKIYFHCPITLNRVSENKTKYDIDADVRKEINNNPKVRIIGVDRGEKHLIYYSVIDRKGKIIKEGSLNAIGKDGKGEPVEYAAKLEKRALEREVSRRDWKEVEAIKDLRQGYMSQVVRKLADLIIEHNAIIVFEDLSMRFKQVRGGIEKSVYQQLEKALIDKLSFLVKKGEKNPLQAGHILRAYQLAAPVTAFKDMGKQTGVIFYTQAGYTSKTCPECGYRRNIKCRFENIEQAEEFIKNLESVDYGAKEDMFTIRYSLKKLSSKEQKKVKKANNELYAEVLRKDIFNLSTKDAVRYKWYDRYSEKAETKRKGVYDYKGERKESETKKGVVKEFNLTEYIKGVLETAKIDYVRGGLKEQILFTMREREFYQDFLFALFLLTETRHSISGTKTDYIQCAECGFDSRKGFHGTKEFNGDANGAYNIARKGIIILDKIQQFGEREDLAKMNWGDLSIGVDEWDKFAQNQWNPTSKSRK

SEQ ID NO: 1362 - protein, 1415 aa, unidentified
  REGION 1..1415: note = Cas Enzyme sequence
MELLKPVLTQRAYTLKLVGQKGDNSWREALWKTHEAVNIGAKVFGDWLLTLRGGLSHELAEEKDLTNEQKKYRMILLALSWLTVESEDGANKKYIVTKTEENENERKSKLEEALKEILQERKIGKKQIECWLEICLPILASSIREKSVWINRSKMFDDAKNEIGNSLDREAAWDIFDLLFGGKKSYFQVDMGAESAKGDTIKTTKIEKVKDLSQKAGQWLSRRFGTGKGANFKDIGRVCEIISKWANENKPMQFREMIEKLSLKLKTKTKDVPGILSLMSARGYKSATRNWFDKNAKKNNLSKEDLKELKEKSDEDARKCKSKIGAKGKLEWSDKIMDDVNKSERGLSYIDLQSGNANHFEISVILDHAMRHLSQTHSWIKIALEEKKAFKENADKLQSVSNKAQTWLDSYCEDRSEQSGAIEEYRIRKSAIGGWKEVVKAWENDECKTTEDRIKIARELQDELEDKKFGDINLFTDLAEDDAKSVWQENGKPNCEILENYVEAKEAEFKQKHFKIPAYRHPDPLLHPVFCDFGKSRWKIDFSAHNTTMEADVKKMERDINEIEVELKKCKEIIDDKKADKVKASIAELEKKRSKTTFELKYLQNKHSLRLGLWDGRAFLDKIELFWQSKRLENDIVLKDSGQGEDAIVTRADRAGRSVGNASKESKIQILNVFEEKDWNGRLQTPRVQLERLSKCKSAKKANKLKNNIKWFISFSPKLQPQGPWIEYVNKNNVKVDKRYFNPYVEENKKRKGQARLVLSRLPGLRILSVDLGHRYAAACAVWQAISKKEIESMCKQMVNPVPKEDDLFLRIKVKTPEGKKKTVIYRRIGPDKLNGQEHPAPWARLDRQFLIKLQGEDVSPRMVSKLENKLMSEIENDIGYQRDDELHPVGNGIDDVMTHCMDIIRNGIKRHSEYAKISFGLLQKRKLLSGARIAEENMTKNERTEHIQDLLEKWDRLAYSNRWKDKRISDLWEGLKFPELSSEKENETSQERKQRESQNKSALSENAKELINDNDKCLKLSKTWAEFWKEDDIKWRKILGNVRKWILPDRKMFNKNKLFNVGGLSLTRIANIKSLYRVQKAFFTRVTPDRKNMNEAKEGFGQSVLDTLESMSENRVKQLASRIIEAALGIGSENKDHWKGNKRPLQRINDPRFAPCHAVIIENLSNYRPDEVRTRRENRQLMDWSASNMEDYLHDACELNGLYLRQVYAGYTSKQDSRTGDPGIRCQDISVEELSRGNSWAVKNAQKKHSQNKDDCVTRYILELVEKWKKAGKKEKENTFVRIPQRGGEIFVSSNPESPASKGLQADLNAAANIGLKAIIDPDWPGKWWYVLCKKDGSVLKEKTEGSLVFDEKDKLKVTEDEIKTKKDSINLWRNISSKPLTQGAWMGHEKYNDEVVKNVVNILRKDAGLKAEQ

SEQ ID NO: 1363 - protein, 1418 aa, unidentified
  REGION 1..1418: note = Cas Enzyme sequence
MPSRAYTFKIKPFPHDRSAATLALWQTHHLVNVGAAEWGDWLLTFRGALSPDIAETEPDPLKRETIQRFLALSWLSVESKMGAPAYVVAEGSDYTTPDDKKKAQQKVLAAFREILSDFGVTNHDEWVRVCTPSLSAAIRDDAVWVNRAKCFKERVAKWPSPPTEADIWDFLTPFLGDPKTFFAVTGLPTHRDQGATKDANTDGENESTQAPNRKQSPKNFAHKAGAWLSQRFGEGKGANFASLATTYQSIHTWAIHTIQTWEETGQTDTSSDGILTQLGQHLDAPATVDGILKTISGPGYKSATRNVITSTQNAPTVSMAWLHKLREVSETDGKKCAENAGNKTKKDYANQLLASVEAATGLKYHPLANERAYHAEHSVILDHAARRVSMAHTNMKKREVERQGFDDEHQIPPEVVSFLDAYVDQRTAESGALESYHIRKRALIGWHEVCKAWRTCHTEDERLKALRHLQAHAEEKWGDHRLFEDMATQEAQVVTQDPDHLKWYQHKQKADYDKKRFKIPMYRHPHTLQHPVFCDFGDSRFEILFDFQKPSVFDKRLKKATRHRPPTADGVPIDQLTSDSVRGSLVEMTVWNGTTTQPTVFRWQSKRLQADITCHDPHGPGITRANRLGRITAGVSPDEPVSLLGPGVNKAWGTRLQVPRTQLTDLYTCIQKELSHDPSNHEVNQYVLQHEQDVLFRMNWMGSATIELTPNGHGTPYFETIPKFMGPRGSQGQYARHPGIRVMGVDLGHRHAAACAIWEACTIESVHAICQAHDHALPQETDAFCHVRYNTPQGKKNIVFRRIGPDRLPDQSPHPAPWARLDRQFLVKLPGEDEVRALWPHEQAVLHHLDRALGLEYGFRDRLFNKRPGLQKTAPSWQPNQQAPTVWADLDVDKAMQHMVAIVTKAIKRHAELATIAHDLTLKTKTLSGGKKEAVTTDDERLKILEQACLRLCKLIQPDKEQTVQWQTADITNLWRDTLPHMSLSGNQCHEAANHLLKDQAKRAQLRNAIIALWDKQDPIIQQVIGVVGRWLRKGRLEHPDVTTTVTFKPSDRQKVGGLSLSRIATLTEFRQKVQVGFASRPNPHQDAPVCGDMKRFGNKLLQSLERLRDQRIKQLCSRLLEGALGAGRLSSPIAKRPQESLDSPCHAIVIENLDHYKPDELRTRRENRRLMAWSAAKIKEVLKDGAALYDIKVWEESAAYTSRQDSRTGAPGLRCDDIPVTQFLGPKWEKEYEHIDWLCELKKGWQSKPEKDQKAGVVRLPKRGGALFVSAHQGGPMGLQADLNAAANIALKSLMDMTYTGRWWKVPCKNPKSHSKDKATPTQDKGMADFQSVKPDKKVRDSGLFEGCDGLRARGVSGTSEVINVWRDIGHQPLHEGEWQGYAAYHQNVTERVMARLEPHNQTRLGIVTDPLVSTGQ

SEQ ID NO: 1364 - protein, 1419 aa, unidentified
  REGION 1..1419: note = Cas Enzyme sequence
MNKESQKFNKFDDFTNLYSLSKTLRFELKPVGVDGKPLSEKEAASLLQSIREEDKKINEAYIALKPVLDKLHEIVITTSLSGLTYDSFNDSKDSNQNLLFNYFEEYKKGKERSLGNLEQSLRTKIGQTFEITANDLARSAGNDKKGKPIFKIEKDKERGINYLTDSAILKYIEKNIALFVDSPERVSEFIKETESIDTKGKKQVQRSGHLETFSSFFTYFSTFNENRENYYVYKEEKSTAVASRIIHENLPKFCDNLIQFSEEKEIKKKKSSEATVIPSRKDEYLNAHKFLTNTGRIKQIKDIKTNQMIEAYPIDEKMFEIQKFSECLTQEGIDEYNRVIGHYNQLINLYNQAKEKEADFRKLLPFKILFKQIGCGKRDALFLELRYETKAEQEKANDTSSQVLSVEGILELNRNAGNKFFQKQTDPDIPTIHRFIVWLKANENWEGVYWSKSAVDKISNSYLANWHEIKDRILKIFESKDKDPKENLKSVASYDKNGEEKIKIHDAVELSGLFEILDQDQDAEWSKRFFKASVLEDRKELINEELSPSKNLIHLLCADLENLAKEFLDKSNNITKIADDYKAENQKDVDKKGYKDESNILAIKEWLDTAKSILWVLKYFEVKQSKRKGNPIQSELSLLLDGLLPAKETDWFGWYDLVRNYLTKKPQDQAKENKLKLNFGNGSLLGGWSDGQEKVKGAVLLKNENRHFVGVLMKRSIFDTEDENNQIYDSKSSNQNVGRLILRNLAFKTLSGKGFVRDYKIKYSEITDKQEAILKLQELIRLNYIQKYPLLKEVTEKNYTDKKVFDADVMEILKECYECDFKAIHWDKVLEFVGEGSMYLFEIYSKDFSTTKGNKSINSKPNLQTIYWQHIFQENSSVQLCGGGEIFFREKAFNEKTIHIANQPIYRRRDEKTESLFNHDIIKDRRFTQDKYFFHIPIKINYMSSISGIRDGKPNPRAVSVVTDQVNTHFTQADDVQFLGIDRGEKHLLSYSLVNAKGEILAQDNFDVINKKDYLKEINEAAKLRRQKQENWQQKGNISNLKDGYISLVVHEIIEKMKDNSGNYKPTFIILEDLNVGFKRSRQKFEQQVYQKFELALAKKLNFLVYKKAKLGDPGSISKALQLTPPVSNFQDIENKKQLGIMFYTRANYTSVTDPATGWRKEIYLKTGTEKKIKDDILEAFTEIGVNSEGDYFFQYKGRNSEKTWTLWSGKNGKPLERYRARRDKDKNQYVVEPIDVKNLLDQLFSNFDKSKSLKEQLRPDVVLPKVNEHTAWETLRFIIDVIQQIRNSGDTNEKQEEKFFGADATKNQDDNFLLSPVRNEQDEHFDSRKYDTKESLEFPNDADANGAFNIARKGIIMYEHIKYWVSNGKQKVKKNKGEFPDLELFISDEEWDLWTTNREKWKLNLSSFASQKEKKTSL

SEQ ID NO: 1365 - protein, 1419 aa, unidentified
  REGION 1..1419: note = Cas Enzyme sequence
MSDTTTRAYTLKLKGDRLALWRNHVIFNRGVRAWGEWLLNLRGGLPASLADQKELLALEKRHVVQAVKERAAAVTPAAIRQDPKFEAATEKKVREEVAARKKKITEAAVAKELLAARRSELRRILALSWLCPETPVQLAPQAAIVAGADDSDRERKVLDRFHQILKHKGETDVAGWLEDCDATLRAAIRLDAVWVDRTACFNALPKGERPSDIDAAKHLFTLFGSPKEYFATVAAGESEDKNFNTTAGNWVSKNWGEGAKSDDAAIIRALTKLVGIDRSSAVGSAGPKLVARMLAKIGAEPSEDFRNLCAAIGWRGKPNKTRIALEKLAGASRVSAAVWDRFAEMGKEEIGLRKTLKGAEAPAWAAAMKSSLPGATGLPFKPADGRSHHFEYATMLAFAVRRVSQIHTKAKQAEAERQSFAPEQARIALVPLAAREWLDGYVEARTAASGAIDGYHLRKRALGGWSEVVSAWAGCETSEDRIAAVRELQADLEKPGDMQLFEALAADDATCVWRSEDGKGDPSILTDYVRAAVADQNAVRFKVPAYRHPDPLRSPSFIGFGNSQWSITYSAQAEIRERKKHLERATKSEKDAERARAALASDPVLQQVALDLWGIGEMRTVEYRWQSTRLLNDLALASVQDLKGEKVSRATRFGTAGAAGGPFLLDGIDDDAPWNGRLQAPRRELEDLARSLDFQDLPYDDETKWPEKLRARLQRVGWFLSHSAKLKPSGPWLDYVKKGLGDGWEWATGRSGSYLFREDNKDRKGRAKLILSRLPGLRVLSVDLGLRSSAAAAVWQVVSRRELNAAKEAADSVTEGDLSCFARTGGRTQVFRRIGPSAWARLDRQFLIRLDGEQSAARPATNDEWNALQGLRAWLGCLREDKPERLPPVDRLQQQAERLCRLGLRRLSDLARVAFLLSAKTRPIMGGRMAPLDDEGQVEAAQDALVIWHALASSEEFQDSQLRQLWQTHVSDGPPLVGRLNKKQRQEVRDALRSAAERLRGNVAISGELASLWQERSAEWAKRLRWLRDWVIPRFSKRTKGERVRLARKVGGLSLDRIATIRGVYQVMRAYTSRPEPTNLRAGVERLEKAAAQKLRPEFGRRMLAKMERLRENRVKQIASRIVEAALGVGSEEPLHRKGRKRPIAAIADPRFAPCHAVVIENLENYRPDDKRTRRENRGLMTWAARAVHKYLTEGCELHGLYLRQVSPAYTSRQDSRTGGPGLRCNDIPAKELANPEGWIGKLVARAEEAVQDGAATPRQKLLVTLAEAARNGDIASPAVRVIAPGGQLFVAADSSSPAAKGIHADMNAAANIGLVALLDPDWSAAWWRLPCKTATGEVDETKVGGSAAVPVGRAILDASAEAGKGYVNAWSDPQEKGVSRREWVDTKAYWRSIEERVVEILRLWNLKGGRARRGALPF

SEQ ID NO: 1366 - protein, 1420 aa, unidentified
  REGION 1..1420: note = Cas Enzyme sequence
MNRIYQGRVSKVEIPGDKENPWQPLPNWQDILWHHHELFQDAVNYYTLALAAMAAGVKGDDKQAHALRGWAAKVNETWQSASRKAETFDGPQKRLARILKISDDECSFEKAAASALQFSRASAEQRGSALLQLLSDKGDLNQICVSRLPWLATASGKFTATSKADASSQEAKRQRAVRQFHLMSKADAVEKAADLDLDLFLTQPSNKSVEGANAAQLLRDYFAKASKKFSELKSVADAVEKFIISVTDSLKIPSPGRKPSGLYPLAAIFKFFPRPETLAAFLAATKSLAEAKDKELVSDAVAESRVGDQPHFDYFTNLALVSGDADGERDTRAVWFEFDLAAFIEAIKAPRRYFEDTIKREAAADNFRKQIAAMEGRGHEASGGEDDGEPLPGFEGDSRIDLLKIIVQDKLKWIAEAEGDADEAGPKEYAIRERTVRGFGEIKRRWHTADEAGEATEKRLLEILAAEQTAHRDDFGSATLYQQLAKPEFHPVWREEGKQPWHADDPLAAWLKYKELQSDLADKERAIRFTPAHPEHSPRFFIFPKKSEAQAKTTKNRPAKPGLLSRHDPGQLSFTGGVVVKTDRGLVPSVVRIHYAAPRICRDQLRVSGDINLYEAPWLQPMMSALGLDKAPDKVNFSNCRITLQPTSKNDIQLTFPVEVNTEKIKAAVAREKTWEKQFNLFPDGENFYNASLRWPHEKQPSKPPVPWYDQVNSFSCVATDLGQRDAGAFGRLLVGSGGDLAKRPSRFIGATGNKNWRAALARSGMFRLPGEDAKVWRAMSKLDNRNNDDSGDPFDFREELWGERGRPARGWEADETAELMQKLEVPPEDKELTMLPDDWRKLLSFPEQNDKLLVAMRRYQSRIERLHRWCFFLKGDNKQQDTAWKEVQDCEDTRLISSGQRDQAKKRDPRLLVKLESDLQERLKVAPNFLVRITNRILPLRGRSWHWENHSKSTDENILHHLTQRGPSLDSKEKPVWLRGQRGLSLERIEQIEELRKRFQSLNQTQRRHIGGKPPIRRDESVPDPCHDLLDKLDNLKEQRVNQTAHMILAEALGLKLAPPPADKKTLRQQKDQHGVYEKILDKSSKWIGPVDFIIIEDLSRYRASQGRAPRENSRLMKWCHRAVRDKLKQLCEVFGLPVLETPAAYSSRFCSRSGVPGFRAVEIAPGFENNAPWSWIKKKTDDQAKPTIEAGYIDELVRQIAEAQKIPTASGNAPSKPRTLFAPLAGGPIFVPVSDSANDAELAPALAQADINAAINLALRAVADPKLWPIHPRLRSQREGGDKTGKGKKSKPKQETPKAETAGKLLTREKRKFGETGKPLIVHRAPTAKPDDTRQPNFFADLAGLDSIAEKLAAKNPHDFSWLKKEWTSAEIEGEPNTPRLLHGKSFWGTVKSYQWERIRKINNDRIAAWKEKGNPMP

SEQ ID NO: 1367 - protein, 1420 aa, unidentified
  REGION 1..1420: note = Cas Enzyme sequence
MADTTTRAYTLKLQGDRLALWGNHVVFNRGVQRWGEWLLNLRGGLPASLADDKELLTVPASEVTKTAKERATAINPAAIRQEADFRTASDTAVRAEVASRRKRITETAIRKELLAARQSELRLTLALSWLSPETPVALVPAAAIVAGAADSDREAKVLSRFRQIVKQKKVADVAGWLADCDAPLRAAIRPDAVWVDRSACFRGMPESERPVEEDAAKHLFVLFGSAKEYFATSAAGEAEEKNYSTTAGNWISKNWGEGAKSDDAKILRILAKLVMIDRLSVVGVSGSNALAKMLSKCGGDTGGDFRSLCGIIGWRGKPNKTRKALEKLVAAPRVTAEHWDRFKNACDEERRLRKASKGQSVPPWAGAMKTALPDAIGLPFNPGVGRSHHFEYATMLAFAVRRISQIHTKAKQAEAERRSFAPEQAQMALVPLAARRWLESYVESRSLASGAEDGYQLRRRALSGWPEVVAAWDACDTVEDRVAAVRELQADWDKPGDTQLFEALAIDEALCVWRAEAGRGVASMLTDFVRASVADQNAIRFKVPAYRHPDPLRSPTFIGFGNSQWSISYSAQAEASNRQKLLDKADESAKAAARAEEAIGKEAVLQDVILDLWTDKKMQPTKFRWQSRRLMTDLALHSIQELRGVRVTRASRLGRAGAQPGPVIVDGITDDAPWNGRLQAPRRELEDLARVLDAKGLPYDDESKWPAKVRARLRHLGWFLTHSAKLTPSGPWLNYVAKELPNGWQWPKGRDGHYLFREDNKARMGRAKLILSRLPGLRVLAVDLGLRTSAAVAVWQVVAKGELEEAKKASDSIQEDKLFCFVRRGQRNELFRRIGPDAWARLDRQFLIRLDGEKAAARPATASEWESMQRFLAWLGCGAESAQAKLPAVDRLHHDAERQCRLGLRRLAGLARVAFLLAATERPIMGGRMASLNPEDQIQAAQDAVAIWHGLASSEDFVDTRLRTLWKTHVGKAAPLATRLTKKQLQEVRESLRPAAERLHGNASLSRELAALWKERSDEWAKHLRWLRDWVVPRFNKRTHGERVRAARDVGGLSLDRIATIRGVYQVMRAYASRPEPTNLRAGVERLEQEASRKLRPEFGRRMLAKMERLRENRVKQIASRIVEAALGVGSEDRLHWERGRKRPTTAIAGPRFSPCHAVVIENLANYRPDEKRTRRENRGLMSWAARAIGKYLAEGCELHGMYLREVSPSYTSRQDSRTGCPGMRCNDVPVRELKNAEGWLGRLVLRAEEAVKDGKATPRQELLVKMAEAVRGQQITSGTVRIIAPGGQLFVAADAVSPSANGLHADMNAAANIGLVALLDPDWPAAWWRVPCKTATGEVDDTKVGGSEAIPLSEPLLDPGKETGRGIVNAWSDPKDSPVGRRSWTDSKRYWRDVERRVVEVLLSWNRDGRRHRPGALPF

SEQ ID NO: 1368 - protein, 1420 aa, unidentified
  REGION 1..1420: note = Cas Enzyme sequence
MADTTTRAYTLKLQGDRLALWGNHVVFNRGVQRWGEWLLNLRGGLPASLADDKELLTVPASEVTKTAKERATAINPAAIRQEADFRTASDTAVRAEVASRRKRITETAIRKELLAARQSELRLTLALSWLSPETPVALVPAAAIVAGAADSDREAKVLSRFRQIVKQKKVADVAGWLADCDAPLRAAIRPDAVWVDRSACFRGMPESERPVEEDAAKHLFVLFGSAKEYFATSAAGEAEEKNYSTTAGNWISKNWGEGAKSDDAKILRILAKLVMIDRLSVVGVSGSNALAKMLSKCGGDTGGDFRSLCGIIGWRGKPNKTRKALEKLVAAPRVTAEHWDRFKNACDEERRLRKASKGQSVPPWAGAMKTALPDAIGLPFNPGVGRSHHFEYATMLAFAVRRISQIHTKAKQAEAERRSFAPEQAQMALVPLAARRWLESYVESRSLASGAEDGYQLRRRALSGWPEVVAAWDACDTVEDRVAAVRELQADWDKPGDTQLFEALAIDEALCVWRAEAGRGVASMLTAFVRASVADQNAIRFKVPAYRHPDPLRSPTFIGFGNSQWSISYSAQAEASNRQKLLDKADESAKAAARAEEAIGKEAVLQDVILDLWTDKKMQPTKFRWQSRRLMTDLALHSIQELRGVRVTRASRLGRAGAQPGPVIVDGITDDAPWNGRLQAPRRELEDLARVLDAKGLPYDDESKWPAKVRARLRHLGWFLTHSAKLTPSGPWLNYVAKELPNGWQWPKGRDGHYLFREDNKARMGRAKLILSRLPGLRVLAVDLGLRTSAAVAVWQVVAKGELEEAKKASDSIQEDKLFCFVRRGQRNELFRRIGPDAWARLDRQFLIRLDGEKAAARPATASEWESMQRFLAWLGCGAESAQAKLPAVDRLHHDAERQCRLGLRRLAGLARVAFLLAATERPIMGGRMASLNPEDQIQAAQDAVAIWHGLASSEDFVDTRLRTLWKTHVGKAAPLATRLTKKQLQEVRESLRPAAERLHGNASLSRELAALWKERSDEWAKHLRWLRDWVVPRFNKRTHGERVRAARDVGGLSLDRIATIRGVYQVMRAYASRPEPTNLRAGVERLEQEASRKLRPEFGRRMLAKMERLRENRVKQIASRIVEAALGVGSEDRLHWERGRKRPTTAIAGPRFSPCHAVVIENLANYRPDEKRTRRENRGLMSWAARAIGKYLAEGCELHGMYLREVSPSYTSRQDSRTGCPGMRCNDVPVRELKNAEGWLGRLVLRAEEAVKDGKATPRQELLVKMAEAVRGQQITSGTVRIIAPGGQLFVAADAVSPSANGLHADMNAAANIGLVALLDPDWPAAWWRVPCKTATGEVDDTKVGGSEAIPLSEPLLDPGKETGRGIVNAWSDPKDSPVGRRSWTDSKRYWRDVERRVVEVLLSWNRDGRRHRPGALPF

SEQ ID NO: 1369 - protein, 1421 aa, unidentified
  REGION 1..1421: note = Cas Enzyme sequence
MTRSSLTQRAYTLRLKSAAQGDKSWAEKLWDTHEIVNKGARAFGDWLLTLRGGISHKLENLNDKETGEEGKKRRRILLALSWLSVESKDFAPEKYIVEKDGEDKHRTKEALEAILKSRNLEDEEVGSWVNDCKDSLTSFIRDDAVWVNRSRAFDDAVRKIGDSLTREEIWDVLGRFFGKEEAYLAPRTMDEKNGKTRKEEPKDLAEKAGGWLSKRFGKGKGTDFCKLSKVYSEIAKWAEEPRKSEQRTLANLASALGVDNLQGILKLIKNPGSKSGTRNFLEEIGEGEVSKENLAILKAKAEGNRNYCKKEIGGKGRREWSDRILKSIEETLDGKFTYLQEKGPARHWEFAVMLDHAARRISAGHTWIKLAEARRRNFEEDSQKINEVPENARQWLETYREDRSKSSGAIEGYLISKRAVTEWETVVKAWKNCKTEEDRIAAAGALQDNPEIDQFGDINLFRALASEDVRCVWQVDGKPDANILLNYVAATKAEFDKRRFKVPAYRHPDPLLHPVFCDYGNSRWEIRFDVHEVNRTGKKAKQNKKTIETADVHGLKMDLWTGSKIENVSLRWQSKLLEKDLAVKQLDGKEDGKKEVSRASRLGRAAVGAGWETPVSASSVFVQKQWNGRLQASRKELSRIARRVKTRGWDEKANSMKKNLKWFITFSPKLKLQGPWINYIDNSEDKRPFTFMSNGELILDKVFSIENKNRKGRARLILSRLPGLRVLSVDLGHRHAAACAVWETLSSRQLEDACVEADYDKPAPDVMYHHIESDGDKRVIYRRIGADELPGGRIHPAPWARLERQFLIKLQGEERKARMATADEIWEVHELERALGRKTPLVDRLTKSGWGSDSGTPRQRQLLGELNQWGWEPDEAQENSEDDEITSRESLLVDKLMSRTVDTVRKGLRRHGNRARIANFLVAREKTVPGGQMDTLNNEGRKEIIADALALWYELANGREWKDTEALDWWKIHIEPELSVEELPDIAGTGIAPKERKRKKKELKEKLKPVAERLLTSGAKKLSDQWCERWKQDDKEWQKTLRWLRDWILPRGVRGKSELIRNVGGLSLDRLTTIQSLYQAQKAYFTRITPKGIQMDKDKPLTAVMNFGGHILNDLENMREQRVKQLASRIVEAALGVGRVKIPKKSKDPKRHYERVDAPCHAVVIENLTNYRPEETRTRRENRQLMTWCSGKVKKYLSESCSLHGLFLWEVPPSYTSRQDSRTGSPGIRCEEVSVEKFFKTPFRQREVARAEEKDSKNKASAYEQYLIDLKERWKSRGEETALLRIPRKGGEIFVSANSNSPASKGLQADLNAAANIGLKAITDPDWSGSWWYVPCSSKDFVPIKDKIGGSRAFENITTPMPNPDDAKEATGKKRSGKKEIINLWRNPACSPLERDEWERTAKYWNMVEYHVIKRLKRQMG

SEQ ID NO: 1370 - protein, 1422 aa, unidentified
  REGION 1..1422: note = Cas Enzyme sequence
MNRIYQGRVSKVEIPKPGDKENPWQPLPNWQDILWKHHELFQDAVNYYTFAIAALGEKLPSNHPLTALRKRAADAWEQFPRKKTSLAKSLRDSVCPWLGLPRDASFDDALKIFASPSLKHKEIRSLAAALLAEKAETLKPQKCANSYWIRFCDRLKKEPNWDYSSEEHSRKSAAGHWIAALWLENAGQEIQNLATSLKLSSLVKCDPAAGKIAEVEARSLLIDALDHLKHIVNDTLNDTKPAKKTNGWLRQNKKLARQFLAENENRVATIEITNLISEKARGGGIDINKTHAVALLKAFPCNFTFEYVRAAVPKPKVKKQNKTKEQPRVWDVIEAKIKEIGDDPIKLARDGNKPIFKAFTALKEWHIVEGGPCWPDLDKSAFEEALKTINQFNQKTEEREKRRLETEAELKYMMGENPDWKPKKENEEAEEREVSILGGDPRYEKLLTLLQDLDEESAERTTKKIYGPSHASLRGFGKLRDAWLDLFASANEQPDEIKLREAVADLQREQKLDMGYTTFFLKLCEADYWDLWRDDTDSESKERRAKQWAKSVIYAAADARELAEEFERLKEPIRYTPAEPEHSRRLFMFSDIGGTHAAKYRKPGEVEVSAAVKNVQGNYSPLRLLLHYSAPRLIRDHLSDGSHAKWLQPMMAALGLPNDTLAGFTKDRNGEPKDSAVALMPDFVGRRRELRMLLNFPVDLDTGKLIQQIGKTSLWDKQINQSFENGKIKQRFHLFWPGMENAPERGWWDNSEVQAKGISCISIDLSQRRAADFALIHAGPNSSAKSFVQIGEAGGKSWFASLVGAGSLRLPGEDAEIYRDGIKQVELSGKRGRNATNAEYESALGLAKKLLHGEDAALLENKAKNWLNADNAKYSFPEQNDKLLSLFHGALSRYRTWHRWSWKLTPEHKKEWGKTIKEVQNVPYFAAWSQLASKDANASSIGNLQQRIATAAEGLRVFLEQTALALAHRVLPLRENSWRWIEHGKDSKAKPLHLLISDGSAPQVKPWLRGQRGLSLRRIEQLENFRRAILSLNRLLRHDIGVKPEFGSQTRGENLPDPCPEITEKINRIKEDRVNQTAHLIIAQALGIRLEYDIARDEDRENADVHGEYEPIPSRSPVDLIVLEDLSRYTTDKSRSRSENSRLMKWCHRAINEKVKLLIEPFGIPVLEVFASYSSKFDSRTGAPGFRAAEVTATDRLFWQKTIEKQPIARAVFDCLDSLAIKGYKNARLVLPQNGGQLFVPAVKSNQPLLPVRQADINAAVNIGLRAIAGPGCYHAHPRVRLAKAKSGANKGKWITRLDNKREKAQFNKTPAEITFSNLRTDSDVLKGDNTNLFHDPLKISAFGFANINGVKHPPLAHASALLSRQKNSAGKPNGAVARLEWEVCRRVSVERIKKLGCDVPPLMIESNLKVSTADEEDDIPM

SEQ ID NO: 1371 - protein, 1422 aa, unidentified
  REGION 1..1422: note = Cas Enzyme sequence
MNRIYQGRVTKVEKLKVGKNGKSADDWEELKDWQVVLWQHHELFQDAVNYYTLALATMAKGLSPDTVESRAALAWRDEVCKSWNQATRKAIKFEGPHQRISKLLGLDPAKSDFDKCGAKLLRHTPSSAQQRAKALLQLLEEADKGDLNQICVARIRWFCTRHGALDATPKSVSHKQEIEMLKSIREVHESTSGNLAKVAAVLNVGYFLAQPPKNDIVGEVAIEEAEHQFEAALKKVPSFKKLENKFKSSIREQGKKLTVPNLGRKPKGAYSFALVFKLFPTPETWKALKDATAGSYKRSLKQTAFTSEITKDFIAEARTRQDEPIFDYLTNLLLTREADDSNHAVWFDFDLAAFIEAIKSPHRYFQDTLRREEQARKVREKLQAIDSEGKWLDVSIDKGKLKNKVKVNDSAEDEEDEAGGFTFKDDKRIKLIRQLVTDEKEGLAYLAEAENPEMEAQKAEYTIQERTLRGWPKIREGWRKLTDNKDWPKLSAEEQEKKLWAVAVAEQGEHRDDFGSSTLYKILTQAKYHPVWRDNGTQDDHADDPLRAWLQFTERRMELKDKERPIRFTPAHGVHSPRYFIFPKKYQNKSGKTSKRQVATRSFNSEHEKGVLVFAAGIIFEDNGKRQPVRSRIFYSAPRLRRDQLRSDGETDLTKARWLQPMMQAMGLGETEVTDFAKCRVTLQPESLRNIQLTFPVEVPVDKLKKSVGKESLWNRQFNLHPEGSNFYNATLRWPHEKQPVKPPKPWYEQMSAFTCLSVDLGQRDAGAYALLEARANHDFSKKPSRFIGETPRKRWRAVLAASGLLRLSGEDHKEWRANSSLDPDKKTRFAFREELFGERGRSATDAETKQCRELLAEFGVKKEDLMPADWENTLFFPEQNDKLLVAVRRAQSYVARLHRWCWFLSDDRKEKNIEKALEEIGEVKDERSASIRQLAKEKKQKELNKALRKELSGWLGRLPGLLEQVAQRCLPLRGRSWRWGQNPVKADCFILDQGGPEKPNASMKMPNGKEMNVTWIRGQRGLSFERIEQIEELRKRFQSLNQTLRRKIGSLAPKRWDDSIPDPCPDLLEKLDHLKEQRVNQTAHMILAEALGVRLTRPPANKDELRRTRDQHGAYERFRDPVDFIVIEDLSRYRASQGRAPRENSRLMKWSHRAVRNKLKELCEPFGIPVLETSAAYSSRFCSRSGVAGLRAVEVHPDMKSDFPWAWHLRRLQLYLENPQTHPLSEVALSESQHVEKLFQQLGKINKNINTERPKWRTLLAPMTVGPIFVPICDRIANPDHKKLQPVLVQSDINAAISIGLRAIADPRLWNIYPRLRTERVEKGDGLIAREKRKYGEKVKKPLNISEQAKPSKGDSRQPNFFFDVADCAKWGHATIEDPLDGKSVKLVSGKALWSTVKEQQWSRVEEINRRRIAAWESKQK

SEQ ID NO: 1372 - protein, 1422 aa, unidentified
  REGION 1..1422: note = Cas Enzyme sequence
MNRIYQGRVTKVEVAKAGTKKKSIEWEALPDWQDALWKHHQLFQDAVNYYIVAIASLGVSPESKLTKLRGLLETVWETADKKGQRREGMRESLQRAWQLPEPPTLPEAVARFTTPIVTDNVPLTTAEKAGEFLLYKLGGDAAIQQGGREFLPMFCDVASKATYKLSVERQARDNDEKRLQGELYRDLTAEEIIALAQSITLGSVVNLQPDVPPDTGDEVVNRLREAAEKFPDYPGLDQFDQWIRKLDGNFSLPKCRGGNINLKRVNACILFIAFPNATTKEIFRDTFKRPSPNDEKSTETPREGDGKEDESSFIVDGDDPIKLSRGTRGCVFTGFTALPLWQGDGRGLQWKEFDIAAFKEALKVYNQFNQNLKKREDKLNAFAAKLLMMDGERALESFSDAATKPVHDRLARLWEESRGKLRLPNGDGGDDLVISNFCGDSRIEELRRIINDDLAEEYRLTDGRRTVYGLRGRTMKGWGSVKRRWQGIVKKGVPFSEEKRAELKGALDEMRGGEQREQIGSHKLFEALISNEAAWSIWREPDQELQEKIDKNNWPLDPLDAFRDYCETREAMEEVAFRPLNFTPADAKYSRRLFMFTDACSFGKGKGEYRHDLQEQAVMVPVALSGADGVLVRQTCRLTYSAPRLLRDHIRSEDGGYLQDWIQPMMRALFGGDEKKQNPQKLEEAAVQLMPDFDVNGERRILLNFPLELSDERTKALVGKEDLWRDQFVPRNRGTQLPFMRWPEEFTEKVIGRWWEKVSQFRVLAADLGTRHAASVALLECSKDRTMAARFIGNAGGCEWFARYCSGAILRLPGEDAKVVRKVSPRDKGGQGMAFREEFHGDRGRLADDTEWDETISMVKALGQEGVLKSIEEARLSGKRLSFPELNDKLLVAVRRTQSWIANCISWHWKLTQPESEAQRESALAQLRELERMPGWAKLADDSEGNWSKLRDAIHGHIIEQRGVVQEQLLRLTHRVLPMRERRWEWTTHPEKADCHLLLPVKGAIGQGKVKLRGQRGLSMARIEQLSELRRRWQSLNQSLRRQIGTKPLTASEMRNDPIPDPCPQILAKLENIREQRVNQTAHLIIAQALGLRLREPKLSEKIRKITDTHGEYEVARPPVDFIVMEDLSRYLSDQGRARSENTRLMKWCHRAVLQKVKMLAEPFGLPVLETPAAYSSRFCSLTGTAGFRAAEIRWADRHEFRWRSLLEEAAQAKAKCESPSENAAYASALFAALEKISQSDRPNRSLLAPQPGGPIFVTAKEVSHPAPSTQRKQRGKREVLPMQADLNAAINLALRAVAHPGCADIHHRLRTERKKGAKNQPDVLQAREPRRFGKEKVAIHFREGDSAPKERNSNLFYDSQSVASFGRARLGNEGSSSHPYASGPGLWKRVNDRCEQWKRCNAINSARCDSLQGEDDDQIPM

SEQ ID NO: 1373 - protein, 1422 aa, unidentified
  REGION 1..1422: note = Cas Enzyme sequence
MNRIYQGKITVIEVLEGQNKSDNANWKKLEGWQTAIWDHHEIFQDAINYYILALASLADPEYATSRLIKDLRLRVDDAWEAFPKTAEKDARGLRDSLANWLGLSKNASIKDAFQAVLDGNEASPQMRALALALLLDRCGGESAIQQGGRGYLPRFCDAKAKPTYDFSAVSRAAEVGKDRLSQVLHGELQESELEKIAGEMDLSWTVKLQPGEFFTPQESCARLAEAIQHVRGLLREASTIRVKEVTSQFPDFEQQLDSFNASLESGSREIVIPRNRKASKDLTFATLAFKFFPRPLTGKILSLFVKKPKATATEKVNSAVDFAICGDDPIKLARGSRGFVFRAFTALPAWSPKSPGEPVWKEFDIAAFKEALKSLNQFHQKTQDRVDDENAFRGQLAIMLGSGIKGWKPRKTDTGEDEPPPTPLDSKLFKLARELERDLTQDLADTVVGEKKSVQFGEAVYEYREGEWQLSTASLRGYGDISEEWNTLYNNRGATLAPTDLEEIVTKHQREEKNKKSLGSVPLFLKLCEKKYWPLWQGDEMNPEEVPTEKSFLKSMVSFHTTFRDFERSLEPINLTPAEPRYSRRLYMFSDLTDKTAKVAFGKTDDGFTVECAIAIHASKNAVREQRVRLTYSAKRLLRDELQGGVESRWLQPMTLALGLQTPESNQTSFESAVSLMPDFVRSSKNQQNNEEVRFLLNFPVTLDPAWIHSGLGKAAMWKGQFNGTRDKNLHLHWPGTISNKSPVAGWWKNQDIIERGFTLASYDLGQKTAAAWALLRVTCWDPRKQGNGTKRPVREIGSDGERTWFAEVVSTGVLRLPGEDQKVLRAGGKREVEHFGKAGRNALESEWQDGIKLAGALLAENPENWLGTTFKEKSFPEQNDALIALANRRLTRLNTFHRWSCFNPDRPEVALRRASLIDKLSEELEHWKDDEVQRWKELVKKEDFKSFRSAAGTAFSSLRSKFGELLVTLANRVAPLRDRSWQWEQKEDVTYGLYGELVDSGKQLADEPAWIRGQRGLSLARIEQMENLRRLFLRYNRSFDREAEIPAKFGREDSGRRSGEPCGLLLDKIDRMKEQRVNQTAHMILALAMGVRLREHQINEQEREAKDIHGEYEKIPGRDPVDFIVIENLDRYLTSQGRSPSENSRLMKWAHRAVRDKIKMLAEEPFGIPVVEAPAAYSSRFCAVTGVAGARCIERSELDPHTKESLEKWAGRPQKSGQPDPKIFTVLLDQFERLEKLNQNLEANRSGSRKESHSLYTLFLPKQGGPLFLSLEEKFGSKAKVLTQADVNAAINIGLRSVAAPAALDILHKIRAEKDGSDFRPVVKNAREKAAFDSKAVICLEGEPSNKLAAARSPNFFFDAKGFNCFDSAEFKLGDRSVRLVSGVGLWSTVNKNFPGHLAKLNEQRLVAWQKMAADEDNVPG

SEQ ID NO: 1374 - protein, 1423 aa, unidentified
  REGION 1..1423: note = Cas Enzyme sequence
MESPKAATTQRAYTLRLAGSEDNDHSWRERVWSTHEAVNAAAKAFGDWLLTFRGGIDHRLAHGSGGHRVLLALSWLSVESERGAPPQKYRVDRTGAVDALRDILRRRGVAAEDVASWVRDCAPSLQAEIRDDAVWVNRSRMFEDEGKALGIALPEEEVWDLLGKFFGSGASYLKPQDATEDDAASDDHATKDFVQKAGQWLSSRFGTGEGADFARMAGVYDRVALWAQGPVALPSDGPTVIRALARSLEEFKPPNEDIAGVLSLISGPGYKSATQKTLQRISETAETTAEAVAKLGESATNDAAKCRAKVGKKGRRPWADALLRRVEETCGLTYLDPRGGGARHVEFSVALDHAVRRVSQAHSWIKRAEAERRSFEEDAQRMERVPPSARAHLDAYCAGRGERSGSQGDYRIRRRAIGGWKEVVAKWSSASCRTAEDRVQAARDLQDEGDGEEEKFGDIQLFEALAAEEAAGVWRRDGEPDPSILADYVLAKEAEAKRQRFKVPAYRHPDPLRHPVFVDFGNSRWRIAFGAHERFKRAQKKTKAKGESDAAGTVDDGRGLMMRLLDGSQLVETPLRWRSKRLFRDLLHGEPCDDAREVVRADRLGRATALVGSDEAVGVRDLFQQKDWNGRLQVARRHLDALADRIESEGWDARARRMRDRLPWMLTFSARLRPDGPWISYATKQRLLKARRGEIQLAPRSARDEGSGLAYPFWHPRNGKGRVGLARHHLSCLPGLRVLSVDLGHRYAAACAAWETRTADEVRRDCEACSAPRPSSDDLHLRLHHPGGKGGILYRRIGPDEDQGRAHPAPWALLVRQFVIKLQGEGEPGRRATDAEIARVDGLRDALGLRRDTPRTGRDARVDRLMAEAVDVVRRGIRRHGERARIARGLVATRKVLPGDRESAEEMNADERVVHLQDLLLRWHETAFSPRWQDPEAQEMWRREVERVPGYAPLHEPGEPARGVERRKAREANLAALRSVAEALAKRDRMKLHVAWATRWRRDEALLRKSLRWLRDWILPRGAAGRHRAIRNVGGLSIRRLATIQGLYRAQKAFFTRLTPEGRQRTADGGGGSRPLVADDDFGRSVLDAMERLRENRTKQVASRIVEAALRVGAEPGRHARGDAPRLDRPTGEARFPQCHAIVIENLARYAPDETRTRRENRALMEWSARSVRKRLAEACQLYGIHLREVRPAYTSRQDSRTGSPGVRCVDVPVKQFLTEGGYWATTVAKTRERLADARASGGAGAAEDRYLAALEEHWKARPAPAREGATVRVPRQGGEVFVSANRDSPAAKGLQADLNAAANIGLLALLDPDWPGRWWYVPCDATKFAPDPKRAAGSAAIDLSRPLLEEREATPTTTRKKRRGSRKEATVVNLWRDVSSRPLHEWDPRNSWRPYAQYRNQVKERVVRMLARQAGLGDLRGV

SEQ ID NO: 1375 - protein, 1424 aa, unidentified
  REGION 1..1424: note = Cas Enzyme sequence
MNRIYQGRISRVEKLARAGDKKQIEEWSPLPEGEQMVWAHHVLFQDATNYYLAALLSLASEPDNPLFVIRQRLSPEDPELARDQIWKSFSRRGSKRKGFVESLGRHLGFDPHTATPDDVFQTILRDNEASAQIRDLALKELLAECNGEGAIQQKGREMLPRFCWSDFSGSYPHAATARAREENTLRLHTELHELDSPSALTAFAVEVDLGWVVNLDTSKPNLSEEDSRERLIKAVDHFAQAFGGRATTKLGERARGFLQSKPQSAANLQTLRERIAVLGANELPSIPRNRKSIPDRSEALLLFKYFPSPFTADLLRLSFPVLDAKKRQRASRNQVDNSFLRFGDDPIKLARGKRGFVFPAFTCLPSWKDAVPGQPAWKEFDIAAFKEALKAIHQIETKSAERKAEQAQLERLLDCMEGRAKWFTTDESEMPRPVLIACDPRIKQLEKIQQSLASSDDSLDEELREYGIRSRTIRGFRELATIWRQKTPPGTPKGTSHADQLKEILREHQTKNRDSMGSARLFEELTHPENWHVWLEPSPEEMQAWRNALPNSADRSLDFAPDPLTALARRLEIEREISELDRPVRLTPADPRYSRRQFYFSDVVSFSQRGNYRHDTAAMAVTVPIAVETDQGWIQQRVRLCYAAPRLKRDRLRAEDGSLGSTAGFHQPMMEALGVPPAVPKDLSKLAVALMPEGLPDESGRSRLFLNFPIEIDTAPIRRHIGKASAWDKQFASADGKNMYLRWPSLTSGLKSPPQKWWWEDRRSFTVLAVDLGQRFAAALARLEVTGDAPSREKPGRFIGRSGETSWHVGGLRTALVRLAGEDAQLVEKGQRRQEPFGSAGRPADAAEVEEAREICRRLAFDMDDRIGGANTQGSQLKRFPSFPELNDILLIAHRRGVARLRRYQRTLRTLHDDAKAGLIQYNELRASGDEDLPSIKDASSAKAHLEEACHRLRGTLSETLVDIAGRVAPSRDRRWIWEQAKKEGPANHCLVRSPPLPQRNRGVRLRGQRGLSMDRIEQLEELRRRAQALNRALLNDDPSKATIGGPLRGLDLPDACPEIGEKILRLKEERLNQTAHQIVAEALGLRLKPPTKSKAQRRDRDIHGEYEKVREPVDFIVLEDLSRYLSSQGRAPSENSRLMRWCHRAVLHKLIELAEPYGIPILQTNPAYSSRFCSRSGVAGFRAVEVTHASRYAFPWKHELAQYERVCSGDLKPEPHRRARLEMTHLLFAQLEKLEATRTGRPPRSLLAPQPGGPIFVPSRGPTTNADLNAAINLGLRAIAEPSVLDVHVRIVSAADNGTLRTLAKSRHAAARWGVKGRLIEMHKPEELARLLKESRQPNFFVDLGCDADFQRARVDGIGEPIASGKGLWGSLRQKEWRIINRLNNNRLEKKEWLGHRPLPEEPEPVSSSGSPWAEDDDIPYNE

SEQ ID NO: 1376 - protein, 1424 aa, unidentified
  REGION 1..1424: note = Cas Enzyme sequence
MADTTTRAYTLKLKGDRLTLWRNHVIFNRGVKFWGEWLLNLRGGLPASLADHKDLLTAAKGDVVQAVRERTAAITPAAIRQEPKYEAATEKKVREEVAARKKKITEAAVARDLLAARRSELRRILALSWICPETPVQLVPQAAVVAAADDIDRERKVLDRFRQILKQKGVADVAGWLQDCDATLRAAIRPDAVWVDRTACFRAMPAAVRPSEIDAAKHLFRLFGSTSDYFATPSANSGPAEPKDFANTCRDWVSSFWGGGEKANKAKILTALSAIGQIKPARVVGKRGPAALAVIASALKQKPADDSVEALARAIGWLTGRPSAARLAIDAIATSPRVTQKLWDRLVLACEKDCGRQKSKLAFDGSASTIASALEPKMAALTGMPYSVTREKSGEYGTMLAFAMRRVSQIHTKAKQAEVERQSFAPEQARVDLVPPAARRWLDSYVEARTATTGAIDGYQLRRRALGGWSEVATAWAGCNTSADRIAAVRELQADMEKPGDIQLFEALAADDATCVWRSEGGKGDSSILTDYVRAAVADQNAVRFKVPAYRHPDPLRSPSFIGFGNSQWAIAYSAQAEVRERKKQLERAGKSEKDADRAREALAREPVLQQVSLDLWGLGEMRPVEYRWQSTRLLNDLALGSVRYLKGEKVSRATRFGAAGTAGGPFLLNGIDDDSPWNGRLQAPRRELEDLARSLDAQDLPYDDETKWPGKLQARLQRIGWFLSHSAKLTPSGPWLDYVAKGLSDGWEWASGRSGSYLFREDNKARKGRAKLILSRLPGLRVLSVDLGLRTSAAAAVWHVVSKRELNAARDAADSMTEGDLYCLVRRGNRTQVFRRIGPSAWARLDRQFLIRLDGEQSAARPATNDEWNALQNLHAWLGVSRENKPDRLPPVDRLQQQAERLCRLGLRRLSDLALVAFLLSAKTRPIIGGRTVPLDDEGRIEAAQDALTIWHALASSEEFQDSQLRQLWRARVSDGPPLVGRLTKKQRQEVREALRPVAERLSGNAAVSDELASLWQQRSAEWGKRLRWLRDWVIPRFSKRTKGERVRLARKVGGLSLDRIATIRGVYQVMRAYASRPEPTNLRAGVERLEKAAAQKLRPEFGRRMLAKMERLRENRVKQIASRIVEAALGVGSEDRLHWDKGRKRPSATIADPRFAPCHAVVIENLENYRPDDKRTRRENRGLMNWAARAVHKYLVEGCELHGLYLRQVSPSYTSRQDSRTGSPGLRCNDIPVKELTNPEGWIGKLVARAEEAAKEGAASPRQKLLVTLAEAARSGELTSSAVRILAPGGQLFVAADSSSSAAQGIHADMNAAANIGLVSLLDPDWPAAWWRLPCKAATGEVDETKVGGSGAVPIGRTILDPSAEAGKGYVNAWSDPQEKAVSRREWVDTKAYWRGIEERVVEILLAWNRSGGRDRQEKVPF

SEQ ID NO: 1377 - protein, 1424 aa, unidentified
  REGION 1..1424: note = Cas Enzyme sequence
MNRIYQGRVSKVEIPNPSDQENPWQLLPNWPGALWQHHELFQDAVNYYTLGLAAMAAGLQPDSPKSKAALAWREQVRSAWVKARRKAANFPGPHSRIARLLSVNSQECDSRKAFDLCAKALLKSSPATEEALAKALLQMLDEVDQSDLNQFCVSRLPWLCTAHGKLDATPKNVAQQQETQMLAIVREIHEASITQIAAIATRLELGWFVTQMPKEAMTGAEAHAEAERLFKSASAKVKDLSAIAERFAECHNRLGDKLVLPRLGRKPKGAYPLAVVFKLLPVPETWEAFKSVTGSFHKKALKLKGLSAEIGADFIAEARTKSGQPVFDYFTNRAFFREPDNNDRAVWFDFDLAAFIEAIKAPHRYFQDALTREKAAEGLRKQKLGMEGDGSGVDDDHEEGEEGTGAFGFKGDERIALLRELVSDALGYVAESENPGDAPERIEYTIQERTLRGFEELKEQWQKLAGKGQATEAKLLEVLAEQQTRHRDDFGSATLYRELAKPKNHSIWLADGTEKWHAPDPLKAWRAYKELCFELADKERLIHFTPAHPENSPRYFIVPKQGRFGSNHQSGQLAFTCGMILTTARGYEATEVRITYSAPRLRRDELRRAGKEDLESVPWLQPMIKALGLPENDAQDFANCRVTLQPRKLKPQNDSEGEDHYNIQLTFPVEVNLEKLIAGIGKAERWNRQFNLHPDGDIFYNASLRWPHEKQPAKAPEAWYGKGERFRCIATDLGQRDAGAFARLITSCDDDFGKKPSRLIGEINGKPWRAALEQSGLFRLSGEDAQIWREISERDKLNPDDSGKQFDFRQELWGERGRPAHAWETDDTADLMRQLEAIEKDADGNEKFVLLPDGWNKKPTELTFPEQNDKLLIAMRRYQSRIARLHRWCWFLKSEDKQQKSAWEDISECDDTRLVSAEQRARAPKRDPRVPEELQSQLRARLKLAPKLLERIAHRVLPLRGRSWCWEKHPESNEQNTLHHLTQNGPPLDSKEKPVWLRGQRGLSLERIEQIEELRKRFQSLNQTLRREIGGKPPIRRDESVPDPCPDLLEKLDNLKDQRVNQTAHMILAAALGLQLAPPAKNKRNLRLEKDQHGTYRKILDRTDNWIGPADFIILEDLSRYRASQGRAPRENGRLMKWCHRAVRDKLKQLCEVFGLPVLETPAAYSSRFCSRSGVPGFRAEEVTAGFTQKGQWAWLAAKKDANGKPTEEAVLLRQLNAALVEAQSVLEHDWAEKKCPGLCPKRTLLVPISSGPMFVPIADNARDADIQPAIAQADVNAAINLALRAIADPRLWTIYPRLRTQRDKKDGSLTAREKRKFGEKNPPKLSVAVPTKPIIESADKPNFFADFAGLKQIAEGLTGENKSLDWLTKEWTEATLASDKTTPPLLHSKSFWGTVKAAQWRRIKEINAKRIAAWKDKLDPMPD

SEQ ID NO: 1378 - protein, 1424 aa, unidentified
  REGION 1..1424: note = Cas Enzyme sequence
MAETTTRAYTLKLKGDRIALWRNHVIFNRGVRAWGEWLLNLRGGLPASLADQNDLLTVDKTAVAQAIKERASAITPAAIRQEPKFEAATDKKVREEVAARKKRITDAVVAEEFLAARRSELRRILALSWLCPETPVQLVPQAATVATADDSDREQKVLDQFRRILKQKGVADVAGWMQDCDATLRAAIRSDAVWVDRTACFRAMPASVRPSELDAAKHLFRLFGSISDYFAATSASSGPAEPKDFANTCRDWVSSFWGGGEKANKAKIVAALSAVGRIKSTRVVGKRGAAAVAVIAGVLPQKPADDSVDAVARAIGWLSGRPSAARLAIDAIASSPRVTQKLWDRLVLACEKDCGRQKSKLAFEGSASTIASALEPHIAGLTGVPYASTGRELIGEYATMLAFAMRRVSQIHTKAKQAEAERQSFAPEQARLSLVPREARLWLDSYVEARTAASGAIDGYQLRRRALGGWTEVVSVWTGCDTSEDRVTAVRELQADLEKPGDIQLFEAVAADDAACVWRSENGKGDPSILTDYVRAAVADQNAVRFKVPAYRHPDPLRSPSFIGFGNSQWSIAYSAQTEIRDRKKHLERAAKSEKDAERARAILASDPVLQQVSLDLWGIDGMQTVEYRWQSTRLLNDLSLASTKDLKGKKVSRATRFGTAGTAGGPYLLNGIDDDSPWNGRLQAPRRELEDLARSLDAQDLPYDDETAWPAKLQSRLQRVRWFLSHSAKLTPSGPWLDYVEKGLADGWEWATGRSGSYLFREDNKDRKGRAKLILSRLPGLRVLSVDLGLRTSAAAAVWQVVSKRELKAAQDAADTVIEDDLHCFVQSGGRTQVFRRIGPSAWARLDRQFLIRLDGEQAAARPATGEEWEALQNLRAWLGCLGEDKPGRLPPVDRLQQQAERLCRLGLRRLSDLARVAFLLAAKTRPIMGGRVAPLDAEGQVGAAQDALAIWHSLASSEEFKDPQLRRLWQTHVSDGPPLADRLTKKQRQEVRDALRKAAERLRGNVAVSGELASVWQERSAEWAKRLRWLRDWVIPRFSKRTNGERVRLARKVGGLSLDRIATIRGVYQVLRAYASRPEPTNLRAGVERLENAAAQKLRPEFGRRMLAKMERLRENRVKQIASRLVEAALGVGSEAPLHRNGRKRPAFAIADPRFAPCHAVVIENLENYRPDDKRTRRENRGLMNWAARAVHKYLTEGCELHGLYLRQVSPSYTSRQDSRTGSPGLRCNDIPAKELVNPGGWIGKLVTRAEQAVQEGVASPRQKLLVTLAESARRGEIASPAVRIIAPGGQLFVAANASSPAARGIHADMNAAANIGLVALLDPDWSAAWWRLPCKTATGEVDETKVGGSAAVPVGKAILDPRAEAGKGYVNAWSDPQEKAVGRREWSDTKAYWRGIEERVVEILRIWNRNGGRAKGGKLPF

SEQ ID NO: 1379 - protein, 1425 aa, unidentified
  REGION 1..1425: note = Cas Enzyme sequence
VNRIYQGKVTKVEILDERDSQGETKWLELPAAEWHAALWRHHELFQDAVNYYTLCLAAMAAGVKGDSPQAKALGSWVAKVKENWTTASRRAQVFDGPGERLAKLLKLKAGETGFDKAAAHVLRTSRATGPQRLAALLQLLDEADKGDLNQVCVRRIAFLCPARPDSETRPTSEALASSQVVKRQEEVRRYHRMPRSEALEAASDLKLGLFLTQPPTQFLKGQDAAKELSKKFAQAAARHPELKKASAKFQKHLAICGGKLKIPAPGRKPSGLYPLAAVFKYFPCREALDAFLQATKTLAEGKDKIKAEDAIDDARVGDKPHFDYFTNLALVPGGDGGRETRAVWFEYDLAAFIEALKAPHRYYQDTLKREAAAEGLRRRIAAMDGRGCEASGDDEAGEPLPGFEGDERIRLLQIIVRDKLKWVAEAEGGDADPEEREYTIRGRTLRGFGEIKRRWRAAAEDGRAKENHLLDILAAEQTEHRDDFGSSALYRELAKPMFHPIWRDEGTQPWHAEDPLRAWLAYNDLKAELVDKEQPIRFTPAHPECSPRFFIFPKRSESKPKKGERIARKPGLLSRHEPGQLAFTAGIVSPTAGGLSPKVARIHYAAPRLCRDRIRTSGDSDLHEAPWVQPMMAALGLAESPERVNFANCRITLEPTSPSDIQLVFPLEVGAERIKKAIASAFSWERQFNMQPEGVGFCNASLRWPHEKQLSKAPSPWHKEVDEFRCIAVDLGQRNAGAYARICVRSGRNPGKRPSRAIGETGGRRWRAELERAGQFRLPGEDARIWREKSKLDARRPDDSGLEFDFREELWGDRGRPARDWEADDTAELMRLLEAPAEDERHSILDNGWRRELSFPEQNDKLLIAVRRFQSRIARLHRWCWMLRGDDRQKDIAWTEITECEDVRLVPAELRTAAKKRDPRVKEGLERQLRERIELAPDLLVRIANRVLPLRGRSWRWERHPSSTPRNTLHHLTQSGPPLDSGKRPVWLRGQRGLSLRRIEQIEELRKRFQSLNQSLRREVGGKAPIRRDEAVPDTCHDLLEKLANLKEQRINQTAHMILAEALGLRLAQPAPDKKALRQRQDQHGAYEKILDGQGRWLGVADFIVIENLSRYRASQGRAPRENSRLMKWCHRAVRDKLKQLCEVFGLPVVETPAAYSSRFCSRSGVPGFRAAEIAAGFTKDGQWRWIAAKKDEHGRPTGEAQRLAALDRQLAEAQIALEKSLVGERRPGPCPKRTLLVPSAGGGIFVPIVDAVKRSEMQPALAQADVNAAINLALRAVADPRIWEIHPRLRTMRAGIGQTGKGKGSANRTPGTDEMRLLTREKRRYGEKGPAIAVHRSDSAGKNDTAQPNFFADLAGLAGLAEKLSGESREHRWLRDEWTTADIQGEEGAPELVHGKSFWGCVKAAQWSRIQEINGRRLSKWRTK

SEQ ID NO: 1380 - protein, 1425 aa, unidentified
  REGION 1..1425: note = Cas Enzyme sequence
MNRIYQGKVTAVEILDGKDEQGKLKWKKLDDWQSTLWQHHEFFQDGVNYYTLALAAMAAGVEGDSEQAHALRGWAAKVKETWANASRKAETFAGPQARLALILKLERDKSDFEAASSRVLHSSRATPAQRSAALLQLLSDKGDLNQICVARLPWLATAAGKFTATSKAATSSQEAKRQQAVRNFSQWPDKEALNQSTTLDLGLFLTQPPKDFVEGEAGAKMLRDYFTKASKKFPALETVKVSFDKFVTSQTDVLKIPSPGRKPSGLYPVAAVFKFFPAPETLAAFRAATKSLAEAKDKELVSDAVADSRVADQPHFDYFTNLALVSGDGDDERDTRAVWFEFDLAAFIEAIKAPRRYFEDTMKREASADRFRQQITAMEGKGREASSTEEDSEPLPGFDSDERVRLLKIIVQDKLKWVAEAEGDASETGPKEYAIRERTVRGFSEIKRRWRNAVESSNATEKRLLEILAEEQTTHRDDFGSATLYQQLAKPEFHAIWRNEGTQPWHAEDPLTAWLQYKELQADLADKERAIRFTPAHPKYSPRFFIFPKKSEAQPKTANHHHTKPGLLSRHDPGQLSFTGGVILRTEHGLAPTIVRIHYAAPRICRDQLRSSGDTNLYEAPWLQPMMAALGLDKSPERVNFANCRITLQPTNESDIHLTFPIEVNSEKIKAGVSRETVWENQFNLYPDGENFYNASLRWPHEKQRAKPPLPWHEQLDSFRCIATDLGQRDAGAFARMSVLGGSDFDKRPSRFIGEAGGKKWRAALERSGLFRLPGEDAQVWREKSSKDEKNPEDSGKPFDFREELWGERGRPARSWEADDTAELMRLLEVPPDAKELSLLAEGWRSLLSFPEQNDKLLVAMRRYQSRIARLHRWCWFLKGDDKQQKSAWDEIADCEDTRLISGEQIAQAKKHDPRLQTELASQLQKRLELAPVLLVRIANRILPLCSRSWHWEKHPASKAQNTLHHLTQNGPKLDSKERPVWLRGQRGLSLERIEQVEELRKRFQSLNQTLRREVGGKPPIRRDESVPDPCRDLLDKLDNLKEQRVNQTAHMILAEALGLCLAPPPADKKTLRQQRDLHGTYEKITDKSGKWIGPVAFIIIEDLSRYRASQGRAPRENSRLMKWCHRAVRDKLKQLCEIFGIPVVETPAAYSSRFCSRSGIPGFRAEEIAPGFEKTAPWSWIKEKKDDRGQPTTEAAHIQELIQQMAEAQKIPTRSDKPLAKPRTLFAPLAGGPVFIPIVDSIPGAELAPKLVQADINAAINLALRAIADPRLWTIHPRLRTQREGGNKPGKAKNQKTQQTASGTPTEVKLLTREKRKFGELGKPLVIKRASSAKPDDTRQPNFFADLAGLNELAEQLAKKNPREYSWLTKEWTSAEISGGNTTPPLVHGKSFWGTVKAKQWDRIRAINSARLAAWRSKGDDVSM

SEQ ID NO: 1381 - protein, 1425 aa, unidentified
  REGION 1..1425: note = Cas Enzyme sequence
MNRIYQGKVTAVEIPEGKDEQGKPKWKKLDDWQSTLWQHHEFFQDGVNYYTLALAAMAAGVEGDSEQAHALRGWAAKVKETWANASRKAETFAGPQARLALILKLERDKSDFEAASSRVLHSSRATPAQRSAALLQLLSDKGDLNQICVARLPWLATAAGKFTATSKAAASSQESKRQQAVRNFFQWPDKEALNQSATLDLGLFLTQPPKDFVEGEAAAKMLRDYFTKASKKFPALETVKVSFDKFVASQTDALKIPSPGRKPSGLYPVAAVFKFFPALETLAAFRAATKSLAEAKDKELVSDAVADSRVADQPHFDYFTNLALVSGDGDDERDTRAVWFEFDLAAFIEAIKAPRRYFEDTMKREASADRFRQQIAATEGKGREASSTEEDSEPLPGFEGDERVRLLKIIVQDKLKWVAEAEGDASEAGPKEYAIRERTVRGFGEIKRRWRSAVESGNATEKRLLEILAEEQTAHRDDFGSATLYQQLAKPEFHPIWHNEGTQAWHAEDPLTAWLQYKELQADLADKERAIRFTPAHPKYSPRFFIFPKKSEAQPKTANRHPTKPGLLSRHDPGQLSFTGGVILRTEHGLAPTIVRIHYAAPRICRDQLRSSGDTNLYEAPWLQPMMAALGLDKSPERVNFANCRITLQPTNESDIQLTFPVEVNSEKIKAGVSREAVWENQFNLYPDGENFYNASLRWPHEKQRAKPPLPWHEQLNSFRCIATDLGQRDAGAFARMSVLGGSDFGKRPSRFIGEAGGKKWRAALERSGLFRLPGEDAQVWREKSGKDEKNPEDSGKPFDFREELWGERGRPARSWEADDTAELMRLLEVPPEAKELSLLSESWRSLLSFPEQNDKLLVAMRRYQSRIARLHRWCWFLKGDDKQQKSAWDEIADCEDTRLISGEQIAQAKKHDPRLQTELESQLQKRLELAPVLLVRIANRILPLRGRSWHWEKHPASKAQNTLHHLTQNGPKLDSKERPVWLRGQRGLSLERIEQVEELRKRFQSLNQTLRREVGGKPPIRRDESVPDPCRDLLDKLDNLKEQRVNQTAHMILAEALGLRLAPPPADKKTLRQQRDQHGTYEKIPDKSGKWIGPVDFIIIEDLSRYRASQGRAPRENSRLMKWCHRAVRDKLEQLREVFGIPLVETPAAYSSRFCSRSGVPGFRAEEIAPGFENESPWSWIKEKKDDHDQPTAEAAHIQELIQQMAEAQKIPTRSDKPLAMLRTLFAPLAGGPVFIPIVDSIPNAELAPKLVQADINAAINLALRAIADPRLWTIHPRLRSQREGGNKPGKAKMQKAKKEASDAPTEVKLLTREKRKFGESGKPLVIKHASSAKPDDTRQPNFFADLAGLNELAEQLAKKNPREYSWLTKEWTSAEISGENTTPPLVHGKSFWGTVKAKQWERIRAINSARLAAWHSKGDDVSM

SEQ ID NO: 1382 - protein, 1425 aa, unidentified
  REGION 1..1425: note = Cas Enzyme sequence
MTSSSPTQRAYTLRLKSAAQGDKSWAEKLWDTHEIVNKGARVFGDWLLTLRGGISHKLENLNDKETGEEGKKRRRILLALSWLSVESKDFAPEKYIVEKDGEDKHRTKEALEAILKSRNLEDEEVESWVNDCKDSLTSSIRDDAVWVNRSRAFDDAVRKIGDSLTREEIWDVLGRFFGKEEAYLAPRTIDEKNGKTKKEEPKDLAIKAGEWLSKRFGKGKGTDFCKLSKVYSEIAKWAEEAMKSEQRTLANLASALKEDSLQGILNLIKNSGSKSGTQKILEKIGEGEVSKENLAILKAKAEEKRNYCKEKIEEKIEEKGEREWSNRILESIEKSLDGKFTYLQEKGPARHREFAVMLDHAARRISAGHTWIKLAEARRREFEENSQKIKGVPENARQWLETYREDCSESSGAIDAYLIKEKAVQGWEVVVKAWKNCKTEEDRIAAAGAQQDKLEIDPFGDINLFRALASEDARCVWQVDGKPDANILLNYVAATKAEFDKRRFKVPAYRHPDPLLHPVFCDYGNSRWKIKFDVHEANRTGKKAKKNKKTIETADIHGLKMDLWTGSKIENVSLRWQSKLLEKDLAVKQLDGKEDGKRKVSRASRLGRVAAGAGWETPVSVSSVFTQDYWNGRLQASRKELSRIARRVETRGWDEKANSMKKNLKWFITFSPKLEPQGPWINYVDNSEDKRPFTFTSKGEPILDEVFSIENKNRKGRARLILSRLPGLRVLSMDLGHRHAAACAVWETLSSRQLEDACAEGGYDKPAPDAMYHHIKSNRGKRVIYRRIGADELSDDSIHPTPWARLERQFLIKLQGEERKARMATADEIWEVHELERALGRKTPLVDRLTKTGWGSDSGTPRQRQLLGELNQWGWEPDEAQENSEDDEITSRESLLVDKLMSRTVDTVRKGLRRHGNRARIAHFLVAREKAVPGGRMVTLDNEGRKEIIADALAFWYELANGGEWKDTQALEWWKIHIESELSVEELPDIAGTGIAPKERKRKKKELKEKLKPVAERLLTSGAKKLSDQWCERWKQDDKEWQKTLRWLRDWILPRGVRGKSELIRNVGGLSLDRLTTIQSLYQAQKAYFTRITPKGIQMDKDKPLTAGMNFGGHILNDLENMREQRVKQLASRIVEAALGVGRVKIPKKSKDPKRHYERVDAPCHAVVIENLTNYRPEETRTRRENRQLMTWCSGKVKKYLSESCSLHGLFLWEVPPSYTSRQDSRTGSPGIRCEEVSVEKFFKTPFRQREVARAEEKDSKNKASAYEQYLIDLKERWKSRGEETALLRIPRKGGEIFVSANSNSPASKGLQADLNAAANIGLKAITDPDWSGSWWYVPCSSKDFVPIKDKIGGSRAFENITTPMPNPDDAKEATGKKRSGKKEIINLWRNPACSPLERDEWERTAKYWNMVEYHVIKRLKRQMG

SEQ ID NO: 1383 - protein, 1425 aa, unidentified
  REGION 1..1425: note = Cas Enzyme sequence
MNRIYQGRVTRVEILNSKDQEPELLDNWEERLWRHHELFQDAVNYYTLALAAMTRGLAEDSTQAKAARAWREQVRNSWVQANRKGVSFPGPHTRLASLLGVKPNESEAAKAFDASAAALLENCRASTEVLAKALLQLLEEADQSDLNQFCVSRLPWLCTPHGQLDATPKNIVQQQETRMLAAVRSIHETSIDQLSAVAKELDLGCFVTQAPKERLTGQQARVEAERLFRAAGAKAKGLVDVADRFAGQLTKLGDTLALPCLGRKPKGAYPLAVVFKLLPVSETWEAFKTATASLKRKADKVKDTPSRIETDFIAEARTTADRPLFDYFTNRALFRDAGNKDRAVWFGFDLAAFIEAIKSPHRFFQDTLTREKEAEDLREQKLAMEGRGLKKDSEHEEEEEEGTFGFEGDKRIDLLREMVTNTLGFVAEAEDPGARGQTVAYTIQQRTLRGFEEIKERWCKLAVQGKAAEKALLEVLAKEQARHRDDFGSATLYRALAQPKYHPIWRDAGTEKWHAADPLKAWRAYTELCFELSDAERPIRFTPAHPEHSPRYFIIPKQGRFGSEHQSSRLAFTCGFVIKAGRRWEPKQVRVTYSAPRMRRDELRHNGQEDLEAVPWLQPMIKALELPETDQQDFANCRVTLQPERLRARRSGKPGQPVKSEDRYAIQLTFPVEVNTERLVSNLGKAAPWSRQFNQSPDGDNFRNASLRWPHEKQLAKPPVPWHEQCDSFQCLATDLGQRDAGAFARLAARCDGNPGRKASRFVGQIGNTRWVATLEQSGLLRLPGEDARVWRRLAERDRQDGEDPEQLFGFREELWGEQGRPARGWEADDTAELMRQLEATEKDRDGNETFTLFHQRDWREELSFPQQNDKLLVAMRRYQSRISRLHRWCWFLAGDGKQQDAGWSEIAGCEDARLVSAGLREQAAKRDPRVLEELRAELRHRLKAAPALVERIAQRVLPLRGRSWKWEPHPAATAANPLHRLTQDGPSLDSKDKPIWLRGQRGLSLERIEQVEELRKRFQSLNQLLRRKIGGPPPIRRDESVPDPCPDLLEKLENLKEQRVNQTAHMILAAALGLRLAPPAPDKQALRQEKDVHGAYEKACDKRGRWVGPVDFIVIEDLSRYRATQGRSPRENGRLMKWCHRAVRDKLCQLCEVFGLPVVETPAAYSSRFCSRSGVPGFRAQEVVAGFTGRGQWAWLAAKEESPGKPTAEAVLLQRLEGELTQAQKELESHWAGEKRLGAAPQRSLLVPASIGPIFVPVVDAAEEVDLQPAVVQADVNAAINLALRAIADPRLWSIYPRLRTQRDAKDGSPAAREKRKFGDRCPPKLSVAAAGKPIAETTRNPNFFADLAGLREVAGRLAKQDPGLKWLTAEWTAASLAGDAPTPPLLHSKSFWGTVKAAQWARIQEINGKRLAAWRDKLNVMPD

SEQ ID NO: 1384 - protein, 1425 aa, unidentified
  REGION 1..1425: note = Cas Enzyme sequence
MTRSSLTQRAYTLRLKSAAQGDKSWAEKLWDTHEIVNKGARAFGDWLLTLRGGISHKLENLNDKETGEEGKKRRRILLALSWLSVESKDFAPEKYIVEKDGEDKHRTKEALEAILKSRNLEDEEVGSWVNDCKDSLTSFIRDDAVWVNRSRAFDDAVRKIGDSLTREEIWDVLGRFFGKEEAYLAPRTMDEKNGKTKKEEPKDLAKKAGEWLSKRFGKGKGTDFCKLSKVYSEIAKWAEEAMKSEQRTLANLASALGVDNLQGILKLIKNSGRPSGAQKILEKIGEGEVSEENLVNLKAKAEEKRNYCKEKIEEKIEEKGEREWSNRILESIEETLDGKFTYLQEKGPARHWEFAVMLDHAARRISAGHTWIKLAEARRRNFEEDSQKINEVPENARQWLETYREDRSKSSGAIEGYLISKRAVTEWETVVKAWKNCKTEEDRIAAAGALQDNPEIDQFGDINLFRALASEDARCVWQVDGKPDANILLNYVAATKAEFDKRRFKVPAYRHPDPLLHPVFCDYGNSRWEIRFDVHEVNRTGKKAKQNKKTIETADVHGLKMDLWTGSKIENVSLRWQSKLLEKDLAVKQLDGKEDGKKEVSRASRLGRVAAGAGWETPVSASSVFAQKHWNGRLQASRKELSRIARRVKTRGWDEKANSMKKNLKWFITFSPKLKLQGPWISYVDNSEDKRPFTFTSKGEPILDEVFSIENKNRKGRARLILSRLPGLRVLSMDLGHRHAAACAVWETLSSRQLEDACAEGGYDKPAPDAMYHHIKSNRGKRVIYRRIGADELSDDSIHPTPWARLERQFLIKLQGEERKARMATADEIWEVHELERALGRKTPLVDRLTKSGWGSDSGTPRQRQLLGELNQWGWEPDEAQENSEDDEITSRESLLVDKLMSRTVDTVRKGLRRHGNRARIANFLVAREKTVPGGQMDTLNNEGRKEIIADALALWYELANGREWKDTEALDWWKIHIEPELSVEELPDIAGTGIAPKERKRKKKELKEKLKPVAERLLTSGAKNLSDQWCERWKQDDKEWQKTLRWLRDWILPRGVRGKSELIRNVGGLSLDRLTTIQSLYQAQKAYFTRITPKGIQMDKDKPLTAVMNFGGHILNDLENMREQRVKQLASRIVEAALGVGRVKIPKKSKDPKRHYERVDAPCHVVVIENLTNYRPEETRNRRENRQLMRWCSGKLKKYLSESCSLHGLFLREVSPRYTSRQDSRTGSPGIRCEEVSVEKFLKTPFRQREVVRAEEKDSKNKASVYEQYLIELKERWKSRSEETALLRIPRKGGEIFVSANSNSPASKGLQADLNAAANIGLKAITDPDWSGSWWYVPCSSKDFVPIKDKIGGSRAFENITTLMPNPDDAKEATGKKRSGKKEIINLWRNPACSPLERDEWERTAKYWNMVEYHVIKRLKRQMG

SEQ ID NO: 1385 - protein, 1425 aa, unidentified
  REGION 1..1425: note = Cas Enzyme sequence
MNRIYQGKVTAVEIPDGKDEQGKPKWKKLDGWQPSLWQHHELFQDAVNYYTLALAAMAAGVEGDSKQDHALRGWAAKVKETWSNASRKAETFAGPQARLALILKLEQDKSDFEAASSRVLHSSRATPAQRSAALMQLLSVKGDLNQICGERLPWLASAHGKCGATSKAASSSQEANRQQAVRQFHQWSEKEALAQSATLELGLFLTQPPKDFVEGADAAKILRDYFTKVSKKIPELNATASLFEKFVISQADTLKVPSLGRRPSGLYPLAAVFRFFPTPETLAAFRVATKSLAEAKDKELISDAVAESRVADQPHFDYFTNLALVSGDGDEERDTRAVWFVFDLAAFIEAIKAPRRYFEDTIKRESAADRFRQQIAAMEGKGREASSTEEDSEPLPGFEGDERIRLLKIIVQDKLKWVAEAEGDASEAGPKEYAIRERTVRGFGEIKRRWRSAVEAANATEKCLLEILAKEQTAHRDDFGSATLYQQLAKPEFHPIWRDDGTQPWHAEDPLTAWLQFKELQSDLADKERAIRFTPAHPKYSPRFFIFPKKSEAQPKTTNNRSLKPGLLSHHDPGQLSFTAGVILRTEHGLAPTVVRIHYAAPRICRDQLRSSGDTNLYEAPWLQPMMAALGLDKSPERVNFANCRITLQPTGVSDIQLTFPIEVNSEKIKAGVSREAVWENQFNLYPDGENFYNASLRWPHEKQRAKPPVPWHEQLDSFRCIATDLGQRDAGAFARLSVLGGSDFGKQPSRFIGEAGGKKWRSALERSGLFRLPGEDAKVWREQSEWDKKNPDDSGKQFDFREELWGERGRPARNWEADDTAELMRSLEVPPEDKERSLLSEGWRELLSFPEQNDKLLVAMRRYQSRIARLHRWCWFLKGDVKQQQTAWDEIADCEDTRLISAEQITQAKKHDPRVQTELESLLRKRLELAPVLLVRIANRILPLRGRSWHWEKHPTSKAENTLHHLTQNGPKLDSKERPVWLRGQRGLSLERIEQVEELRKRFQSLNQTQRREVGGKPRSRRDESVPDPCRDLLDKLDNLKEQRVNQTAHMILAEALGLRLAPPPADKKALRQQRDQHGSYEKIPDKSGKWIGPVDFIIIEDLSRYRASQGRAPRENSRLMKWCHRAVRDKLEQLREVFGIPLVETPAAYSSRFCSRSGVPGFRAEEIAPGFENESPWSWIKEKKDDHDQPTAEAAHIQELIQQMAEAQKIPTRSDKPLAKPRTLFAPLAGGPVFIPIVDSIPNAELAPKLVQADINAAINLALRAIADPRLWTIHPRLRSQREGGNKPGKAKKLKTKQAASDALTGVKLLTREKRKFGEAGKPLAIKRVSNAKPDDTRQPNFFADLAGLNELAEQLAEKNPREYSWLTKEWTSAEISGENSAPPLLHGKSFWGTVKAKQWERIRAINSARLAAWRDKSNQMPD

SEQ ID NO: 1386 - protein, 1425 aa, unidentified
  REGION 1..1425: note = Cas Enzyme sequence
MNRIYQGKVTAVEIPEGKDEQGKPKWKKLDDWQSTLWQHHEFFQDGVNYYTLALAAMAAGVEGDSEQAHALRGWAAKVKETWANASRKAETFAGPQARLALILKLERDKSDFEAASSRVLHSSRATPAQRSAALLQLLSDKGDLNQICVARLPWLATAAGKFTATSKAATSSQEAKRQQAVRNFSQWPDKEALNQSTTLDLGLFLTQPPKDFVEGEAGAKMLRDYFTKASKKFPALETVKVSFDKFVTSQTDVLKIPSPGRKPSGLYPVAAVFKFFPAPETLAAFRAATKSLAEAKDKELVSDAVADSRVADQPHFDYFTNLALVSGDGDDERDTRAVWFEFDLAAFIEAIKAPRRYFEDTMKREASADRFRQQITAMEGKGREASSTEEDSEPLPGFDSDERVRLLKIIVQDKLKWVAEAEGDASETGPKEYAIRERTVRGFSEIKRRWRNAVESSNATEKRLLEILAEEQTTHRDDFGSATLYQQLAKPEFHAIWRNEGTQPWHAEDPLTAWLQYKELQADLADKERAIRFTPAHPKYSPRFFIFPKKSEAQPKTANHHHTKPGLLSRHDPGQLSFTGGVILRTEHGLAPTIVRIHYAAPRICRDQLRSSGDTNLYEAPWLQPMMAALGLDKSPERVNFANCRITLQPTNESDIHLTFPIEVNSEKIKAGVSRETVWENQFNLYPDGENFYNASLRWPHEKQRAKPPLPWHEQLDSFRCIATDLGQRDAGAFARMSVLGGSDFDKRPSRFIGEAGGKKWRAALERSGLFRLPGEDAQVWREKSSKDEKNPEDSGKPFDFREELWGERGRPARSWEADDTAELMRLLEVPPDAKELSLLAEGWRSLLSFPEQNDKLLVAMRRYQSRIARLHRWCWFLKGDDKQQKSAWDEIADCEDTRLISGEQIAQAKKHDPRLQTELASQLQKRLELAPVLLVRIANRILPLCSRSWHWEKHPASKAQNTLHHLTQNGPKLDSKERPVWLRGQRGLSLERIEQVEELRKRFQSLNQTLRREVGGKPPIRRDESVPDPCRDLLDKLDNLKEQRVNQTAHMILAEALGLCLAPPPADKKTLRQQRDLHGTYEKITDKSGKWIGPVAFIIIEDLSRYRASQGRAPRENSRLMKWCHRAVRDKLKQLCEIFGIPVVETPAAYSSRFCSRSGIPGFRAEEIAPGFEKTAPWSWIKEKKDDRGQPTTEAAHIQELIQQMAEAQKIPTRSDKPLAKPRTLFAPLAGGPVFIPIVDSIPGAELAPKLVQADINAAINLALRAIADPRLWTIHPRLRTQREGGNKPGKAKNQKTQQTASGTPTEVKLLTREKRKFGELGKPLVIKRASSAKPDDTRQPNFFADLAGLNELAEQLAKKNPREYSWLTKEWTSAEISGGNTTPPLVHGKSFWGTVKAKQWDRIRAINSARLAAWRSKGDDVSM

SEQ ID NO: 1387 - protein, 1425 aa, unidentified
  REGION 1..1425: note = Cas Enzyme sequence
MNRIYQGKVTAVEIPEGKDEQGKPKWKKLDDWQSTLWQHHEFFQDGVNYYTLALAAMAAGVEGDSEQAHALRGWAAKVKETWANASRKAETFAGPQARLALILKLERDKSDFEAASSRVLHSSRATPAQRSAALLQLLSDKGDLNQICVARLPWLATAAGKFTATSKAAASSQESKRQQAVRNFFQWPDKEALNQSATLDLGLFLTQPPKDFVEGEAAAKMLRDYFTKASKKFPALETVKVSFDKFVASQTDALKIPSPGRKPSGLYPVAAVFKFFPALETLAAFRAATKSLAEAKDKELVSDAVADSRVADQPHFDYFTNLALVSGDGDDERDTRAVWFEFDLAAFIEAIKAPRRYFEDTMKREASADRFRQQIAATEGKGREASSTEEDSEPLPGFEGDERVRLLKIIVQDKLKWVAEAEGDASEAGPKEYAIRERTVRGFGEIKRRRRSAVESGNATEKRLLEILAEEQTAHRDDFGSATLYQQLAKPEFHPIWHNEGTQAWHAEDPLTAWLQYKELQADLADKERAIRFTPAHPKYSPRFFIFPKKSEAQPKTANRHPTKPGLLSRHDPGQLSFTGGVILRTEHGLAPTIVRIHYAAPRICRDQLRSSGDTNLYEAPWLQPMMAALGLDKSPERVNFANCRITLQPTNESDIQLTFPVEVNSEKIKAGVSREAVWENQFNLYPDGENFYNASLRWPHEKQRAKPPLPWHEQLNSFRCIATDLGQRDAGAFARMSVLGGSDFGKRPSRFIGEAGGKKWRAALERSGLFRLPGEDAQVWREKSGKDEKNPEDSGKPFDFREELWGERGRPARSWEADDTAELMRLLEVPPEAKELSLLSESWRSLLSFPEQNDKLLVAMRRYQSRIARLHRWCWFLKGDDKQQKSAWDEIADCEDTRLISGEQIAQAKKHDPRLQTELESQLQKRLELAPVLLVRIANRILPLRGRSWHWEKHPASKAQNTLHHLTQNGPKLDSKERPVWLRGQRGLSLERIEQVEELRKRFQSLNQTLRREVGGKPPIRRDESVPDPCRDLLDKLDNLKEQRVNQTAHMILAEALGLRLAPPPADKKTLRQQRDQHGTYEKIPDKSGKWIGPVDFIIIEDLSRYRASQGRAPRENSRLMKWCHRAVRDKLEQLREVFGIPLVETPAAYSSRFCSRSGVPGFRAEEIAPGFENESPWSWIKEKKDDHDQPTAEAAHIQELIQQMAEAQKIPTRSDKPLAMLRTLFAPLAGGPVFIPIVDSIPNAELAPKLVQADINAAINLALRAIADPRLWTIHPRLRSQREGGNKPGKAKMQKAKKEASDAPTEVKLLTREKRKFGESGKPLVIKHASSAKPDDTRQPNFFADLAGLNELAEQLAKKNPREYSWLTKEWTSAEISGENTTPPLVHGKSFWGTVKAKQWERIRAINSARLAAWHSKGDDVSM

SEQ ID NO: 1388 - protein, 1425 aa, unidentified
  REGION 1..1425: note = Cas Enzyme sequence
MTRSSLTQRAYTLRLKSAAQGDKSWAEKLWDTHEIVNKGARAFGDWLLTLRGGISHKLENLNDKETGEEGKKRRRILLALSWLSVESKDFAPEKYIVEKDGEDKHRTKEALEAILKSRNLEDEEVGSWVNDCKDSLTSFIRDDAVWVNRSRAFDDTVRKIGDSLTREEIWDVLGRFFGKEEAYLAPRTIDEKNGKTKKEEPKDLAKKAGEWLSKRFGKGKGTDFCKLSKVYSEIAKWAEEAMKSEQRTLANLASALKVDNLQGILKLIKNSGRPSGAQKILEKIGEGEVSEENLVNLKAKAEEKRNYCKEKIEEKIEEKGEREWSNRILESIEETLDGKFTYLQEKGPARHWEFAVMLDHAARRISAGHTWIKLAEARRRNFEEDSQKINEVPENARQWLETYREDRSKSSGAIEGYLISKRAVTEWETVVKAWKNCKTEEDRIAAAGALQDNPEIDQFGDINLFRALASEDARCVWQVDGKPDANILLNYVAATKAEFDKRRFKVPAYRHPDPLLHPVFCDYGNSRWEIRFDVHEVNRTGKKAKQNKKTIETADVHGLKMDLWTGSKIENVSLRWQSKLLEKDLAVKQLDGKEDGKKEVSRASRLGRVAAGAGWETPVSASSVFAQKHWNGRLQASRKELSRIARRVKTRGWDEKANSMKKNLKWFITFSPKLKLQGPWISYVDNSEDKRPFTFTSKGEPILDEVFSIENKNRKGRARLILSRLPGLRVLSMDLGHRHAAACAVWETLSSRQLEDACAEGGYDKPAPDAMYHHIKSNRGKRVIYRRIGADELSDDSIHPTPWARLERQFLIKLQGEERKARMATADEIWEVHELERALGRKTPLVDRLTKSGWGSDSGTPRQRQLLGELNQWGWEPDEAQENSEDDEITSRESLLVDKLMSRTVDTVRKGLRRHGNRARIANFLVAREKTVPGGQMDTLNNEGRKEIIADALALWYELANGREWKDTEALDWWKIHIEPELSVEELPDIAGTGIAPKERKRKKKELKEKLKPVAERLLTSGAKNLSDQWCERWKQDDKEWQKTLRWLRDWILPRGVRGKSELIRNVGGLSLDRLTTIQSLYQAQKAYFTRITPKGIQMDKDKPLTAVMNFGGHILNDLENMREQRVKQLASRIVEAALGVGRVKIPKKSKDPKRHYERVDAPCHAVVIENLTNYRPEETRTRRENRQLMTWCSGKVKKYLSESCSLHGLFLWEVPPSYTSRQDSRTGSPGIRCEEVSVEKFLKTPFWQRKVVRAEEKDSKNKASAYEQYLIELKERWKSRGEETALLRIPRKGGEIFVSANSNSPASKGLQADLNAAANIGLKAITDPDWSGSWWYVPCSSKDFVPIKDKIGGSRAFENITTPMPNPDDAKEATGKKRSGKKEIINLWRNPACSPLERDEWERTAKYWNMVEYHVIKRLKRQMG

SEQ ID NO: 1389 - protein, 1425 aa, unidentified
  REGION 1..1425: note = Cas Enzyme sequence
MPTLTRVYQGRVTKVEVRNAKALDETSQWSLLGFTPEKAARLETEREKLRPRTKQNTPEGNQARQRLAEINRKLNEPWQTALWQHHELFQDAVNYYLSAFAAMVGPNAPPGVREFRQAVIASWEKNAHSNGSLQMHVLGLALSGRPAWRAFEKRIFNMTGSRASAAQRAAAVEAIFLTATELADEMEDAGAALENKLRGKGRSLFPKLKLLCARSTGTTPDNVVLAQERLARRATKRVEQGGRLAWKDVYAFKTNADKRPWTREQAVERVQKAFDDLCAELVDRADEAKKREANRAQANQSAGRYQQGPTAADLEKLHSRFKKEAEEFAKFLASSAFKPPPDEPVRAGSGGYDMKAAMVLACEPNDRVFREVFLFFNRSRLEAPASTTGTETDPVYEARNAGGSECRVFPFFCDLWAGRLDDPSVELGVWADFEKQAFIEVCNKIGQFIITTRRFELRLDKANKKIAETKTLLKHEKRLTKVKELVEELGGARVDANGLPKPYTVRDRTLKAWPKVRQDWRGILKDAAEKVSAEALVAAMNRLQTKFRERFGSAALFDLLAQEQYRIIWNDEDEADPLRTWSGYAEALDEKEHLEKERVFTPAHPKDSPRYFRWSETENKTHWAWEGGDKPFYVTVDALDFKTKRKTTFRISFRAPRLLRDRLRKPQEKLDHNNPDTDWLPPALRPVCEKYGFKVDPQCFERVAVRLAPTSKTNIQLVFEPEIVTDALARHWRARFPFEAYSTKTDDGEWIRRGLKWPKTKEGIHALAKQPVLGLMVDLGINNAAAYHVLQMAVDQQAGSRNGLSHEVGPANNRSRFVVRSIESGLVRVMGEDRWIWREITAKEKSRLQAETQKDASERDGFCRKFSAENPGIDLVEASHAFLPELSGSAGRNAQENPNETVQAVEIFKALQSDINIRIPQWQERLSFPEQNDELLRALKYVRSQLFRLNRWTEQLLTGAPENKQKAALENIRNLKEHDPLYALSKQVGNVGQLRKLLADFAQSRTNLLKEFLPVVANRILPSRRGTWMWHKRSDGWHEMVLDEKQPRPDALLAGQRGLSMARLLQLRDLRQLAQSLNHLCRHHPGERRHVIAERDTVPEPFEGCRQALEDAREDRAKQIAHDILALAVGVKLTAPPPDKKELKESESLHGVYRCLERGPVNFIALEDLSEYGTSGMQARRENRQLAAWSHRRINKILTELCEPIGLRIGSRIDLPIVYVRADLTSRFSAKDHSAGFRAEEISKDDPRRMFWERQVAEDANCGWAEVLRLLDKLSKRETILIPRKGGPVFVSLAGFDPDSPNSGLFHADLNAAYRIGLRAFADRDRRELFGTVMLLAPSKNGESKERQHLIDVAGVLPRSARRPDFRHKVVVRSEGVWDRVDSNLAWEHCDKINRARFRKWRVDLREDARGTKVSPPNEEDNIPM

SEQ ID NO: 1390 - protein, 1425 aa, unidentified
  REGION 1..1425: note = Cas Enzyme sequence
MNRIYQGKVTAVEIPEGKDEQGKPKWKKLDDWQSTLWQHHEFFQDGVNYYTLALAAIAAGVEGDSEQAHALRGWAAKVKETWANASRKAETFAGPQARLALILKLERDKSDFEAASSRVLHSSRATPAQRSAALLQLLSDKGDLNQICVARLPWLATAAGKFTATSKAAASSQESKRQQAVRNFFQWPDKEALNQSATLDLGLFLTQPPKDFVEGEAAAKMLRDYFTKASKKFPALETVKVSFDKFVASQTDALKIPSPGRKPSGLYPVAAVFKFFPALETLAAFRAATKSLAEAKDKELVSDAVADSRVADQPHFDYFTNLALVSGDGDDERDTRAVWFEFDLAAFIEAIKAPRRYFEDTMKREASADRFRQQIAATEGKGREASSTEEDSEPLPGFEGDERVRLLKIIVQDKLKWVAEAEGDASEAGPKEYAIRERTVRGFGEIKRRWRSAVESGNATEKRLLEILAEEQTAHRDDFGSATLYQQLAKPEFHPIWHNEGTQAWHAEDPLTAWLQYKELQADLADKERAIRFTPAHPKYSPRFFIFPKKSEAQPKTANRHPTKPGLLSRHDPGQLSFTGGVILRTEHGLAPTIVRIHYAAPRICRDQLRSSGDTNLYEAPWLQPMMAALGLDKSPERVNFANCRITLQPTNESDIQLTFPVEVNSEKIKAGVSREAVWENQFNLYPDGENFYNASLRWPHEKQRAKPPLPWHEQLNSFRCIATDLGQRDAGAFARMSVLGGSDFGKRPSRFIGEAGGKKWRAALERSGLFRLPGEDAQVWREKSGKDEKNPEDSGKPFDFREELWGERGRPARSWEADDTAELMRLLEVPPEAKELSLLSESWRSLLSFPEQNDKLLVAMRRYQSRIARLHRWCWFLKGDDKQQKSAWDEIADCEDTRLISGEQIAQAKKHDPRLQTELESQLQKRLELAPVLLVRIANRILPLRGRSWHWEKHPASKAQNTLHHLTQNGPKLDSKERPVWLRGQRGLSLERIEQVEELRKRFQSLNQTLRREVGGKPPIRRDESVPDPCRDLLDKLDNLKEQRVNQTAHMILAEALGLRLAPPPADKKTLRQQRDQHGTYEKIPDKSGKWIGPVDFIIIEDLSRYRASQGRAPRENSRLMKWCHRAVRDKLEQLREVFGIPLVETPAAYSSRFCSRSGVPGFRAEEIAPGFENESPWSWIKEKKDDHDQPTAEAAHIQELIQQMAEAQKIPTRSDKPLAMLRTLFAPLAGGPVFIPIVDSIPNAELAPKLVQADINAAINLALRAIADPRLWTIHPRLRSQREGGNKPGKAKMQKAKKEASDAPTEVKLLTREKRKFGESGKPLVIKHASSAKPDDTRQPNFFADLAGLNELAEQLAKKNPREYSWLTKEWTSAEISGENTTPPLVHGKSFWGTVKAKQWERIRAINSARLAAWHSKGDDVSM

SEQ ID NO: 1391 - protein, 1425 aa, unidentified
  REGION 1..1425: note = Cas Enzyme sequence
MNRIYQGRVSNVEIPTGNKDEPWQPLDDWQSALWQHHELFQDAVNYYTLALAAMAAGVEGDSKQSHALREWAARVKETWQSANRKSQTFAGPQARLGLILKLSADKCGFEQAATSVLRSSRATAGQRAAALLQLLHEADKGDLNKVCGERIAFLCPANPHQKKRPTSKAVSSVQEQKRQQEIRKFHQMSQTEALKNAGSLGLNYFLTQPSSEVLEGADAVKELRQKFSKAAAKFVVLKSVSAGFEEFLTDHSLTLKIPPTGRKPSGLYPFAAVFKFYPCEESLRAFLLATKTLADAKDKAAIADVIADARVGDQPHFEFFTNLALVPGDNGERDTRAVWFEFDLAAFVEAIKAPHRYFQDTIKREDAADRLSKQIDAMKRKGRESSGTDDESDFVPGFEDDNRITLLKTLVQEKLKWIAEAEGDADKEYAIRERTVRGFSDIKRRWLAAAEAGNATEENLLDILAKEQAAHRDDFGSATLYCELAKPEFHPIWRERGSQPWHADDPLAAWLEYKELQAELADKQRAIRFTPAHAKISPRYFIIPKQGRFGSDHEAGQLSLTTGVIIRSERGLVPTTARIHYTAPRLCRDQIRSSGDSNLEEAPWLQPMMAALGLDKSPDRVNFANCRVTLQPANEKDIQLTFPVEVNAAKIETLLGYRSKWDYRISGKNKQMNFAQFNYSASEPRSETSLRWPSDIAFAKEAGTPRKSEPVPWHEKLDDFRCAATDLGQRDAGAFARLFIGSSSELSKRPSRFIGATGSKQWRAVLERSGLFRLPGEDAQVWREISELDRQKADDSGKPFDFREELWGERGRPARSWEADETAELMRKLEVPPEDMELSLLNDGWRDLLSFPEQNDKLLVAMRRYQSRIARLHRWCFFLKGDDKQQKTAWGEIAECEDMRLVSGEQRAQAKKCDPRLQSELESQLSERLKRAPVFLVSIANRILPLRGRSWLWEKHPAGTEENTLHHLTQHGPSLDSKDKPVWLRGQRGLSLERIEQIEELRKRFQSLNQTLRRQVGGKPPIRRDESVPDPCRDLLDKLDNLKEQRVNQTAHMILAEALGLRLAPPPTNKDELRLQRDQHGVYEKILDKSGKWIGPVDFIIIEDLSRYRASQGRAPRENSRLMKWCHRAVRDKLKQLCEVFGLPILETPAAYSSRFCSRSGVPGFRASEIAPGFENDVPWSWIKEKKDDNNKPTVEAGHVLELIQQMKDAQNIPTASGKPLSKPRTLFAPLAGGPVFIPVVDSANGVELTPALAQADINAAINLALRAVANPKLWPIHPRLRSQRESGEKASKGKKAKAKQETPKTNTEPKLLTREKRKFGEAGKSLIVQRASAAKADDTRQPNLFADFAGLDSIADKLATKNPRDFGWLKKEWISAEITGEANTPRLLHGKSFWGTVKAVQWKRIKEINEARIATWKEKANPMP

SEQ ID NO: 1392 - protein, 1425 aa, unidentified
  REGION 1..1425: note = Cas Enzyme sequence
MNRIYQGRVTRVEILNSKDQEPELLDNWEERLWRHHELFQDAVNYYTLALAAMTRGLAEDSTQAKAARAWREQVRNSWVQANRKGVSFPGPHTRLASLLGVKPNESEAAKAFDASAAALLENCRASTEVLAKALLQLLEEADQSDLNQFCVSRLPWLCTPHGQLDATPKNIVQQQETRMLAAVRSIHETSIDQLSAVAKELDLGCFVTQAPKERLTGQQARVEAERLFRAAGAKAKGLVDVADRFAGQLTKLGDTLALPCLGRKPKGAYPLAVVFKLLPVSETWEAFKTATASLKRKADKVKDTPSRIETDFIAEARTTADRPLFDYFTNRALFRDAGNKDRAVWFGFDLAAFIEAIKSPHRFFQDTLTREKEAEDLREQKLAMEGRGLKKDSEHEEEEEEGTFGFEGDKRIDLLREMVTNTLGFVAEAEDPGARGQTVAYTIQQRTLRGFEEIKERWCKLAVQGKAAEKALLEVLAKEQARHRDDFGSATLYRALAQPKYHPIWRDAGTEKWHAADPLKAWRAYTELCFELSDAERPIRFTPAHPEHSPRYFIIPKQGRFGSEHQSSRLAFTCGFVIKAGRRWEPKQVRVTYSAPRMRRDELRHNGQEDLEAVPWLQPMIKALELPETDQQDFANCRVTLQPERLRARRSGKPGQPVKSEDRYAIQLTFPVEVNTERLVSNLGKAAPWSRQFNQSPDGDNFRNASLRWPHEKQLAKPPVPWHEQCDSFQCLATDLGQRDAGAFARLAARCDGNPGRKASRFVGQIGNTRWVATLEQSGLLRLPGEDARVWRRLAERDRQDGEDPEQLFGFREELWGEQGRPARGWEADDTAELMRQLEATEKDRDGNETFTLFHQRDWREELSFPQQNDKLLVAMRRYQSRISRLHRWCWFLAGDGKQQDAGWSEIAGCEDARLVSAGLREQAAKRDPRVLEELRAELRHRLKAAPALVERIAQRVLPLRGRSWKWEPHPAATAANPLHRLTQDGPSLDSKDKPIWLRGQRGLSLERIEQVEELRKRFQSLNQLLRRKIGGPPPIRRDESVPDPCPDLLEKLENLKEQRVNQTAHMILAAALGLRLAPPAPDKQALRQEKDVHGAYEKACDKRGRWVGPVDFIVIEDLSRYRATQGRSPRENGRLMEWCHRAVRDKLCQLCEVFGLPVVETPAAYSSRFCSRSGVPGFRAQEVVAGFTGRGQWAWLAAKEESPGKPTAEAVLLQRLEGELTQAQKELESHWAGEKRLGAAPQRSLLVPASIGPIFVPVVDAAEEVDLQPAVVQADVNAAINLALRAIADPRLWSIYPRLRTQRDAKDGSPAAREKRKFGDRCPPKLSVAAAGKPIAETTRNPNFFADLAGLREVAGRLAKQDPGLKWLTAEWTAASLAGDAPTPPLLHSKSFWGTVKAAQWARIQEINGKRLAAWRDKLNVMPD

SEQ ID NO: 1393 - protein, 1426 aa, unidentified
  REGION 1..1426: note = Cas Enzyme sequence
MNRIYQGKVTAVEIPEGKDEQGKPKWKKLNDWQSALWRHHECFQDGVNYYTLALAAMAGGVEGDSEQAHALSGWAAKVKETWSRASRKAETFAGPQARLALILKLEREKSDFEAASIRVLHSSRATPAQRSAALMELLSAKGDLNVICGERLPWLASAHGKCGATPKAASSSQEAKRQQAVRRFHHWSEKEALAQAATLDLGLFLTQPPHGFVEDADAAKILRDYFAQACKRFAELKATACMFDKFVTSQAGRLRIPSLGRRPSGLYPLAAVFRFFPTPETLAAFRVATKSLVDAKDKELMSDAVAESRVADQPHFDYFTNLAFVSGDGGEERDTRAVWFMFDLAAFIEAIKAPRRYFEDTIKREAAAERFRQQLAAMECKGHEATSTDEDSEALPGFEGDERVRLLKILVQDKLKWVAEAEGGSGEADSKEYAIRERTVRGFSEIKRRWRAAIEAGNAPEERLLEILGEEQTAHRYDFGSATLYRQLAKPEFHPIWRDGGTEPWHAEDPLTAWLQYKEIESDLADKERAIRFTPAHPKYSPRFFIFPKKPEKGPKTPSKKPPKPGLHSHHDPGQLSFTAGLVLRTEHGLAPRIVRIHYAAPRICRDQLRSSGDTNLYEAPWLQPMMAALGLDKSPDRVNFANCRITLQPASESDIQLAFPVEVNSEKIKATVSREALWENQFNLYPDGEKQFYNSSLRWPQEMQRTKPPAPWHEQLDSFRCIATDLGQRDAGAFARLSVLGGSDFGKQPSRFIGEAAGKKWRAALERSGLFRLPGEDAQVWREKSDKDDENPADSGKPFDFREELWGERGRPARDWEADDTAELMRLLEVPLEDKNVSLLSEGWRSLLSFPEQNDKLGVAMSGYQSRIARLHRWCWFLKGDDKQQQTAWNEIGECEDPRLISAEQIVQAKNRDPRLQTELESQLRKRLELAPVLLVRIANRILPLRGRSWRWEKHPISNAEITLHHLTQNGPKLDSKDHPVWLRGQRGLSLERIEQVEKLRRRFQSLNQTLRREVGGKAPIRRDETVPDPCRDLLDKLDNLKEQRVNQTAHMILAEALGLRLAPPSADKKVLRQQRDQHGAYEKILDKSGKWIGPADFIIIEDLSRYRASQGRAPRENSRLMKWCHRAVRDKLKQLGEVFGIPIVETPAAYSSRFCSRSGVPGFRAEEIAPGFENESPWSWIKEKKDDHGQPTAEAMHIQELVQQMAEAQRIPTRSGKLLAKPRTLFAPLAGGPVFVPIVDSIPNAELAPKLVQADINAAINLALRAIADPRLWAIQPRLRSQREGGKKPGTAKKEKVKQGTADAPTEAKLLTREKRKFGEGGKPLVIHRAAGAKPDDTRQPNFFADLAGLKVLAEQLALNNPREYSWLRKEWTSAEISGESSNPPLVHSKSFWGTVKAKQWERIQAINAARLAAWRDKSNPMAD

SEQ ID NO: 1394 - protein, 1426 aa, unidentified
  REGION 1..1426: note = Cas Enzyme sequence
DFKVACGKDSDAARIEKVISALQKILTRRGVKGDDLESWKQHCEPSISAKIRDDAVWVNRSEIFDHAQKQVGPSLTRDEVWDLLEPFFGSRESYLTPITAADDSDDAAGEEDKAKDLVQKAGQWLSSRFGTGGGADFSRMSKVYNAMVAWAARASSFASGENALHSLAESLVEFSPKANDGEGILKLIGGPGYKSATRNIITKWQSQSASVFAADVIKLKESAAGDAKKCNSNTGGKGRRPYSDKILEKVQSVCGFTYLQAGGPARHSEFAVMLDHAARRVSIGHTWIKRAESERQKFKTDSEKIEKVPADIRAWLNHFCEERSKISGAIDGYGIRRRAIGRWKETVDRWDKSDCKTVEDRIVAAREVQANPDIDAKPGDNQLFEALAAEDAIVVWRVNGNATPQPLLDYAAATDALAKQKRFKVPAYRHPDPLSHPVFCDFGNSRWEIRFAVHDAASKLTEANATSARRKKELAKAQERVAKAKTPEKQTEAESKLNQAEHGLSIARDRVAWLAQRHALSMELWDGGKLGTDIPLRWSCKRLTENMNLKNPARNEKAIDVTRGDRLGRAAAGADEKSLVNILGVFGQADWNGRLQAPRSELDAIAKRVNQNGWDVKAKAMRDRISWLVSFSAKLQQAGPWFDYSAKFPEDADAKPFVSRRGEYAIKHADNDKRAGQAKLILSRLPSLRELSIDLGHRFAAAGVVWETLSHAQLLKEIEGREIIAGGTSDDDLYLHTHHIDAKTGKPRTTIYRRIGASALPDGKPHPAPWARLDRQFLIKLPGEEKPARRASDAEIVSVRHLEDEVGRKRTDDDALPLRVDELMSEAARTIRLGLRRLGDAARIAYAFMPGTEQHTPGGGKKPHTPETRKIAVLEALIRWYELRGDGPSSRWIDPIALRDWDAHIGSKLFANLPVFAQDASSHDRKKYRAELEKALEAIAGEFSSHGELGTPGLFKLWQERWEKDSAAWALRLKWLRKWLLPRGLRSRRSDSTEMADARKARRGTARNVGGLSLDRIATIRELYQVQKAYHYRPHPNDPRAGAKLVEDESAKGRKFGDRALQAMERMREQRVKQLASRIVAGALGLGGHWKQVDTRRKKPDGTKRMKSVWVEESTPKYDPCHAIAIEDLTNYRPEEMQTRRENRQLMVWSSSKVKKYLSEACQLHGLHLRQIQPGYTSKQDSRTGAPGCRCVDAPINVQNGTVDAYRWSKTLSAAEKKVAEGSKDAESNFLLNVANHLRDLKTDGRSLPSSVRIPRKGGDLFVAAPTWHQFRRMNNSDIASLAKKSTQADLNAAANIGLKALMDPDWPGKWWFVPCESATNRPHPDKTKGSLALKHEAALTRTTQLPSEQANVKQGNKSGRSKSPKKQREIVNLWRDISASPVDSASDWKSTAEYWNDVRARVVAMFQRTINSGEYLSVESTEAPW

SEQ ID NO: 1395 - protein, 1427 aa, unidentified
  REGION 1..1427: note = Cas Enzyme sequence
MNRIYQGRVSYVEILDGKDEQGKAKWKKLDSWQSVLWQHHELFQDAVNYYTLALAALAEGVSADTAQSAAVLAWRNEVRKNWCDGRRRALRYDGPHRRLAPLLGVNASISDEQAAFDGSVRAILKPNGSSPTQRAAALIQLLEEANKNKNNLIRVCRDRIVPLCSLPGKCDATPKDTVAQQIRNMLPAVQQLHNHIGSDWNKVASKFDPGWFITRMPDKLLQGRHALKEALKRFEMVCEDEPSLKEHAQSFEEALRQQGDALSVHTPGRKVKGPYSLAVVFKLWPCAATAEALKRATLHLLNETPPELASDPIFAARVNDAPLFDYFTNWVFERTAGDENQAAWKEFDIAAFLEAIKAPHRYFQDTQKREAAADLLREQIAAMERQGSRSSEDDAEVGANFGFAEDHRIELLRELVTDPIRGLAYLADAEVGGAAEYTIQERTLRGWNAIRNRWRTLAEKNETSPEKLWAVVATEQAAHRDDFGSAMLYKKLAEPRYHPIWRDKGMQDWHADDPLRAWLQYTDLKFELEDKTRPIRFTPAHAVHSPRYFIFPKKSAAGGRWGSEHETGALAFTAGIAVRDGVKWRPQMVLVHYSAPRLNRDALRRPDEQTLDSAQWLQPMMKALDLPEPARQNFGNCRITLQPFSPDNIQLTFPVEVDPAQILSFIGKKNTWSRQFNVTPDGDNFRDSTLRWPHEKKPSKPPVPWHDATDSFHCLSIDLGQREAGAYALLDVRANHDFDKRPSRFIGETPGKKWHAALAASGLLRLSGEDRAEWRAKTSKDADDGESFDFREELHGRRGRIPREFETEECRALLDAFLGADDPKSFMIAGWEDSQSPAHLSFPEQNDKLLIAARRAQSRVARLHRWCWFLSDDKTRTVALAEIRESLNTPNDDAAHWLAPSLRDFVSTDNDPRLTTELAKLLEARLKELPDLLVRLANRVLPMRGCSWSWEPHPEATNDNRVFLLTQNGPSLDTKERPVWLRGQRGLSMERIGQIEDLRKRFQSLNQTLRRDIGGKPPIRRDESVPDPCPDLLEKLDNLKKQRVNQTAHMILAEALGVRLTKPPANKAVLKADRDQHGVYEKTLDKNGKCRGPVDFIVIEDLSRYRASQGRAPRENSRLMKWCHRAVRDKLRELCEPFGIPVLETPAAYSSRFCSRTGVAGFRAVEVTAGFENDPPWGWIKDKKSDGKLTQEAEFTLQTADKLHAAQKELEAQWQRKHPGERAHRLTLLLPQAGGPIFVPVVDSVDGLKLKPAVVQADINAAISLGLRAISDPRLWDIYPRLRTERLSGALRKRGGERKAVESTTGTDDSIRLRAREKRKFGENGPPLDIGTPPKGSALEDTGNPNYFFDIAKVAAWDKATVSDPLTNESITLSSGKAFWRAVRDIQWRRCNEINAARLRKWNVALPVSEKTRPPITGTDPTDDIPF

SEQ ID NO: 1396 - protein, 1427 aa, unidentified
  REGION 1..1427: note = Cas Enzyme sequence
MPKPLVTRRAYTLRLRGAGPNNDRSWRDALWQTHEAVNKGAKVFGDWLLTLRGGLDHSLADTNNPTGEERKAPRILLALSWLSVESKLGAPADLIIASGTEAAVDRNRKVIAALEEILASRNLSKDEIDEWRKDCTASLSAAIRDDAVWVNRSKAFDEACGKEDKQKARTDAQTVLWFLLTNDYLALPKPEKASATTGLDDEKGETGDDSSGELVVKAGKGAGQRTRHLFSHIFGRASTRHFGNANTLNLRVHWKGYLNAQIVETTGIPLSDPNAEAEINDPPPSPTELHREMFSKAAARLAQIWTKQKQQELKRAQSAAADRELRELEDNQEYAEALELLDTLCRERGQSTGSLEEYRINPRAIEGWDRVVAAWENISETPTNQAAEKRVEQAKRLQNDDADKKFGDITLFVMLAESFYEPVWWHKGQANPSILRTFVKGWRARTDAVRLKVAAFRHPDPYFHPVFCQFGVSRPPIKYNRLKGDPQDDVREVRMRLLTAGQANDVTLLAVSRHFDKEIGSAAASNDNESKRISAVTRLSRFGIAAVTGAGKSATYRVAHVFDEQKVRSRINKKTDYDSAANEAGDDEAQGEKQKKPSWNGTLQADRQQLKAIGRMELSSPKKAEQAKGRLRWWLIVSLELQKKGPWYDFIMNSVDKTAFTSTYKSGKNKGTDYLRQSGWPHEKANDTRQGHARLILSRLPGLRVLSVDLGHRYAAACAVWEAVTAEQVKQACQTAGHEEPRESDLYLHLKKKVTKQNEGNKVEVEETTIYRRIGADTLPDGAPHPAPWARLDRQFLIKLQGEEEGAREASNEEIWKVHQLEAELGRRTPLIDSLVASQWGATNRQAARLAALGKLGWKRAATNVEMPFRPSLAVDELMSSAVRTMRLALKRHADRARIAHYLITGEKTNPGGVKEKLDENGRIELLQDALIIWRDLCTSPGWCDCAAMKLWDRRITKLSGYQAPEVIGEDASSEERRTKRSQNREKLRDVAKALADDVNLRKDLHNDWKNQWNGDDARWKKQLRGLKDWLLPRGKGGPAIRKAGGLSLTRLATLTEFRRKVQVGFFTRLQPDGTKAETKEQFGQSALDALEHLREQRVKQLASRIAEAALGIGRMRRPMGGKDPKRPVERVDEPCHAVVIEDLTRYRPEETRTRRENRQLMTWSSSKVKKYLAEACELHGLHLREVPAGYTSRQDSRTGAPGIRCQDVPVVEFMRSPFWTKQVAQAARQAGNEGDARARFLGRLNEMWEPKSEADRKKAGLVRIPLRGGEIFVSADPNSPAAKGLQADLNAAANIGLRALTDPDWPGKWWYVPCEPENFQPLRNKVNGSAVVSPRHVLPQPAQAQGGGAGAKKKRGKRGAGESQQAVNLWRDISASPLECAECGEWKEYAAYQNEVQRRVVRILEEEMKGRGKQPHDGFEEDDIPF

SEQ ID NO: 1397 - protein, 1427 aa, unidentified
  REGION 1..1427: note = Cas Enzyme sequence
MNRIYQGRVTKVEIIGKDGRPQLFDPDPKKDREKWQQALWQHHQLFQDAVNYYSLALAALAEGLTDTHPLKALRKRMSDAWEHFPRKTVSPARNLRESVGRWLALPESAPLAEALEKIVPSDPRHKEARSLAIALLAQKARTLKPQKCANSYWGRFCDKLKKAPNWDYSAGELSRLGAAGDWITALWQDDAHVQIDHLAKSLKLSSLVKCDPAAPELDDNEGRALLTDAFSHLKGIVAGTLKDSKPAKRTNAWLRKNKSLAEEFISQSETKLAAVSRDCLMVESARGGGININKTHGAALLKAFPCGFTLEYLRAAIPRPKTPKKTAKKEESVPDAWVLLEKRIKEIGDDPIKLSRLDGKPIFKAFTALDAWLVKEEQPCWPDFDKCAFEEALKTLNQFVQKTEERENRRHEVEAELKYMLAENPDWKPKKESDEADDREVPILKGDPRYEKLRQLLKELDEELAEKAIGEIVGPSGPSLRGFGRLREAWMDEFTKSKGQPRETKLTDAVRDLQREHKLDMGYTTFFLRLCEPDYWDLWRDDTEDEAKERRSRKWAKSVIYAAAAARELSEELERLREPVRYTPAEPEFSRRLFMFSDIKDTHAPAHRESGVVDVSVASQDENGKLRPLRLRLRYSAPRLTRDHLSDGSESKWLQPMMAALGIPADSLAGFTKDRNGDPKEPAIALMPDFVGRKRQRVILVNFPVDLDPALLLTKINKAALWEKQFNQSFENGKLKQRFHLYWPKMENEPEQPWWANPDVQTNGFTCLAVDLSQRRAADFALLHAGMNRDAKTFVELGQAGGKPWFAKLSAAGSLRLPGEDAEVFHNGEKDIELSGKKGRNATDAEYDAAVALAKTLLHNEDEAGLLETALNWLGSTAEELSFPEQNDKLIDLYHGALSRYRTWHRWSWRFTLEHQTDWEKTVGEVLKMHYHRAWFDLAQKGIGPATILQLQKQIAEATTQLRTVLETSLLAIAHRALPLRDHTWRWIEHGKDGKGKPLHLLISDGTAPVEFPWLRGQRGLSLARIQQLETLRSAVLSLNRLLRHEIGVKPEFGRRTLGESLPDPCPELTDKIVRMKEERVNQTAHLIIAQALGVRLKTPSLSDEERVKADVHGEYEVIPGRSPVDFIVLEDLSRYTTDRSRSTSENSRLMKWCHRAINEKVKLLAEPFGIAVLEVFASYSSKFDGRTGAPGFRAVEVTATDRRFWKKTIEKQPVARAVFDSLDKLPAKGLTKARLLLPQNGGPLFVAAVREDQPVPPIRQADINAAVNIGLRAIAGPHCYHAQPRVRLIKAKSGPDKGKWITRRDNKRESVQFTDAVEVTFSHLAPDSDVLKGEATNLFHDPLEIASYGFARISGQQHPPLAHAAAIVSRKKGANGEAHGAVARLEWEVCRRINFERLKQWGFDRTSLAVPTKSVNPADEDDNMPM

SEQ ID NO: 1398 - protein, 1427 aa, unidentified
  REGION 1..1427: note = Cas Enzyme sequence
MTQHAYTLKLRSLYEQRSTNDEKTIVLKAKDAKHLWQTHLLINRGAQVFGDWLLTMRGGLSPSLADELIMEGKGTNKRNREPTEQEKADRHILLALSWLSVESYEGAPDKYVIASAVDDKDKRSKALITALEKVLKRQKITTNDINIWRRDCEDVFSSAIRDDAVWVNRADAFNDLSAEINWDYNDASSLLFHFIKQKDYFNLESKDNDKNNTIKDKESFGQVARGWLSANWGKGKKSDFSEIINKLQKIVNYDFNSLYKKSGYKIISVITQHLTTKKDSDNKETFKKLCKYIGWQGRSSKGRLALEKLYNKKSVTKKDIVYLNEKLQQEIKEKKSKNRVIPKWVAKIQKYLEEKINIKYQPLDMSRNLIGEFGVMFDHALRHVSVAHSWIKNAEINRRRFHEDAQKIDNVTKDAKEWLNEYTHEKQEFTGALGKYIINPRAIDGWKDILKGWKGCSNYEERVEVINTIQTNKNDADKHFGDANLFKRLAKDDTRAVWINNDNKFDETILKNYVDAKKASYDMQRFKVPAYRHPHPLLHPVYCDYGNSRLNVKYDAFDIINYVLNNKKIKGAEKVINKLSISLWDGTSFQNIPFFWGGKRFKTDLALDNINNLYSSNKHLSLKNSIETTKADRFGRSLVTADSIRLEIYNKGEWNARLQVDRRLLENINKKLKASNINCYSDIFSIKTSNAMKIQQLVYKLPWFLTTSPELQSAHTLKLGPWADYINSCKDKSPFLRNNKISYIGWPHYNKNKKRNKKGSMILSHLPNLRVLSVDLGHRYGATCVVWETISNKDIINLCKKHNVNQPKVDTIYHVIKTDKKIKIHFRRIAGNTLPDGLPHPASWARLERQFMIKLQGEDRSSRKIFNNEKQIAKQVAEFCGNLHDEKAFFNNNKNIEQLMSATVSILLDGIRRHNDIAKIAYYLSPERGRNPGDESLKKGLENALQLWHQLWNSKHYKHEFAKETWDKYIISFFSNKERQELTSIGDNKNKTCRKKQKAIFKNIAQKLSADDRMMMYKAWDNYWHERDGHGDKGKTKLCRQCIRLVRDWIMPRRDSDYVFSKQFRNVGGLSLTRINTFKKLYRVIKAYAGRPEPENIKINIAEKGDTSSKGMGDRILKAMENMRDTRIKQLASRIVEAALGLGKEQGKKDKNTKDISRPRENIFKPCHALIIENLKNYRPDELQTRRENRQLMTWSSHRIFDFLKDECDLFGIHLRTVSPSYTSRQDSRTGAPGIRCTDIPLTNFLKENSYWQQQVKKADEKKLKDDYSSFIVNAYSILIKKYGHTPPKDKWIRLPRRGGEIFVTADNNSPIAKGIHADINAAANIGLRALLDPDWAGSWWYVPCNKDGTPKSTEIKGSTIFKEINKLPLQGDIGGKGDIVNLWSDVSSSNLENKVWKYSTNYKSNVRKRVIERLMQQSILKKDQND

SEQ ID NO: 1399 - protein, 1428 aa, unidentified
  REGION 1..1428: note = Cas Enzyme sequence
MNRIYQGKVTAVEIPDGNDEHGKPKWKKLDAGESALWQHHELFQDAVNYYTLALAAMAAGVDGDSEQAHALRGWAAKVKETWSNANRKAETFAGPQARLALILKLEQDKSDFEAASSRVLQSSRATLAQRSAALMQLLSVKGDLNVICGERLPWLASAHGKCGATSKAASSSQEAKRQRTIRQFHQCSEKEALAQAATLDLDLFLTQPPKDFVKGADAAKILRDYFTKASQKSELKAMASMFEKFITSQTDTLKVPSLGRRPSGLYPLAAVFRFFPTPETLAAFRIATKSLAEGKDKELVSDAVAESRVADQPHFNYFTNLALVSGNGDDERDTRAVWFEFDLAAFIEAIKAPRRYFADTIKRESAADRFRQQLAAMDGKGREASSAEEESEPLRGFEGDERIRLLKIIVQDKLKWIAEAEGDASVVGTKEYTIRERTVRGFSEIKRHWRSAVESGNGTEKRLLEILATEQTDHRDDFGSAPLYRELAKPEFHPIWRDDGTQPWHAEDPLTAWLQYKELQSDLADKERAIRFTPAHPKYSPRFFIFPKKSEAQPKGTKNRSPKAGLLSHHDPGQLSFTAGVILRTEHGLGPTVVRIYYAAPRICRDQLRSSGDVNLYEAPWLQPMMVALGLDKSPDRVNFANCRITLQATDEADIQLTFPIEVNIEKIKAGVSREAVWKNQFNLYPDGENFYNSSLRWPHEKQRAKPPVPWHEQLNSFRCIATDLGQRDAGAFARLSVLGGSDFGKQPSRFIGEAGGKKWRAALERSGLFRLPGEDAQVWREKSGKDDENPEDSGKPFDFREELWGESGRPARGWESDDTAELMRQLEVPPEDKERSLLSEGWRELLSFPEQNGKLLVAMRRYQSRIARLHRWCWFLKGDDKQKQTACDEIAECEDTRLISAEQIAQAKKHDPRLQTELESQLKKRLELAPGLLVRIANRVLPLRGRSWHWERHPASKAENTLHHLTQNGPKLGTKERPVWLRGQRGLSLERIEQVEELRKRFQSLNQTLRREVGGKPPIRRDESVPDPCHDLLDKLDNLKEQRVNQTAHMILAEALGLRLASPPADKKALRQQRDQHGTYEKIHDKAGNWIGPVDFIVIEDLKAYRTSQGRGRRENWRLMQWCIGHMRDKLKLLCEVFGLAVLETPPADSSRFCSRSGVPGFRAEEVTSGFTQREWAWLAGKKDEQGNPKPEAQRLLDLDLELSKAQAELENNWKEKKRPQPCPKRTLLVPTRGGPVFVPVVDKVEGADIPPAVVQADINAAINLALRAIADPRLWAIHPRLRSQREGGDKSGKAKKQKTKQEVSGTPTENRLLTREKRKFGEAGKPLTIKRASDAKPDDTRQPNFFADLAGLKELAEQVVKKNQREYSWLTKEWTSAEISGETSTPPLVQSKSFWGTVKAKQWERIQAINTARLAAWHDKLNPMPD

SEQ ID NO: 1400 - protein, 1428 aa, unidentified
  REGION 1..1428: note = Cas Enzyme sequence
MNRIYQGRVSKVEILKSGTKGKAAEYEAMDPDTKAARAAGEKLLWEHHQLFQDAVNYYITALASLGSSPESPLTRLQGLLVKVWDSADKKGQRRSGMRDSLQRAWQLPEPPTLDQAIVRFRQPLLDDGVLLNAAETAGHYLLHKLGGDAAIQQGGRDFLPMFCDPGFTGTFKLSALRRGRANDEARLQTELHRELTDSEIRNLPDTISLASVVNLQPDVAADTGEAAAARLREAAKSFPDEVPERVLTEWLAALPEDFALPRRRGGNINLKRVDACSLFLAFPNQTTKRLFQSTYKAPKAHPQAAANRDDQSEGDDRFIVEGEDPIKLARGTRGVVFSAFTALPLWGKSGSGLAWKEFDIAAFKEALKVYNQFNQNVTKRAEKLDGLATKLLVMDGERAMEAYTAATDSNLLNLLQRVWAETKGKPVMPKADGGEEQATVRFAGDARIDRLRTIINDDLAEEYRLTEGRKTPYGLRRRTMKGWADVKRKWQSKVKAGMKFSPEIRDELQRELDALRGGEKREQIGSHKLFSGLLADEAAWSIWREPEKELADKIVDKEWAADPLEAFRQYCELRETLEEVSARPLNFTPADAAHSRRLFMFTDACSFGSDGGEYKHDLKALAVTVPVARKGNDGRYMMQNCRLSYSAPRLLRDRIRAADGVYVQDWAQPMMRALFGAGDEKINPQTLKDAAVQLMPDWDKDGACRMLLNFPLRLDEAAVTKLIGKAALWEKQFVTWKKGAQLPFLRWDGEFDGKEPHKWWEKTAGFTVLAADLGTRHTASMALVECTREKTATSRSLGQAGGCEWFGRFHSGKILQLPGEDADVLRRPSPAEEQQTGLEFRQECYGDRGRMANAAECEETLAMMAALGESKMLADVADAAALRKRFSFPEQNDKLLVAVRRAQKWIADCISWHWKLTQPESLEQATAALAVLREQKRVPEWSSLADGPDANTAMLREALHSHVINQRLLVRDNLLKLTGRILPLRGRDWEFVANKDWDRCWVLQQTARGSAPLNRKLMGQRGLSMARIEQVSELRRRWQSLNQSLRRVPGEKPPTAAEMRNDSIPDPCPDILRKLENLREQRVNQTANLILAQALGLKLTAPQTSKEARKRTDTHGEYKVARPPVDFIVLEDLSRYLSDQGRAKSENSRLMKWCHRQITDKVKMLAEPFGIPVLETPPAYSSRFCSLTGMAGFRAVEVSWADRADFRWRVRLEEISKAKLEGRALDAVQTAVNDLFWQLETISRSAHPCRTLLAPQPGGPMFVTAKPIRHPAPSKSKNAGGRPRLGGGDVLPQQADLNAAINLALRAVAHPSCAGIHHRLRTERKKAVRGETDTFTVKESRRFGKEKPAVEVKPGDYMPKERNPNLFYDPHGAAEFGRARIADDDHKGYPYASGPGIWKTANDREKQWARCHAINRQRLLDWDDDHLP

SEQ ID NO: 1401 - protein, 1428 aa, unidentified
  REGION 1..1428: note = Cas Enzyme sequence
MADIATTTRAYTLKLSGEDNWRDALWNTHCTVNRGVRVWGDWLLTLRGGLPASLADDDPDRRVVLALSWLSVESPASFVPKEHIVAKGTEPTEERREKVTERFQEILKRLDIQDSKEWITACEPALTARIRDDAVWIDRSAVFLQFTQDYAGLSQGWAAETLLSLLGGIQDYFKIPDTEAAASTEAKDFVIKAGNWLSKHWGAGEKSDAGAIGNNLSKLASVNGADVCGKPGSDAIAVLLAAVSGSGAIETDTAKRFKKLKQAVGWKGRPSKGAMALQRLLDAAEVTSELWNTIGEKLREEAADQKKKAGGSTQIPAWIADFRSNVEEQIGLPFRVQRDNIWEFAVMLDHALRRISAGHTWIKRAEAQRRKFQDDAAKICDVPTHACGWLDRYCHERSGATGAVEGYLIRKRAIEGWEKIVRLWSRKDCKSQQDRIDKARELQADPEINKFGDIQLFEALADDKSVCVWQNEKDKPDPAILKNYVDARVAENDQRRFKVPAYRHPDPLRHPVFIDFGNSRWSITYSALKAVKDRQNLHKKLAKAKTEKTREKLQKQLVQPPDLHGVTLSLWTGEVIEPQPMRWHGKRLRKDLDFNHFEETGTDVSRADRLGRSIAGEPKAAVNIAEVFKQNDWNGRLQIPRVELDRLADLVYGKNTDPDESKLDRFDEKARRLCAHLNWFLSFSAKLQPAGPWLDYAQSLPAGWEYKKGRNGYYLAIEANKNRKGRARLKLARLPGLRVLSVDLGHRYAAACTVWESLATETFCAEIKQGQIVSGGTGPDDLYAHVRRVGNDGKQRTTIYRRIGANVLPDGKPHPAPWARLDRQFLIKLQGEDRTARRARSEEFQVFQDLCESLGKKTEQPREELDLHNVTTIYPRIDELMRDTVNVARLGLRRHGNSARIAYALTSCEKPISGGRTINMNREQRIESLQDALVLWQELASSTDFRDEWARKMWSEWIIEKFGGPQPAEIDKDVTRSERKKKIEESRKPLKVVAKQLVDRDNSDLHKIWADEWMRRTQQFQQMLRRLRKMILPRIGKRPPGDSPKCTPWKEKSKELRNVGGLSYTRLATIRGLYQVMRAFHMRPAPDNLRAGIERIEREAEAGNRFGLRILKTLDCLRENRVKQLASRIVEAALGVGSEDRKHWERGRKRPRSRIDNPRFAPCHAVIVEDLEHYRPDEKRPRRENRQLMAWAARNVRKYLMEGCELCGLHFDEVDPRYTSRQDSRTGLPGFRCGDVQIVEFMRQGGFFQSDVKRARKRLDKGGNDSRDRLLVELFERFSDFDEETLHATKPLRILRTGGEIFVSANEESNPATAIQADLNAAANIGLKALLDPDWVGAWWYVPVKADDGKPIAEKLKGSAAFDVDRALSKAQTTSEKKGIVNLWSDPSPDDLKVRDWKPYMEYWNRVRWRVIQSLRLYNGLENRDANC

SEQ ID NO: 1402 - protein, 1429 aa, unidentified
  REGION 1..1429: note = Cas Enzyme sequence
MNRIYQGRVSTAQRPNPEKTSGKAIAWIDLDSDPKRARLLAETQLWEHHVLFQDAVNYYIVAIAALGVSPESRLSKLQELIAKVWENADRKGHHREGMGESLRRTWQLQALPTLAEAFKRFREPLLKDGIPLTTAEKAGEFLLFNLGGEGAIQQGGRVFLPMFCDVEDESTYWLSKARRDRADSEEMLKIELHRDLNSEAIEALSKAITLGSVVNLQPGTEADHGIAVIARLREAADTFPDEVSQEQFECWLNSLPTNFSLPRSRGGNINKRRVHACILFLAFPNQSTKKLLQSTFPPPRPTRTKKGETPEANHSPQVEEAQFIVDGDDPIWLSRGTRGWVFQGYTALPLWNTSDGKLQWKAFDIAAFKEALKVYNQFQQNLTKRNEKLDALATKLLVMDAEAAMDGYASNTDLDHSLHSRLSRIWTESKGKPKVRLAEYAEKASTTCFIDDPRIDRLKKIINSDLAEEYRLTDGRNTPYGLRRRTMKGWSDVRKQWLTVVHHGTPFSLETRQKLKEMLDAIRSGEKREHIGSHRLFEALINDEEAWSIWREPDDRQMEQIHRQGWATDPLESFREYCETRETLEEVSARPLNFTPADARFSKRLFNFTDTCSFGNDRGEFKHDPKELAVIVPVAIRDEKGLLSMQARRLLYSAPRLLRDHIRAEDGHYKQEWTQPMMQALLGKTAAIPKQKDLKEAAVQLMPDFDETGTRRILLNFPLALDSAHIQGHLKKAELWNKQFQSWKNGDQLPFLRWPSEFDGKESHHWWEETKSFRVLAADLGTHHAASVALIEATQVKHPDSRFIGETSNQSWFARFLTGKVLRLPGEDVQVFRKASPLDGDKQGTTFREELYGAKGRMSSETECRHTIELLNALDQSSLLFDANSTETLKRQFSFPEQNDKILVALRRTQNWIATCVSWHWKLTQPDSDAQREVAISQIAEQDRKPEWKALATTRGESIGLLRDLLRDHITHQRQLVMTRLLETTQRILPLKGRTWTWQVHPEKPDCHLLSCTTKSNTSAKTLLTGQRGLSIARIEQLSELRRRWQSLNQALRRELGQRPLSAAEMRNDPIPDPCPDILRKLENLREQRVNQTAHLIIAQALGLKLKMPELSQDVRRKVDMHGEYEVGRIPADMIVLEDLSRYLSDQGRAKSENTRLMKWCHRAITEKVKLLAEPFGIPVLETPAAYSSRFCSLTGMAGFRATEVSWKDRHKFRWKALLKEEEESRAKAKVPSAMAQYAAGLFKDLRKIAESPMPTRTLLAPQTGGPIFVTAKPVAHPAPAKTRRSGTGAAVLPMQADINAAINLALRAIAHPACADLHHRLRTERKVAAKTKQEIYSTREIRRFSTEPATVEVKQGHSLPKERNSNLFFDPYNVAAFGRSRLSCDKANEYPYAAGPGLWKVVNNPEFQWCRCLEINRQRLTENEDIPW

SEQ ID NO: 1403 - protein, 1430 aa, unidentified
  REGION 1..1430: note = Cas Enzyme sequence
MNRIYQGRVTKVEIPDGKDAQGKPLDLDVLWHHHELFQDAVNYYIVCLLALAGGLCAKQRELRDKMTTKPEKGNEEPLQVWERFRRRGAWRRGLRDSVAPYLCPGKADASPVECFYAVLAGNESAGTEVGRKLLDRGLRQLLDRCRGSSGCRNAAPEFLPRFCDPATKCNFVEEATTLRRKTDKSKLPFVLHDSAVQAHSPSLDAFDVHSIALPNEKKPKFVGHDAVKKLRRMLKEWRERQPASEVDWARLETIIEKLPADLELPGYAPTSAKNEVKFRLFAMFFFRHVERSEFTLALLRATTPKPKATERPPEPQAVVAGEGDPIRLARGRRGFVFRAFTSLASWGGDNSGTPHWVQFDFAAFEEALKTLHQVDDKAREREDERNQKQAQHEYQRDTTKKWKGGATGEEEQRPPVLAGDPRIERLEELLRSDLAEEYAMSEGLEVQYGLHPRTIRGFREIRKKWNEAMEPGQSYNAVAREQLWKLLTDYKRENSETIGSPVLFDALVEEANWIIWREPDAATLSEWRKAAGLAEGAEFCTDPLQALTDERVLLADIERLHDPIRLTPADPVHSRRQFYFSDVSDLTKMNRLCHDKNYLDAEIADKENGKWIARWVRIRFGAPRMLRDQLKSDEEGKESAWQQAMMAALGLKAGLVKKAKGKLRPATFAECAAVALMPEVTASGERRILLNFPLTLEDDAVARQLGKAARWDANQFGPNFKNSSWLRWPSTPDVNARSRPWWESSEPFRCLSVDLGQRDAGAFALLEVTTGTAPKPQSRKLGDARGKTWWATVRATGILRLPGEDAKVFRDGNPEPQEELSGERGRNLVAGEWQEARDICTALGFQPDKLLGTDDLRYSFPELNDRLLYALRRAQARLARLQSWSCVAFKEPDEKKRTAFEKRRTRIKEQIAEAVALLAEDQIGQELPERRAWLHEVKPLLEKEAWTLIAQRIIREIESERAAIQRELVRIADRIQPLRERRWEWVPRPNDTKNHILQPTRRGTDERVKLLAGQRGLSMKRIEQLESLRQRCQSLNRALRQEPGKPANLGRGKRGIELPDPCPELLDRLDALKEQRVNQTAHLILAQALGVRLRPHTTNAAEREKHDIHGEYERIPGREPVDFVVIENLKYYEMSQGRARSENARLMKWCRRHLRDKLIQLCEPYGLRVLEEWPADTSKFCSLTGAAGFRAVELTPEDAMEFRWKKHLDRLADPERLKNLNQDERGEGERVKALFGALEKLNADLLKNRPARPKWHTLLVPSRGGPIFVPMRGKPFQADINAAINLGLRAIAAPDNQEIHLRIRSERKGGKFFVRAQNLREKARWNADKHEITPPNGKSLAGLLAESSPYFYADTGSIAEFDHAEISGQRGFASSRGIWGTIKQKDWLQVGKLNNDRLEKAGLGRLLEEEDDVTPSLVGVASPHSLKSGK

SEQ ID NO: 1404 - protein, 1430 aa, unidentified
  REGION 1..1430: note = Cas Enzyme sequence
MAQQAQVPVTQRAYTLRLSRAPGECSVCDRNTCECWREGLWATHEAINKGAKVFGDWLLTLRGGLSHELADSQEVTGRDRRLLALSWLSVESRDGAPKEYIVEKDKTMETLRAILKKRKVGDEEIENWVKICKPSLNAPIREDAEWVNRSAVFDEVANDWNTAKARKDAHTLLSFILGDDFLTLPTPKKSKKATGQVDEEDEEQERQQAIKASSKGAGQKTRHLFSHLLGQGKPFGNSKGELLLRDGWRNHIKLELENSTGIPVVDSQKDKGKKEKTSGPAHTELQREMFSKAASRLAQIVTKQRQQEADRLARKEADKELREMESTSSDALAALGRYCDKYRVTAGAANEFRIRLRQITGWDGVLRRWASIEEQNPEHALEARKNAVKEAQDANEEKKFGDVNLFICLADDEFRAVWQQEGKPDPTILERFVKGMKARSDAERLKVATFRHPDPYDHPVFAQFGVSRPDIRFRRLKAFTDVPAGDDPRAVGMLLWHPERKSAKLTLMFGVSKRLDQEIGSACGNVLKGADRLPEVSRCGRFGTAAAGIQTADTPVRVAGVFDLKSVKSRLAGGKQGGEDGAGKLKEPKWNGTLSTNRFDLAKIGKLVKENVQKAQKAKCRSQLRWMLTVSIEMESRGPWFRYVAASQDQTPFVRTVRRDKPNGKINGYSERKDDKRIEVEGWPYQEFNKPLKENKDQTTLVEDRSAARGSKACLILSRLPGLRLLSVDLGHRFAAACAVWETLAKDTFEKECRDAETDGAKIFLGPEGCKPEEAVYVHVVWPEKESNAATNKARAEGREKFQPTTVYRRIGPDQIPGGTTHPAPWARLDRQFSIKLQGEDEGTRKASDNEIEAVHQLEIKVGRTDEEEGKARKVSRSVDELMLDAVRTMKIALRRHGDRARIAFAMTADHKSMPGGKKYYFDKAEDASKEDDKAARHDKHIEFLQDALSLWHDLFSSRGWKDDAAKTFWVQHIAALPEYPISKDRTGSKRKPECAELRAIAEALIKDTNHCRKLQEKWNQRWEADDGAPAKVDLKTGRKCKEGSGWYARLLWFQNWVMPSSRQGLKSIRHVGGLSLTRLAVLTEFRRKVQVGFFTRLHPDGTKTETREKFGQSTLDTLEHLRDQRVKQLSSRIIEAALGVGRIKFSKKGRASERPRSAVDDSCHAVVIESLTYYRPDELHTRRENRQLMQWSSAKVQKHLKEGCQLYGLHLREVSASYTSRQCSRTGLPGVRCDDVPTEKFLNASWWKEDIFLVDLADRLKNLQEDKKQLPPTVRVPREGGDLFVAAPPRNFVCGKAEADLDRATKRAVQADLNAAANIGLRALLDPDWPGRWWYVPCEGGTSKPELDRIKGSAVFKEVQILPTDGVTPSGSDTGQDRPKKKTREIENFWRDVSTADLTSSTWRSTRAYWDSVHSQIVELLRRRADLDS

SEQ ID NO: 1405 - protein, 1431 aa, unidentified
  REGION 1..1431: note = Cas Enzyme sequence
MTQRSPVSGGKKPEGQKSVFDSFTHKYALSKTLRFELVPVGKTIESMRTHLKYDEELQTFLKDQAIEDAYQLLKPIVDGYHEEFITDSLQSDIAKNINFALYVNLRLKLAEYNIALKQAKVAKTHTADLEKNLDQVEKNISDAENNFRADISTAFLWAGENWKNNKYPKPRYEWKKGTKIATGATVLASQCILDLVGDAHQDNEKVRVALKVFKGFFTYFSGFNQNRENYYTTKTEKATAVATRIVHENLPMFCDNVIIFESKKAEYVGTFEFLKSREKVLEMKDGIPLIPISGDIFKDTHFGACLSQKEIEEYNKLIGNANFLINLYNQERSKEDKFKRLTIFNTLYKQIGCGKKKPLFFALTHDNKSEADEMRAKDKEAFSVEEVLLLAKHAGEKYFRGRSEDDQLTTVADLIAYLKGKENFEGVYWSKAGLNSISNRYFAEWETLAKCLKDAKVFKKAPKGDEEEIKISEAIELQGFFEVIDATENWKQEGVFFRESITKEIEGGKSNKKNQQRRDIIAYSHKPSEALLGLIFLDIEEHAKDFLSNADEITSLASYKSEEEKVLIKGWMDTALSVTQILKYFQIRESKAKGAPMDTLLYGALKSLLRAEDAEWFKWYDALRNYLTKKPQDDAKENKLKLNFDAPSLLAGWDRDLENQRKSVILRSSQNYYLVVMDKNSGTLFTEDTLPQYSTGEECFEKMYFKQATSVFRQLPKIGFPYKKDKSKPMFDGDVNNFDTKPYEERCRKFGLDREIMEIKDAFDLYQGSKKKGDKFSVEKLKKLISYYKKIIEINYRDVFSVETILNKEYAELNDLYNDFESVAYELVFKPVSRKYIDGLVEEGKVYMFKIMSKDFSEKSTGNKNLHSIYFSSLFDDPKRTNQLGANAQIFYRKYAIKEKKVKAGYENKPWIIENKRFTENSLLTKEGNERGEEGKSFFFHCPLSINAASGIEGISDGKPNPKAIGLINDRVKETFSVDANACFLGIDRGEKHLAYYSLVDKNGKLLEQKTLNMPFVDKDGKPRAVKVMRKMKDGSEVEVECWDYNDLLEARAGDRDYARKNWQTIGTIANLKEGYVSQVVRTVADLAIQDNKPTYIVLEDLNTGFKRLRQKIEKSVYQKFEVALAKKLNFLVDKSAQIGEIGSVTRAIQLTPPVNNYGDIEKKKQAGIMLYTRPNYTSQTDPVTGWRKCIYLKKGSEESIKNQITGNTKKKDERNSPNFTEIAFDGKDYFFVYNDQSTGKEWKMYSGENGKSLARFHKERNSMRQWVAESQDIASVLNELFANFNKTKSLLEQMKSGVELSKPKNSKYTAWESLRFAIDLIQQIRNTGTTKRDDDFLVSPVRDENGVHFDTRVYWDKEQSGEKAEMPTCGDAVGAFNIARKGIIMNEHIKRELSLYVADTEWDAWLAGKEVWEKWLRENMKSLVFKKKQS

SEQ ID NO: 1406 - protein, 1431 aa, unidentified
  REGION 1..1431: note = Cas Enzyme sequence
MSISRTYQGRVSGAHFISGKTFVRIESLDEDTWKFHLNEHLSIYQDAINYYLVCFAACARGSKIESLVNLVSRVRDGWLTHEYRQAGKKSGFLVSLNRRVPLHFPPLMTFEDVSEILIEQNSSPEILNLALEALLTDLGGESSIQQGGRSYLPYFCSPGTKANFPRSPQLLERDQAKANLPIFLQTSESPEGICEKFDLQHFATLMKGQEPFTGTEIKKNLSEWLKHLVSEKLVTPDQQSLWQKEIDGMDEKGISLPRYHGASAKGVEKNRLYAFLLLKLLPPSAERLTVLKSTFPVPKADSGKSKALSKQQEEDAIREARLTSRKGDPIELARGERKYVFRSFSNLFCGASPNEGPIWTEFDIAAFKEALKTLNQIEQKTTERLADLAEFKSKIQFYLEKTGTAEDTEEPVTFHKDEQRLTLVAQLKEQLAKTLDDDFKSNGYRLRWATIKGWSSIRERFQKAVLKNPAITTENLIEKVVTAFQATTKNVGSVTLFRILAEPEFRAIWEEVPDNRITEWATNQWSQDLLTDVVKFDQLQNDHDDLERNLHIKLTPAHLQFSRRPIMLSDLGGASKVVHIERTQLREVNGKIEKIIIPSIITSIYWMNPATACYEERRIELTYSAPRLKRDSIAGNENRSLHQPLLQGLGFQLPELKTISEKSKPLAAALMPDWTGSSTRLRDPAPDRYLLNFPATLETDWIAEKVGALSRWKWQFNGPADEPLHLHWPETTKDKDSSNAWSNNKEIQEHGFTLAAYDLGIRTAAAYAIYHVVSSYEKVPANKRRFARFVGEAAGFKWYAYPHQRGTLRLPGEDQNELRPVSKEDRSIKRMREIYGKRGCPASPSETILFVRETESLTPYLADWLVDEIEVYRNPVETAYLKDQNELSLKVARQIQGYLRSSHRLLIDLREKGTLTDEDKKSIHSRHLALLNDHSSDPVAILIQHVHEIRKLLGKFLEFSANRILPLRQSIWKIEKQVPIKVTGEDQEPQDFIPFGLIELHLPIGTASQKIRGQGGLSLGRIEQIEDLRKRLLSYQREMNREIGKQMKIGFGRHSGSIPDAAPQMLRKLDELKDQRVKQTAHMILARSLNLRLKDDKKPREKREDYIHGEYEPIGQLPSNRPTVDFIVIEDLNRYRAEQGKSRAENRQLMQWSHRAIALTLRELAEPYGLSILATAASFSSKFCSITGRPGFRAEDVSQKRLYLINSWKKSSDSRRKSIAEQMITIFDKHPDKKELSFILPSQGGKMFVPGIAPHEMRDEFPIQQADLNASQNLALRAIASPSRLDLIHKIRAVSKSDKLTLRWDNLREKTYLDPKSEILPKVIGKPISKEVRSKKYSNFFFMGRGDEVQLPVKFDEAVCELPSGEKLQICSNYGLWTTFKDTIELENTIKINNSRLASLGLHDRLILSPVSISAVEDFHEEEDPEDDISM

SEQ ID NO: 1407 - protein, 1431 aa, unidentified
  REGION 1..1431: note = Cas Enzyme sequence
MPDTNFRVPTTQRAYTMRLQRTPGACQVCGQENCDCLERALWETHLLVNRGALVFGDRLLTLRGGLDHALAQQGAPSHVPNRRRLLALGWLSVEDEAGARRLHPEWIVTTGKETESERRRKVERAFREILRHRGLSDAEIEDWWNDCRSSLTAAIRDDAAVVNRDAAFTAAMSLLPGLTRNTFWEDFGDFFGQPNLYFGESRSTEGVLDATNETVTEDRAEPKDLVQQASKWLSRRFGKREGANFAALADIYEIIAQWCDEMLASDRTPASLDDLARHLDGDQEHRNVLQTILGRLSGPGYKSATRNWLKTISEKHRSLLDRVVLDRLATLCRKDRDNCRAKIGKKGRRPWSDKMLQQVESDCGGFTYHAEGSASRHKQFSVMLDHAARRVSGAISWIRNAEQRRQRSEEDARKRESLQAEAPEAVTWLDEYVARRSKDVGADGPEGYRIRKRALEGWKDLVQRWATLPRDDIEGRIRCVREMQQEQEEGKVGDKILFETLAQSDALVVWKRPDGVADWEILKRYVDATEAEWNQRRFKVPMYRHPDPLRHPVFVDYGESRWTIAFTCHTKKNDSRDLELELWDGRHLRKFRLRWASKRLARDLLSVADQEWSPDGEVPRTNRLGRATAEDSAPIHMSSLFEKKEWNGRLQAPRRLLLKAATESSSPSGGSAPPRNLHWSLTFSAPLQPAGPWIRYALASGLRWDKRGLNVHSLENKHRKGMARLSLCRLPGLRVLSVDLGHRFAAACAVWQTLSLEDFRKETDGREILAGGRGPENLFLHAREVGPDGRPRTRIYRRIAADQLGDSPHPAPWARLDRQFLIRLPGEDAESRKASPAETEQVRQWEDRLGRVRGPWDPLPTAVDALMREALDTARLGLRRHGLRARIAWAWTADVRLLPGGRQEALNEATRENLILEALVNWSHLVRERRWSDPWARDLWRREGLPSLDESAEGIDDAPSHRRRQEAELEDRLRPFAKRLAGFEADRLRLAKHWKDRWVEEDCSIWAGPSGVLRGLKDWIAPRGLRIRPEDDEETRVRKRQAQAACRRVGGLSLTRIGNVTDLYRLQKAFRTRPHPEDPRRNIPQRGEEELADFERRLLEMRDRLREQRVRQLCSRIIEAALGLGRHPKERPGQQTRRPTKRLDEPCHAIVIESLEHYRPEQTRTRRENRMLMQWSSAQAKKFLSEGAALHGLHLWEVQAAYTSRQDSRTGRPGLRCNLVTLRKFIESPWWRGRVHQAQRRLEQGNQGALDALMLTAEQACQEGRMDPETQMLLPAPGGEWFLAAPVPGDAASDRRGRPGVLQADLNAAANIGLRALTDPDWPGSWWYVPCTLDGTPAPERVKGSAAIPDGPLHACTETPGQQTGRKSSGPKKSKTSGDGEIRNLWRDPDPRPLNQTLWKTYQDYLQDVEARVARVLRAQFPMRDPPSSLD

SEQ ID NO: 1408 - protein, 1431 aa, unidentified
  REGION 1..1431: note = Cas Enzyme sequence
MNRIYQGRVTSVEIAGLDGSAKAEASKGKKPRQPQWEPLPDWSKALWQHHELFQDAVNYYTLALAAMAAEVEGEGGDAKALRGWVARVRETWSTATRKAETFDGPQQRLAPLLKLAPKEADFDTAARAVLRSSRATPAKRAAAVQQLLVEKGDLNQVCVALLPWLATAAGKLDATSKSAASSQEARRQEIVRQFHQWPEAEALKRADSLELGLFLTQPPKMWVKGQEAAKILRDYFAKACAKFSELKPVEAAFEDFLKEKESQLVVPSPGRRPSGLYPIAAVFRFFPTAKTLAAFREATKTLAEAKDKEVHTDAVAEARVGDQPHFDYFTNLAFLGSEGDDERDTRAVWFEFDLAAFIEAIKAPRRYFEDTLKREAAAGRLRQQIAAMEARGQETPTDQEEGEPLPGFEGDSRITLLRDIVQNKLAWLAEAQGDVDAGPREYEIRERTLRGFAEVKKRWRAEAEKGSLTEARLLEILAEEQAAHRDDFGSATLYRELAKPENHPIWRDPGTQPWHADDPLAAWLDYKELQADLRDKERPIRFTPAHPVHSPRFFIFPKKSEAQPKTPSRRPSKPGLLSRHDPGQLSFTGGIVLRTGGGWVPKVVRIHYAAPRLCRDRIRSVGDSNLYEAPWVQPMVEALGLDKAPDRVNFANCRITLQPASEHDIQLTFPVEVNTEKIRKAVAREAAWQGQFNLHPDGDSFYPASLRWPHEKKPAKAPEPWHAQVGQFRCLATDLGQRDAGAFARLRAACDGSLNQRPSRLIGETNGRPWRAALERSGLFRLPGEDAVVWREMSRLDANNPEDSGQPFDFREELWGERGRPARPWEADDTAELMRLLEAIEEDANGQERPTLLPEDWRRALTFPEQNDKLLVALRRYQSRVSRLHRWCWLLQGDDRQTATAVAEVAECDDLRLVSPELKRLVETGDPRALEELQSRLRDRLERAPRLLERIANRILPLRGRSWRWEKHPRATPENPLYHLTQGGERLDSAGRPVWLRGQRGLSLERIEQIEELRKRCQSLNQTLRRRIGGEPPLRRDESVPDACPDLLEKLDHLKEQRVNQTAHMILAEALGLRLAPPPPNKRALRSERDQHGVYEKILDPQGQWIGPVDFIVIEDLSRYRASQGRAPRENSRLMKWCHRAVRDKLKQLCEVFGLPVLETPAAYSSRFCSRSGVPGFRAVEATAGFTAQGQWAWLAAKKDDCGNPTEEARRLLDVDRELTQAQAELERDWAEQRGSGPCPKRTLLVPFSGGPIFVPISDKADGADLQPAVAQADINAAINLALRAIADPKLWSIHPRLRTQREAGDKPGKGRKPKAGPAGPQPASAARFLTREKRKFGETGKPLEVRWPSNAKPDDTRQPNFFADFAGLAALAEQLGQQNREHAWLAREWTTAEIPGERDTPPLVHGRSLWGCVKAAQWLRIREINAAKLA

SEQ ID NO: 1409 - protein, 1432 aa, unidentified
  REGION 1..1432: note = Cas Enzyme sequence
MNRIYQGRVSHAELIDDKGSLLPALPNWNGTDTLWDHHALFQDAVNYYIVCLLALAQPGNALSPIREKLDAKDESGHDDELMVWRPFRRRGALRRGLRDSVAKHLTPGNDTPTPEECFSAVLAGNGCTQSEDGMRQLDAGLTQLLGKCTGPAGCKQSAPVFLPRFAKPTYNGNYGADTSTLKREDESVRLPFVLHDPATTAESSSLDQFGVHSIALPNEKKPKFSGAEAVSKLLGMVANWRERQPASEGEWLRLEMAIGKLSPDFEIPGYAATSAKNDVKFRLFAMFLFRHVERSEFTLSLLRTTAKKPAANEVPPTARTGTPAVGDPIRTARGSRGYVFRAFTSLPCWGGDDQGVPKWINFDFAAFEEALKTLHQVDAKADERKKAREQKQAQHEFQRGRAKKWKIISESEENICPPILAGDPRIARLSQLVDDELREEYEMSEGVSVKYGLHQRTIRGFRDVRKKWNDLLNEGQGFSAPAQQKLRDALTDYKVDNVQTMGSPAIFDAMLDERNWIIWREPTVELLGVWRKAAKLPDEAEFAKDPLQALTDERELLEEIERLRGPIRFTPADPEHSRRQFYFSDVTALDKKGRLRHDRQTLETEIAVWTGEKWMCQWMRIAFTAPRLFRDQLNHTGGAEAAWQQAMMAALGLKTGLLKNGEPAKFADCAAVALMPEIGEHGEKRILLNFPLTLDGEAIAVQLGKAARWDGLQFGGADKDSFWLRWSKTWIDESKERKKAPPAPWWRANEPFRVLSVDLGQRDAGAFALLEVSPGAAPKPQSRKLGEAEGKTWWATVRGTGMLRLPGENARVIRDGQRQEEFSGARGRNLVAGEWAEARDICVRLGFLSDKLLGTDESRRSFPELNAELLYALRRAQSRLARLQSWSSVAYEETNEKKHASSEKRRTRIKEQIAEALSVRTIEMSKPAEERGQESPERSGWLDEVRPLVEKQAWPAVAVRIEAEISCERASIQRELLRIADRIQPLRGRRWEWIPRPNDPANCFLRQTERGTDDRPKLLAGQRGLSLKRVEQLETLRQRCQSFNRALRQEPGRPANLGQAKRGIELPDPCPELLDRLEALKEQRVNQTAHLILAEALGVRLRFHTQDAATRAAQDIHGEYERIPERMPVDFLVLENLDRYLASQGRSRGENSKLMKWCHRAILGKLKQLCESYGLRVLETPAAYSSKFCSLTGVAGFRAVELHPDHRDDFRWKKHLDRLADPGRAAQLSREERTESACVKSLFDALEKLNRDLLIEREKARKEGRSMLPKWRTLLAPVAGGPIFVPMRGKPMQADINAAINLGLRAIASPEADDIHLRVRAKRDGDTFVIRAENKREVARWGAKSAVRIDVSDEANRRKLLAEAHLNFFADLGGAASYDKATVAGKSGYASGRGIWGTINQNDWLRVGSLNNDRLEKAGLGRLLIEIEEVPM

SEQ ID NO: 1410 - protein, 1434 aa, unidentified
  REGION 1..1434: note = Cas Enzyme sequence
MNKKGKWDKFTNLYSLSKTLRFELRPIGKDGVVLSPEDATELLTKIIEKDRLIKAAYDALKPVLDKIHEDIINKSLTSDEAKQIDFSEYFEEYKKGKEKKLDGFEKKLREQIGKTFEKTVKTYKITKITKKKEEEEKPLFEIKNGVPTAKAEIIGYLSEQYKDNVELWAHIEEFEGFFGYFSGYNTNRSNYYEYKKEASTAVATRIVHENLPKFCDNVIQFLIGKVQKKKKNDTRTETIVSRKEEYLKAYQYLKDNRGTIQIKDAKTNQLIEAQPVSEDWFNLDKFPKYLSQEGIDEYNRVMGHYNLLINLYNQERKDEKDFKKLSQFKTLFKQIGCGKQSLFEQIKDDTELKEKLSKISKAGEKYFAEQIDDTLITIYTFIEWLRENNDWEGTYWSKAAVDKISNKYLANWHDIKDRIQTDLQGKDKGLKETLKSVATYNKEREEQLKINDAVELSGLFEILNHDAVQGWSKDFFREHILEEYKDLIDEKLTPSQNLIKLICADMQKLAKEFCEKSEDALKIIDYKNENNILQIKEWLDRSKWLLWIVKYFEVKESKVKGNSINPELTNILSALLRADDSNWFDWYDLVRNYLSKKPQEDAKKNKLKLNFESSSFLGGWPPDYAKKAGLLYKKDGLYYLAINYNLSKEDIKTLKQPNGETATRIILDFQKPDNKNTPRLFIRSKGDSFAPAVEKYNLPINDILDIYDTGKFRTEHRKKNEEEYKISLGKLIDYFKKGFLKHDSYKHFNFDWKKTSEYKDIAEFYHDTEVSCYQIKEENTSWKKLLEFIDEGKVFLFQIYNKDFSQRKTVRGKDNIHTYYWKMLFSEENKRNVIYKLNGESEIFFRNLAKGIKKSPAHTTKDYVLNRREKETNKTIPYKIHDELRLFANKNKSIEALSDEAKAYLDKNNEIDENRVTIKKLKHDIVKDKRFTTNKFFLHCPITLNFKAYGNRNVTETVNDNFTQTKDIQKDIQFLGIDRGEKHLIYYSLVNANGEIIEQDHFDVINNKDYLQEINNAADRRKKKQENWQQKGNISNLKDGYISLVIHEIIKKMRDKDGNYKSTFIVLEDLNPGFKRRRQKFEQQVYQKFELALAKKLNYLVDKNVTDMGKIGSVSKALQLVPPVTNYRDIENRKQVGIMLYTRANYTSVTDPVTGWRKTIYLKKGSEADIKKQILSAFTEIGVYSGDYFFQYTDVNGKEWKLWSGKGGKALERYRAKRGKDKNEYIIEPFDVKELLDKLFENFDNSKSLRQQFEERVELKKVNEHTAWETLRFVIDLIQQIRNSGDITKKQEDKFYGADTNKNQDDNFLLSPIRDEQGEHFDSRKYQSQEIPHLPIDADANGAYNIARKGIVMYEHIKQWINDGKQKTKSKRDDSKETTDLDLFISDKEWDLWLYDREKWNEQLPIFASRKLNQKENTKQSDVNINESSEMPIK

SEQ ID NO: 1411 - protein, 1434 aa, unidentified
  REGION 1..1434: note = Cas Enzyme sequence
MPLTRIYRGRIIKIEAAKPEQGYPASFTQLDHLENALWQHHHLFQHAVNYHIVNIAAHADPEAPNDDVLRQFRDRVCAEWNGGTRKRGSGIGFGPSVAPFLGLHPQSTAEVVFAKILEGNTASPAVRHLAGLLLLEKCQGDAGISQGGRTYLPRFCAADSTFTPDFSATSQAAQAGKTELAARIHDPNTTDAELSDLAGRMSLSWTVKIQPSSCFTGAAARNRLEQAIKFFQERIAQKSDSRITAWAEAHQGATWLGELPARVAAIPNTLTIPANRKAAQELTFSTLLFQHFPSTTSASLLALFVKAPKKPNATASKKANASAKPAVDFARFGDDPIVLARGARGYVYRGFTALPVLFPDADSDPAVPARMAWKEFDIAAFKEALKAVNQFRLKTEERTARRKVLAAKLDYQLASTEQAPRDDVEATADREPDSTPRLGDDPRYLALQKLLAELAAKRVDDSEKHGIHRRGLRGWSDLLKVFRQLHEKGKRDASAYESEVISWQKEHVREAGDIQLFLKLAAPSNHSIWQPPALNEADPHPRADDVVWAACRFFEDQEELESLQEPVRLTPADAVVSPRQFIFSDITGKEGLKSVSADTWELTALARTEPGAPLGLHRLRVTVSAPRLRRDELQAIGEAATQSAWLPPILTGLLGRDEARRHAPLPVRDFAFGLMPEPRLAASPDRQPVGLCRLLVNFPVTLDVEKLANRISRPGFWTKQFNRMSERGQDLFLHLLWPGMKNAPDDDIAWWSRPEGLSALAIDLGQRTAAAAVVLEMRADDRFSGGRRPLPYPVGQTGSLAWRVAVLSARHLRLPGEDRALLPHEIDQRNPSRHEKSGAAGRVASRAEWEEALELARLLGEEKPEQRLRALPDEAASSAPPGKAPSALTFPEHNDELLHLARAATNRLRRLHSLSCRLDSDDPNIVNEASSELKADPALHRPGESAKDAAARLGAEFLSVRLQLREILLRLTARIVPRRDHEWTWREVDGGKHGELVAKQAKQKQNIPIAGQRGLSLARIEQIENLRRRFLSLNRLLEFEDRKKPDFGAKTRGIVLGEPCPDLLEKIERMKEERINQTAHLILAEALGVRLRAHDPSAAARAERRQRDIHGEYEPIPGRRPVDMIVLENLDRYLSSQDRAPSENRRLMQWAHRALVDKIRLLAEPFGIPVVTVPAAYSSRFCARTGIVGFRAEEIHTGQLDSFEWCHLEAREKADKLREHDRDLIRLRDILRKLPPRVTKQGDTLPFTLLCPKKGAQLFVPICSPDHGTTGISQADINAAINIGLRALASPQCLHARPRWRLDLSRSTDGTVRATPVGAAKEGGNKLERALWSEAQLYLCLGTDAPKAYSGKRTLLFHDSAGIAKFDRGTVRVGSTCARVATGRALFKAVKDLQWSRIHALNRARLAKAGLLTPEITHLFPRNLDESADLPDEF

SEQ ID NO: 1412 - protein, 1434 aa, unidentified
  REGION 1..1434: note = Cas Enzyme sequence
MINTMEQPKKSIWDEFTNLYSLQKTLRFELKPQGKTKELVRTLFINPEEHHHKLISDDLELSKNYKKVKKLIDCMHRNIINNVLSKHQFTGEELKKLDKNSNAEDNDTETDNADKKDPFAKIRERLTKALNEESKIMFDNKLLNPKKGKNKGECELKKWMDKAEDKYFELGNNEKIDKEAVKADMERLEGFFTYFGGFNKNRENVYSSKKIATAIPFRIIHDNFPIFKKNIENYKKITEKHPELAKLLNEKGANEIFQLEHFNKCLTQDGIDVYNNEKLGIIAKEQGKEQDKGINQLINEYAQKKNKEIKENAKGGEKPKKIKIAVFDKLKKQILSISKTKSFQFEVFEDTSDIINGINKRYTFLTEAKEGMSIVDEIKKIIGSVGDEKYSLDEIYLKEKFISTLSKKLFNYSRYIEVALEKWYDDRYDDKINKSGTDKRKFISAKQFSITSIQDAINYYLEKYEKDEELSKKYTGKNIIVDYFKNPTITIEHKQKEEVISEEKDLFKELEVRRNVIQHILNGDYKKDLKEEKQQDGDSEKVKAFLDALLEFNYILNPFIIKDKNLRKEQEKDEEFYNEIKKLQESIFEAEILDLYNQTRNYITKKPYKLDKFKLTFGSGYFLSGWSNDMEEREGSILIKYNEDRSKNYYLIIMAKPLTDDDKKQLFSDNGTHSKICIYEFQKMDMKNFPRMFINSKGSNPAPAIEKYNLPIKTIWADYQKYKNLNQKGKDKFLEENPDFRHNLIGYFKICAEKHESLAPFKHQFSSIWKPTKEYENLAQFYKDTLEACYNLKFENVNFDNISQLVSSGKLHLFKIHNKDFNPGSTGKKNLHTLYWEMLFDEKNLQDVIFKLSGGAELFYREASILKNKIIHKIGEKVLKKFFKLPDGKLEPVPAESIKNLSAYFRKELPEHELTEIDRKYIDNYSIIGKKDDKLGIMKDERFTVDKIQFHCPITINFKSKNKNFINDDVLEYLHKRDDVHIIGLDRGERHLIYLTMINKDGKIVDNMQFSLNELQRRYKINGNEEIQKINYQKLLDTREVSRTEARRNWQTIENIKNLKEGYLSLIVHQLAKLMIEKNAIVVMENLNYGFKDSRARVEKQIYQKFESILIKKLQYLVMDKNNLYDSGGVLSAYQLTNQEVPAYKYISKQNGFLFYVPPDYTSKIDPETGFINLLDTRYYSRKNAVALLNKFDKIYYDRDNKYFRFDFDYNSTDSNGNKNFDKLRVDISELTRTKWSVCSHPAKRSITVQINNKWVRQPINDVTDKLIKLFEDKQIGYESGKCLKDEILKVEDAKFFEDLLRYLSVLLALRHTYTENGVEYDLIISSVEKAPGSNEFFVSGKDNNLPANADANGAYNIARKGLWLLRKLDEIDNQELAIKKFNELKHAKEIKKNGEESKEDKGDRKRKKKWVSQWCPNKEWLAFAQSMQDVSEK

SEQ ID NO: 1413 - protein, 1434 aa, unidentified
  REGION 1..1434: note = Cas Enzyme sequence
MPLTRTYRGRIIKIEAAKPEQGYPASFTQLDHLENALWQHHHLFQHAVNYHIVNIAAHADPEAPNDDVLRQFRDRVCAEWNGGTRKRGSGIGFGPSVAPFLGLHPQSTAEVVFAKILEGNTASPAVRHLAGLLLLEKCQGDAGISQGGRTYLPRFCAADSTFTPDFSATSQAAQAGKTELAARIHDPNTTDAELSDLAGRMSLSWTVKIQPSSCFTGAAARNRLEQAIKFFQERIAQKSDSRITAWAEAHQGATWLGELPARVAAIPNTLTIPANRKAAQELTFSTLLFQHFPSTTSASLLALFVKAPKKPNATASKKANASAKPAVDFARFGDDPIVLARGARGYVYRGFTALPVLFPDADSDPAVPARMAWKEFDIAAFKEALKAVNQFRLKTEERTARRKVLAAKLDYQLASTEQAPRDDVEATADREPDSTPRLGDDPRYLALQKLLAELAAKRVDDSEKHGIHRRGLRGWSDLLKVFRQLHEKGKRDASAYESEVISWQKEHVREAGDIQLFLKLAAPSNHSIWQPPALNEADPHPRADDVVWAACRFFEDQEELESLQEPVRLTPADAVVSPRQFIFSDITGKEGLKSVSADTWELTALARTEPGAPLGLHRLRVTVSAPRLRRDELQAIGEAATQSAWLPPILTGLLGRDEARRHAPLPVRDFAFGLMPEPRLAASPDRQPVGLCRLLVNFPVTLDVEKLANRISRPGFWTKQFNRMSERGQDLFLHLLWPGMKNAPDDDIAWWSRPEGLSALAIDLGQRTAAAAVVLEMRADDRFSGGRRPLPYPVGQTGSLAWRVAVLSARHLRLPGEDRALLPHEIDQRNPSRHEKSGAAGRVASRAEWEEALELARLLGEEKPEQRLRALPDEAASSAPPGKAPSALTFPEHNDELLHLARAATNRLRRLHSLSCRLDSDDPNIVNEASSELKADPALHRPGESAKDAAARLGAEFLSVRLQLREILLRLTARIVPRRDHEWTWREVDGGKHGELVAKQAKQKQNIPIAGQRGLSLARIEQIENLRRRFLSLNRLLEFEDRKKPDFGAKTRGIVLGEPCPDLLEKIERMKEERINQTAHLILAEALGVRLRAHDPSAAARAERRQRDIHGEYEPIPGRRPVDMIVLENLDRYLSSQDRAPSENRRLMQWAHRALVDKIRLLAEPFGIPVVTVPAAYSSRFCARTGIVGFRAEEIHTGQLDSFEWCHLEAREKADKLREHDRDLIRLRDILRKLPPRVTKQGDTLPFTLLCPKKGAQLFVPICSPDHGTTGISQADINAAINIGLRALASPQCLHARPRWRLDLSRSTDGTVRATPVGAAKEGGNKLERALWSEAQLYLCLGTDAPKAYSGKRTLLFHDSAGIAKFDRGTVRVGSTCARVATGRALFKAVKDLQWSRIHALNRARLAKAGLLTPEITHLFPRNLDESADLPDEF

SEQ ID NO: 1414 - protein, 1434 aa, unidentified
  REGION 1..1434: note = Cas Enzyme sequence
MDKQVAVTQRAYTLRLQGADPQDQSWREALWQTHEAVNKGARAFGDWLLTLRGGLDHTLADAKVKGGKGKPDRDPTNEERRDRRILLALSWLSVESAPKDGDTRKPFVTATGQDSQAIREEKVLCALRGILEKRGVRGADLEGWIKDCTPSLSAAIRDDAVWVNRSEAFDKAVDSIGSSLTRDEVWDMLERFFGSRQAYLAPAEGAEDESAEAEQEDKAKDLVQKAGQWLSSRFGTGKGADFSRMAAVYEKIADWAGKARAGMTGDAAVAGLAAALSEFSPASNDLQGVLRLISGPGYKSATRNLLNQFAARPSVAQEDLENLRDSACDDAEKCKANTGSKGQRAYADAILKDVESVCGFTYLQDGGPARHSEFAVMLDHAARRVSLAHTWIKRAEAERRRFEEDARRMDKVPASVKAWLDGFCLERSEASGALEPYRIRRRAVDGWKELVAAWSNADCRTAEDRIAAARALQDDPEIEKFGDIQLFEALADDEALRVWHKDGDSAKAPDPQLLIDYVLATDAEFKKRQFKVPAYRHPDALLHPVFCDFGNSRWDISFDVHEAVKTGGRNRKNMMVPQDPHALSMTLWTGSTVEPQRLRWQSKRLARDLALKGRQGSNAPEVTRADRLGRAAADVPARATVRIAGVFEQEDWNGRLQAPRAQLDAIAARVARHGWDDKARQMRDHLRWLITFSAKLQPSGPWLDYAAAFPDDAPAKPFVSRKGGYAVRHQDNDAREGHAKLSLSRLPGLRVLCVDLGHRYAAACAVWETLSATQVGDACRAAGREPPRDSDLYLHLKKKVKKQKKGTEVEVEETTIYRRIGADILPDGKPHPAPWARLDRQFLIKLQGEDREARKAGPAELEAVQRVEKEVGREPPDQRALRVDELMSETVRTVRLALQRHGRRARIAFNLTAHKKLLPGGREEVLTAEERVGLLADTLADWYALFTGKGWNDHWARQQWEAHITPLLQGAALPQMPHDAEDMPKARREYEADLMKRLSPVAKSLAGNESLRRQLHCLWATRWRDDDVTLQKCLRRLRDWILPRGRKAKADGAIRHVGGLSLTRIATIKSLYQVQKAFYMRPQPQDLRKNIPSKGDDALVGFGRRILDAMEHMREQRVKQLASRIAEAALGIGRVKRLAGGKDPKRPRQRVDRPCHAVVIENLTHYRPEETRTRRENRQLMSWSSSKVRKYLAEACQLHGLHLREVQAGYTSRQDSRTGAPGVRCQDVPVKQFMQSPFWRKQVAQAEKKRAEGKGDARERFLCDLNAKWNDKLEADWEKAGAVRIPLKGGEIFVSADRDSPAAKGLQADLNAAANIGLKALLDPDWPGRWWYVPCDPATFKPAEDKVAGSAAICLDKPLKNASVAQSTDRRVKKGGKTEARSREVVNLWRDVSSQPISADDNWREFAPYWNDVQARVVRILRQSAGLATDQEER

SEQ ID NO: 1415 - protein, 1435 aa, unidentified
  REGION 1..1435: note = Cas Enzyme sequence
MNRIYQGRVTQIQFLRRESKKDWAEPQHDLTPIWQHHELFQDAVNYYIVALASLGSSPDSKLTKLRGLLGAVWQGFDKKGQRRQGMGDSLQRAWQLAEAPTLEAAMARFQEPLKADSVPPATAEKAGEFLLHKLGGEAAIQQGGRDFFPLFCDADSTATFKLSATRRGRADDEARLQTALHEELDQSQIEALAASISLGSVVNLQPDAEPDSGAAAIARLREAHETFADRIPVETLEQWLTGLKPEFVLPKRRGGNINVQRVNACTLFLAFPNAVTKEIFQSTFKAPNAPKAAKEKAESSTQEEVTDESFIVDGDDPIKLARGKRGYVFTGFTALPLWSGESGKLAWKEFDVAAFKEALKVYNQFQQNVEKREDKLNGLAAKLLIMDGERAMDAYADEAGKDLLTRLQKLWTESKGKPKPPTNESGEEQMLSRFVGDARIDRLREIVNDDLAEEYRLTDGRRTAYGLRRRTIKGWGEVKRKWQQLVKKGDSFSEAKRVQLKAALDEMRGGEKREQIGSHRLFEALIADEAAWSIWREPDEKLQELIIQKEWAADPLESFREYCEIREALEEVSARPLNFTPADARFSRRLFSLKEGAGSFGKGKGQYKHDPKSLSVTVPVAVRGPDGRYESQVCSLSYSAPRLLRDQIRAEDGAYAQDWTQPMMRALFGDKEKPSPQSLDEADVQLMPDYESNGDRRILLNFPLSLDDSKIKAKVGKEELWQRQFVTWKNGKQFPYMCWAGDFNGKEPHRWWEKVSNFRVLAADLGTRHAASVALVECGQHGGGTARLIGNAGGQDWFGRYLSGAILKLPGEDAVVLRTESPLDQDGRGKAFREEPYGSRGRPADLAECQETFAMMTALCPAENPAQPDKNWQPYQGLLGAITSDGVLQKEYSFPELNDKLLIAMRRAQNWIATCISWHWKLSQPDNEAQRQSALEQLRDQERVPEWKALVDGTEDNLVKLRDALHIHISTQRQRVQENLLLLTDRIIPLRGRRWEWVQHPEKEDCHLLRQTAPGTDERKTKLRGQRGLSMARIEQLSELRRRWQSLNQSLRRQIGQKPLTASEMRNDPIPDPCPDVLTKLENIREQRVNQTAHLILAQALGLKLREPQMSAKSRQITDTHGEYEKARPPVDMIVLEDLSRYLSDQGRAKSENTRLMKWCHRAIMMKVKMLAEPFGIPVLETPAAYSSRFCSLTGMAGFRAAEVGWDDRHEFRWRVLLSEAAKAKEEGKAPSDNAIHAVALFDELKRISESDHPKRTLLAPQPGGPMFITALEVAHPAPAPNRKQKDKRSVLPMQADLNAAANLAFRAVAHPNAAHIHHRLRTERKKGAKGQEDSFHAREKRRFGAEKAVLMPERAGDFPKEKNTNFFYDEHGVAKFGRARLEAEAAGIFPYASGPGLWRPVNDRLAQWRRCVVINQARVNSWAKPDPDDEIPMT

SEQ ID NO: 1416 - protein, 1435 aa, unidentified
  REGION 1..1435: note = Cas Enzyme sequence
MNRIYQGRVSKVFDDQKQELNLNVLWQHHELFQHAVNYYILCLLALAGDSCPKQRDLREKMTTKPTVDGEEPLYVWEQFRRRGVWRRGLRDSVVPYLSPGNKDASPEDCFNAARAGCEASSEGQDLAFAELLFVCDGDNPIKNQGRWMFDRFCNPKYTGSFPFDATADLRERGENRLKTDLHNLSTQSELESFSEQAELGWVVNLSRGAKPFEGEPARERLLKSVIHFQQAFGTEADTEMSNRVSALLSKHATAEKELADITQRIKAMAADSLPKIPANNRGIADRVEAFMLFKQFPSAFTAELLKVSFPKEEASKTKKPKTADAPEVLFTRLGGDAIELARGRRGYVFRAFTSLPEWGGNDSGLPQWLDFDVSAFKEALKAIHQVDDKAKEREDDRNQKLAQHKYQRGETKKWSGGAAGEDEQRPPVLAGDPRIARLEELLRSDLAQEYSMAEGVEVEYGLHPRTIRGFRDIRKLWNEALKPGQGYSNEAREELWRRLTDYKKENAETIGSPVLFDALVEEANWIIWREPDAATLTQWRKAAGLSEGAEFCTDPLQALTDERELLAEIERLRDPIRLTPADAVHSRRQFYFSDVSDLTKKNRLCHDKNYLEAEIADKVDGKWAPRWVRIQFGAPRLLRDQLKSDTEGKESAWQQAMMAALGLKAGLVKKEKGKLRPATFAECTAVALMPEVTASGERSILLNFPLTLEDAAVARQLGKAARWDANQFGPNFKNSSWLRWPSTPDANTRSRPWWESSEPFLCLSVDLGQRDAGAFALLEATPGNAPKPQSRMLGNDGSKTWWATVRATGMLRLPGEDAKVFRNGNPEPQEELSGERGRNLAPGEWQESRDICTALGLQPDKLLGSNDCRYSFPEINDRLLYALRRAQARLARLQSWSCVAYDEPDEKKRAAFEKRRTRTKEQIAEAITMRAAEELKAEKDRGQELLERTEWLNEIKSLAEKEAWAAVATRIKAEIESEREIIKRELVHIADRIQPLRGRRWEWVKRQNDTQNHVLQQTERGTDNRPKLLAGQRGLSMKRLEQLESLRQRCQSLNRALRQEPGTPANLGRSKRGIELPDPCPELLDRLDALKEQRVNQTAHLILAQALGVRLRPHTTSAAEREKHDIHGEYERIPGREPVDFVVIENLKYYEMSQGRSRSENVRLMKWCRRHLRDKLIQLSQEVYGLRVLEEWPADTSKFCSLTGVAGFRAVELTPEDAKEFRWKKHLDRLADPERAKKLSKTERRESQRVQQLFGMLKKLNADLLKDRPKRPKWRTLLAPVAGGPIFVPLRGNPFQADINAAINLGLRAIAAPESGEIHLRVRSENKSGKFLVRADNIREKARWGKKPPEIIVPNEKHREDLLAEARPNFYSDLGGVADFDKAEVSGRQNFASGRGLWGTIKGNERREGKDWLRVEELNRARIEQWERGDDDVPM

SEQ ID NO: 1417 - protein, 1435 aa, unidentified
  REGION 1..1435: note = Cas Enzyme sequence
MNRIYQGRVCDAEIADGKNWKPFAAEPKAARAAWERALWEHHELFQDAVNYYVVCLLALAQPGNKIWLTREKLDAKNEAGGDDELMVWRSFRRRGAMRSGLRDSVAKYITPGNDTPTPEQCFAAVLAGNDCAQNEEGRKLLDAGLTQLLGKCTGAAGCKQAAPMFLPRFAKPTYQGSYGEDTSTLAREDEGARLPFVLHDAVTRPDSPALDAFGVHSIALPNEKKPKFIGAEAVKKLRGMVADWRERQPANEDDWQRLEVAIGKLPEEFEMPGYAATSAKNEVKFRLFAMFLFRYVEQSDFTLGLLRDMTKKPEPAEKPPEAKSAVAGAGDPIRTARGVRGYVFRAFTSLPCWGGDCKATPEWIGFDFAAFEEALKALHQVDSKTDERRKAREQKVAQLEYQRGRTKKWKGGDAGEDERRPDILAGDPRIARLEQLVDVELKAEYEMSEGVEVEYGLHPRTIRGFRDIQKKWNAEVKPEDSYSDVLRKKLWERLTDYKKENAETMGSPMLFDELVKEQNWVLWREPSAEQLAEWRKEARLPDDAEFTKDPLQALTDERELKGEIKRLEDPIRFTPADPEHSRRQFYFSDVSAIDKKNRLRHDRQTLDAEVAVSIDGKWVVKWVRIHFTAPRLLRDQLNSANGADALWQQAMMAALGLKTGLTKTEKGKVREATFAECTAVALMPEITASRQRRILLNFPLTLDGEAIAAQLGKAARWDALQFGGADKESYWLRWPATWIDEKKARKKSPPKPWWTSAEPFRCLSVDLGQRDAGAFSLLEVSTGDAPKKQSRKIGTADGKPWWATVRATGMLRLPGEDALVMRDEKWQEELSGKRGRSLVAGEWEEACDICTKLGFDPVKLMGSDRSRHSFPELNRELLYALRRAQARLARLQSWSCVAHEETEEKKRAAFEKRRTRIQEQIAEAIATRAAEEKKDAKERGQELPERSAWMGEAESFVSKRAWDCVRDCIVREIVKERDSIQRELLRVADRIQPLRGRQWEWAKRDDSSQCHVLRQTARGTDERKKMLAGQRGLSMSRIEQLESLRQRCQSLNRALMQEPGKPANLGRSNRGIELPDPCPELLDRLDALKDQRVNQTAHLILAQALGVRLRAHAKSAAERKQQDIHGEYERIPGREPVDFLVLENLDRYLAAQGRSRSENSRLMKWCHRAILGKLKQLCEPYGLRVLETPAAYSSKFCSLTGIVGFRAVELNPDDGGDFRWRKHIERLNDPERAAKLKGDERAESEAVKRLFGQLNELNQDLIAERDKARAEGRPFRPKWRTLLAPQQLGPIFVPMHGNPMQADINAAINLGLRAIAAPDADEIHLRLRAARNGETFIVRAENARERARWKDGVPEIAVGKETDRKKLLTDARLNFFFDHGSVATFDHATIKNIRIPVASSRGLFGTVNQGDWQRVKDINRVRFQKAEREGDDVTM

SEQ ID NO: 1418 - protein, 1435 aa, unidentified
  REGION 1..1435: note = Cas Enzyme sequence
MNRIYQGRVTSVEILKDGKPEPLPKQEWQQALWQHHQLFQDAVNYYLVCLLALASGHNEETRRILKLRELITTKPGPDATPEQQQLYIWEAFRRRGATRRGLRDSVAPYLCPGKSAATPEECFAAVLAGNPTAATEEGRKLLDRGLKQLLGKCTGASGCRNAAPEFLPRFCDPTTKCSFVEDAGTLRRETDKARLPFVLHDASVRADSPKLDDFGMYSIAWPDGRKPEFRGSEAKAKLSEMLARWRATQSEHAADWARLERKIEQLPEDLVLPSYAATAAKSNPVLTRNAMLRLYAMYFFRRVEQSEFTLGLLRATTAAPEPDAKPPETKETSGDGDPIRLARGPRGYVFRAFTSLPGWGGNDSGEAQWLRFDVAAFEEALKALHQVDDKGEERQKECLRKQAEHDYQRGKTKKWKGGATGEDEQRPSILAGDARIERLEELLRSDLAEEYAMSEGLEVQYGLHPRTIRGFRDVRKMWNEALQLGQGYTAAAREQLWRLLTDYKKENAETIGSPVLFDALVEEANWIIWRDPDAATLTQWRKAAGLTEGAEFSTDPLQALTDEHELLADIERLKQPIRLTPADPEHSRRQFYFSDVSDLSKKGRLRHDRNYLEAEIAEKVDGKWLPRWVQIHFRAPRLFRDQLKSDEDGRESAWQQAMMAALGLKAGLVKKEKGKLRPASFAECAAVALMPEVTASGELRILLNFPLTLEDDAVARQLGKAARWDANQFGPNFKNSSWLRWPSTPDANARSRPWWENGEPFRCLPVDLGQRDAGAFALLEVTPGTAPKPQSRKLGDAGGKTWWATARAIGMLRLPGEDAMVLRDGKWQEEFSGERGRNLVAGEWQEARDICTALGFQPDKLLGADDHRYSFPELNHQLLYALRRAQARLARLQSWSCVAYKEPDEKKRTAFEKRRTRIKEQITEAIAARIGEELKAEKDRGQELLERSKWLNDIKPLVEKTAWEVVATRIKAEIESERELIKRELVRIANRIQPLRGRQWEWVTRLNETQNHILQQTERGTDDRAKLLAGQRGLSMKRIEQLESLRQRCQSLNRALRQEPGTPANLGRSKRGIELPDPCPELLDRLDALKEQRVNQTAHLILAQALGVRLRPHATSAAEREKHDIHGEYERIPGREPVDFVVIENLKYYEMSQGRARSENARLMKWCRRHLRDKLIQLCEPYGLRVLEEWPADTSKFCSLSGVAGFRAVELTPEDAKEFRWKKHLDRLADPERAKKLSKAERRESQRVHQLFEALKKLNSDLLSNRPARPKWRTLLAPVNGGPIFVPMRGNPFQADINAAINLGLRAIAAPENGEIHLRVRSEREHKGDKFRVRADNIRERARWGEKPPEITVPNEKHRTDLLAEARPNFYADLGSVADFDKAEVSGQQNFASGRGLWGTIKGNEWREGKDWQRVEEINCARIQKSKHGDDNIPM

SEQ ID NO: 1419 - protein, 1435 aa, unidentified
  REGION 1..1435: note = Cas Enzyme sequence
VPTSSKPDLTQRAYTLRLAGTNPRDHSWREALWKTHEAVNRGVEAFGDWLLTMRGGLYPALADDGGVKKSEESPSNANYEETKRRRIMLALSWLSVESEHEAASKHIVPHKLDIANGRTDWQTVDALRKILQSSGVPEKEVKNWIIDCSGSLSSSIRDDAVWVNRRQVFDELQKALGPTLTGEQARSFIDGFLPDYFSSVSLDEDEEAKIRTDSASTTEQPEFRTWARGWLSFQWGTGEKSDNTRIASLLEKLSNASLDHLIGCSGEQLIAHLIEILGGEATKDESMDCLRKLVGWKTGRSSKGKMALETAQQKQSLSKADIDLLKKKLSEETEEKKRNDHRTTQEWAGNLRLRIEEKVGVPFISGRNLIGEFAVMLDHAARRVSLAHTWIKRAEAERCRFEGDVGKILEVPEDAKIWLDRYCKDRSLSTGALESYRIRKRAKEGWKEVVAAWSRKECRTEKDRIEAAREVQADVEKFGDIQLFEAVAVEDAICVWKQDGKPSPVFLSDYVVAKDAEAKQLRFKVPAYRHPDPLRHPVFCDFGNSRWEIKFNVHEMRKRDAENSREKKEERIDLQGMSMGLWNGASVTKQFLRWKSKRFTADLIRPKVGATGETQCVSRADRLGRAALGANEHSAIHILQLFDEKEWNGRLQAPRAQLDDLANHLDRNGSQWDLKARCMRDRLGWLVSFSAKLQPQGPWSEFAERNALRSDWKYWPHAVDNKKRQGLARLMLSRLPGLRVLSVDLGHRYAAACTVWEAISEEQICRACTATGTVAPAEGDLYLFVKAISKGKTKTTVYRRIGANVLADGTTHPAPWARLDRQFLIKLQGEDIGARKASPTEIAEIGKLERDLGFKRLVSRKGSELAVDELMHEAVRLLRLALRRHSDRARISFNLTAKNKLLSGGRENALDPESRIELVTDVLVLWRSLFRSDRWTDEWATRQWQAHIQPLLGDIELPETREEEGEIAQKRKKRDEELRIGLRRVAGKLTSNLSLCAKLNILWAARWQEEDTQWRPRLRWICDWLMPRGVGTNGKRYQSIRHVGGLSLGRIATFKSLYQLEKSFKMRPEPEDLRKNVPKPSDESARKFGQRMLDAMESMRENRVKQLASRIAEAALGIGREEKGTGGRQRKRPRQRISAPQFASCHAVVIENLTRYRPEETRTRRENQQLMNWSSSKVKKYLGEACELNGLHLREVSAAYTSKQDSRTGAPGMRCKDVPVKDFLESPFWKMQITAADQKMRDGSKGDARERYLLALRKHWAMMPDAKKAGHSIRIPFRGGEVFVSAQKTSPASSGLQADLNAAANIGLKALLDPDWPGRWWYVPCEAGTYRPIKDKVGGCLAIKTGQPLIQAKNVNSLSVETRTPRRTGNVERRTDSHDGSQDNIVNLWRDISAQPVNSEQAAGNEWQPYPEYWNKVQFRVVKILREKAELPLDI

SEQ ID NO: 1420 - protein, 1435 aa, unidentified
  REGION 1..1435: note = Cas Enzyme sequence
MNRIYQGRVAKIELENPDKEAPWIPLPDWEQHLWKHHELFQDAVNYYIVALAALGTSPGSKLTRLRELLRSVWEGFDKKGQRRRGMCESLQRAWQLEQPPTLTEVVERFTKPLADDSVAATTSEKAAEYLLLKLGGDASIRDNGPVFFPMFCSVDCESTFRLSATALKRASDEARLQVELHRTLNQNEIKQLAQSITLGSVVYLQPNTEPDTGAVVIKRIKDAAATFPDRISTKQLEAWLHSLDASFSLPKRRGGNINVKRVDSCILFLAFPNAITKALFQSTFAAPKAKSPRNSSNIKADNDSEDESQFVVNGDDPIKLARGSRGFIFPGFTALELWHKDTRNLAWKEFDIAAFKETLKVYNQFQQNVEKREDKLNNLAAKLLIMDGEQAMKAYAGNTEMDKKLRQHLENVWQESKGKPKAPTNDNGEELFLPHFAGDTRIDRLRQIINDDLAEEYRLTDGRRTAYGLRRRTMKGWGEVKRKWQQLVKAGENFSEEKRQRLKAALDEMRGGEKREQIGSHRLFEALLADEAAWSIWREPDETLQELIIKQGWAADPLEAFREYCEIREAMEEMSARPLNFTPADARYSRRLFMFTDVCSFGKDTGDYRHDAKQLAVTVPVAIRDAEGRFAMRRCRLVYSAPRLLRDRIRAEDGSYAQDWTQPMVRALLGSDDETGNPQQLKDAAVQLMPDYDAKGQRRILLNFPLDLEDAKIKDRLGKEALWQKQFVTWKKGAQLPFLRWKDDFDGKESHRWWEKLASFRVLAADLGTRHAASVALLECGTEREGTSRFIGKAGDKEWFAKYCSGIILRLPGENAEVLRLESSLDKDGQGKAFREELYGNRGRPADENECVESFEMLATLNQSELFEDISDTANLREQFSFPELNDKLLVAIRRVQSWIATCISWHWKLTQPESEDQRPTALTQIREQDRMKEWQKLADGNEQNLVELRDALHRHIGSQRQHVQEQLLRLTCRILPLRRRTWEWVAHPDKSDCHLLRQTQDGTGPEKAKLRGQRGLSMARIEQISELRRRWQSLNQSLRRQIGQKPLTASEMRNDPIPDPCPEILTKLENIREQRVNQTAHLIIAQALGLSLREPQMSAKSREITDTHGEYKVVRPPVDMIVLEDLARYLSDQGRAKSENTRLMKWCHRAIMLKIKMLAEPFGISVLETPAAYSSRFCSLTGIVGFRAVEIGWEDRHDFRWRELLKVNLGELQSEISKAATNKAKLETLERQLAIAKAAQDVFRELEKISRSKQPHRTLLAPQPGGTMFVTMEKISHPAPAANRKQKGNLSILPMQADLNAAANLALRAVAHPACAHIHHRLRTERKKSAKNQPDTFLAREPRRFGKEKTAFMVREGDTLPKERNINLFFDEHGVAVFGRARLKSDNNTGFPYASGPGLWKIANDRVRQWTRCQQINADRLAYWNNDSDDDIPK

SEQ ID NO: 1421 - protein, 1436 aa, unidentified
  REGION 1..1436: note = Cas Enzyme sequence
MKTLFENFTNQYSVSKTLRFELIAQGKTQEHIEKQNFLNDDEELAEKYKKAKKIIDEYHKNFISDKLFSFAFTPEDLRAYEHAYQAMKKDKKNIKLMNDFASRQDDLRKRIAKELQEDNYLYAKEGEKKKFIKQNLIKWLENNSISLSGIPDPKTIINDFENWTNYFSGFNDNRKNIYSEKRIGTSIGYRLVHDNLPKFLENIKRYNKAKTAGVNFSNVEKTYGVKLDEVFSLEHFNKCLTQKGIDEYNLIRGGQSKKGNNKEQGINETINLHVQQLHRRLERATDDDKKELADKIKYIKSCLLEELYKQILSDRSQLSFRLDSIKNDGDLCRQIEHIFHMDNAGNLWGKKENVDRDTGEKTESDFNISEAIKKVLQAFKEADPERLYIRNKSSNAITEISQYLFGNWSLITRSLDYYVKKIIFPNPEKKKETAKQKVDREKKCEGWLKDTTYFSFAEIHTALELFFQQYSDEELLDEKKENNDEEQGITKAMKEIALSKPLFSYFKELKISKKNEETNKFEKKELLKQIKESYPATQKVFEQYRDVEAELLKNKKDGEVQVVKNYLNALMDLHHYLKPLYVMLSPKDEKNQEEIFEKDNGFYDDFDPLFNVLKLIVPLYNQARNYLTKKPFSVEKYKLNFGHHNLLGGFVDSYTNSDNATQYGAYLFRKKHQRYDAYEYFLGISTDAKLFRCHLQNDISENDKSKYERLEYYQPKSTTFFSDEYSSKNKKKIMDCLLKKVEAKIEKTLKGNSDFDEFLEKLREADTPGKQIEIIKKQKEFINILDEKEVEEIFNEAIAEMKNFIIKYVERNPQLIKLQETRYSGHEGFTAIIKDLQKIAKENKVFNYFHVSENEFNEACNRETKPLLFFKITNKDLNYYEKAAQGLRKQEIGTKNLHTLYFEQLLSGKQQVIDIGKGEVFYRRKTPFYKPIIHEENKSILCRTYKEDGKLKTLTDDIYKELSLFYKGNIPEEKLSEASRKLKDLVKVNKFKYKIMKDKRYTEDKYLFHLSINLNFDQPPKLEKFNDSVNDSLKRNDNVKILGIDRGERHLVYYTLIDDKGNIVKDDNGNYLQGSLNNPTGKKDYHDLLDKREDERDKARKAWNTIDRIKDIKEGYLSQIVHNIASLMIKYNAIIALEDLNFGFKKGRMKVEKQVYQKLEEKLIDKLNYLVFKNECPEKPGGLLNAFQLTAPFKSFKAMGKQTGFIFYVPAYHTSKICPATGFADLLYPRYKTVDKSKKYFAKFEAIRFNRQENYFEFEIKNYNAFNPKAEDTKQDWTICTYGLRLDTYRNPKKNNNWDTQEVDLTKELQNLMQSQGIQFIDGKCIKEEICRQNDSQFFKRLMKLLRLTLQIRNSRVNSDEDWIISPVRVQGEIFDSREADESMSQNADANGAYHIALKGLWCLRQIREAKDLKKVNLAISNKEWLQFVQDRPFAK

SEQ ID NO: 1422 - protein, 1436 aa, unidentified
  REGION 1..1436: note = Cas Enzyme sequence
VPTSSKPDLTQRAYTLRLTGTNPRDHAWREQLWKTHEAVNQGAEAFGDWLLTMRGGLAPTLADSRSVDKAEESLSDVDKDETKRRRIVLALSWLSVESEHGAPTKHIVPHKFDIANGRTDWQAVNALKEILQSCGVPETEIGGWMADCSGSLSASIRDDAVWVNRRHAFDEARKILGPTLTREQIHTLILDEFLPDYFSSVSLDDDEEAKTSTESANATKQPEFRTWARGWLSFQWGTGEKSDNTQIASVLARLSNAALDHLVDGSGEQLIAHLIEVLGGEIPKDAPIDCLRKLVGWKTGRSSKGKMALEMAQQKQILSKADIDVLKKKLSEETEEKNRNAHRTTQEWARNLRLQIEEKTGVPFISGRNLIGEFAVMLDHAARRVSLAHTWIKRAEAERRRFEADAAKIRDVPEDAKIWLDRYCKDRSVNSGALESYRVRKRAKEGWKEVVVAWSRKECRTEKDRIEAAREVQADIEKFGDIQLFEAVAVEDAVCVWKQDGKESPVFLSDYVVATDAEAKQIRFKVPAYRHPDPLRHPVFCDFGNSRWEIEFNIHEIRKRDAKNSREKKGERIDLQGMSMGLWDGTSVNKQPLRWRSKRFTLDLIPPKAGGTEETRSVSRADRLGRAASGANENSSIHILQVFDEKEWNGRLQAPRAQLDDLANHLDKNGNKWDTKACRMRDRLGWLVSFSAKLQPQGPWSEFAERNGLRPDWKYWPHAIENKKRKGLARLMLSRLLGLRVLSVDLGHRYAAACAVWEAVSEEEIRRACDAVDTVAPAEGDLYFSTKAVNNVKTRTTVYRRIGANVLPGGKRHPAPWARLDRQFLIKLQGEDVGARKASSTEIAEVEKLEGDLGFKRSILRKGSQLAVDELMHESVRLLRLALRRHSDRARISFNLTSKNKLLSGGREEALDSVSRIELVTDMLMLWRELFSGDRWTDEWAKSQWLDHIQPLLGDAILPEVIEEVNETAQKRKKRDEELRVGLKRVADKLASNPSICAKLNILWAARWQEEDKQWRPRLRWIRGWLMPRGVGRSGKKRQSIRHVGGLSLSRIATFKSLYQMGKSFKMRPEPDDLRKNVPKPGDESARKFGQRILDAMENMRENRVKQLASRIAEAALGIGKEERSKDGRQSKRPQQRISTPQFAPCHAVVIENLTRYRPEETRTRRENQQLMAWSSSKVKKYLSEACQLNGLHLRDVPAAYTSKQDSRTGAPGMRCKDVPVSDFLESPFWHKQITAADQKMRDGSKGDARERYLLALRTHWAAMPDAKRAGRSVRIPTRGGEVFVSAKKNSPASSGLQADLNAAANIGLKALLDPDWPGRWWYVPCDAETYRPVKDKFVGCLAVKPTEPLIQVKGENGLSPEAHTPRRIRNAERRIGSQRESKDNIVNLWRDISARLVNNEPVVESEWQRYSEYWNKVEFRVVNILREKAGLPRDS

SEQ ID NO: 1423 - protein, 1437 aa, unidentified
  REGION 1..1437: note = Cas Enzyme sequence
MAKQVPVRQRAYTLRLRGLDAQDQSWRDALWRTHEAVNKGAKAFGDWLLTLRGGLDHALADAKVEAGKAKPDRDPTDEERKGRRILLALSWLSVESEKGAPEKYVVPHDLDKESGMRSNWKTVDALREILKGRGLDEREIESWVQDCSASLSATIRDDAVWVNRSKAFDEAVKSIGSSLTRDEVWDMLQPFFGSREAYLAPAEPPEEESADVRQEDKAKDLVQKAGQWLSSRFGTGKGANFRRMATIYEKIANWAGKARSGMSGDKAIADLATALSEFSPASNDLQGVLGLISGPGHKSATRNLLNGFPTKTSVTQGDFQNLQDKARQDAQKCKNKTGSKGQRDYADAVLRYVESACGFTYLQNSGSARHSEFAVMLDHAARQVSSVHTWIKRAEAERRRFEEDAKRMANVPGPAKKWLDSYCRERSRRSGALDRYRIHRRAVDGWKEVVAAWSKADCKTAEDRIAAARALQDDPEIQKFGDIQLFEALADDDALCVWHKDGDSAKAADPQPLIDYVLATDAEFKKRDFKVPAYRHPDALLHPVFCDFGCSRWDIEFAVHEARRKTRRKHKPIPTDDPHALSMTLWTGSTFKSQKLRWQSKRLTHDLALGQVKQDDGAAEVVARADRLGRAAADVGASATVRIAGIFEQKDWNGRLQAPRAQLNAIAARVTRHGWDDKAKQMRDRLRWLIAFSARLQPSGPWVEYARAFPDDAPAKPFVSRKGDYAVRHQDNDARKGHAKLILSRLPGLRLLSVDLGHRYAAACAVWETLSTEQVRKACQEAGNEPPKDSDLYLHLKNGQRTVVYRRIGPDTIEAVDESTGEIKPVPHPAPWARLDRQFLIKLQGEDHEARKASPAEAEAVQELERAVGREPPDQRSLRVDDLMSKTVHTVRLALQRHGRRASIAFNLTAAKRLLPGGREEDLDEEGRVELLADRLSDWYTLFKGKGWNDEWAKEQWETHIAPLLQGAALPQISEDAEATPKARKKYRADLTEQLKPAAESLARNPSLCKKLHCLWATRWRDDDGALRKRLRWLRDWILPRGKNARRDPAIRHVGGLSLTRIATIKALYQVQKAFRTRPEPDDLRKNIPAKGDDALRDFGRSVLDVMEHMREQRVKQLASRIAEAALGVGRVKRFAGGKDPKRPREQVDRPCHAIVIENLAHYRPEETRTRRENRQLMTWSSSKVRKYLAEACQLYGLHLSEVNAGYTSRQDSRTGAPGIRCQDVPVQKFMQSPSWRREVAHAEKKHAEGKSEARERFLCDLNAKWKGREAEWEKAGTVRIPLNGGEIFVSAGPCKCCERNDRNGPAGLQADLNAAANIGLKALTDPDWPGKWWYVPCDPKTFKPVKDKVAGSAAIRLDKPLKDLPAAQGTDGARKKPSKTKAQQREIVNLWRDVSSQPISANDDWREYKPYWDHVQERVVKILRQWAGLTPNYKNQ

SEQ ID NO: 1424 - protein, 1437 aa, unidentified
  REGION 1..1437: note = Cas Enzyme sequence
MPILPQAVFNIARDLQYMNRIYQGRVIAVELPDGKDELGNYKWKKLDEWQTAIWNHHELFQDAINYYILALASLADPQFATMRLIKDLRARVSAAWIAFPRPVEDARSLGQSVANWLGLAGNALPEEAFDAVLKGNEATPQVRALALALLLDRCGGESAIQQGGRGYLPRFCDSKAKPTYDFSAVSQAAGVGKDRLSQILHGQAQENELAEIANEIDLSWTVKLQPGEFFTPEESSARLIEAIEHVRGLLRDSTLVRLKEVATQFPDFDEQLNSFKKSITDDLQKFMIPRNRKASKDLTFATLAFKFFPCSLTGKVLSLFIKKPKAGPAEKPKNNVDFGSCGDDPIKLARGNRGFVFRAFTALPAWNPTSPGDPIWKEFDIAAFKEALKSLNQFNQETQERIDNENNLRGQLAILMGSEIKGWKPRKTETNEDESIPEPLEPELFQLARELEIDLTQELADTVVGSESLAEFGEASYKYREGEWLLSSASLRGYRDIAEEWNNLHLKRGATLSSDDLENVVKKHQRDDKNKKSIGSVPLFLKLCEKKYWPLWLLGDAGDGEFASENLFLESMVLFHSKIRDFERSLEPINLTPAEPKHSRRLYMFSDLTDKTAKVIFGKTDERFIVECAIAVRAGDKSVKEQRVRLFYSAKRLLRDELQGGVESRWLQPMTRALGLTIPQSASVEMFESAVSLMPDVVPSEERSKTEWRFLLNFPVTLDPVWIHSGLGKAAMWKGQFNGTREKSLHLHWPGTIKEKANAVPWWENKQNIEKGFSCLSVDLGQRTAGAGALLRVTCWDPRKGETGTKRPVREVGFDGERAWFAEVFSTGIFRLPGEDQKVLGLNGDREVERSGKSGRNALESEWKNGKELARALFAENPENWLGKSFEEKSFPEQNDALIALANRRLSRLNTFHRWSCFNPDRPEVAARRSGLIKKLGEELEHWEDAEVQTWKKSIKKGDFEAFRLAAGEAFRSLRLKLEEHLLTLANRVAPLRDRSWLWDRTKKNADQGLYGELLDSGNQLTDKSAWLRGQRGLSLARIEQLENLRRLFLRYNRSFDREAGTPAKFGREDRGRKSGEPCLSLLEKIERMKKQRVNQTAHLILAEALGIRLRKHQIDEQERQAKDVHGEYEKIPGRAPVDFIVIENLDRYLTSQGRSPSENSRLMKWAHRAVRDKIKMLAEEPFGIPVVEAPAAYSSRFCAVSGVAGARCEERTALDPYAKESLEKWANRPRKPGQPDPKVFTVLLNQFEQLEKLNQQLKMGRIGNEGKSNSLHTLFVPKQGGPLFLSLEELGAKGRAPKQADINAAINIGLRSIAGPTALDILHKIRAEKEGSSFRPTIKNAREKVAFNSKSLISLKGKASDKLSKARSPNFFFDARAFGCFDSATLKLADRDISLVSGVGLWSTVNQIFPGHLAKLNERRLTAWQKMASNQDNVLM

SEQ ID NO: 1425 - protein, 1438 aa, unidentified
  REGION 1..1438: note = Cas Enzyme sequence
MPSLTDSKGKKFMNRIYQGKVTAVEIPDGKDEQGKPLNLDVLWRHHELFQDAVNYYIVCLLALAGDSCAKQRELRDRMTTKPEGGNEEPLYVWERFRRRGAWRRGLGDSVTPYLCPGKTDASAEECFAAVLAGNECVATEDGRSLFDRGLRQLLSKCTGASGCRNAAPEFLPRFCDPNTKCSFVEDAGTMQRDIDKAVLPFVLHDPTVSVDSAQLDTLGVHSIAWPDGRKPEFRDEEAKEKLRLMLHRWRECQPELAPDWARLEQKIEALPDNLVLPSYAATAAKSNPVLARNAMLRIYAMYFFSKVERSEFTLNLLRATTAAPKPEAKRPEPQPMNSGGDPIRLARGQRGYVFRAFTSLAFWGGNESGEAKWLRFDVAAFEEALKAIHQVDDKAKEREDERNQKLAQHKYQRGETKKWKGGGTGEEEQRPPVLVGDPRIARLEQLVDVELRAEYEMSEGVEVKYGLHPRTIRGFRDVRKRWNEALQPGQSYSAAAREQMWKLLTDYKKENSETIGSPVLFDALVEESNWIIWREPDAAKLQEWSKAAKLPEGAAFCDDPLQALTDERELLADIERLRDPIRLTPADPVHSRRQFYFSDMSDLTKKNRLRHDKNYLDAEIADKENGKWIVRSVRIRFGAPRMLRDQLKSDEEGKDSAWQQAMMAALGLKAGLVKNEKGKLRPASFAECAAVALMPEVTASGERRILLNFPLTLEDDAVARQLGKAARWDANQFGPNFKNSSWLRWPSTPDANARSRPWWESSEPFRCLPVDLGQRDAGAFALLEITPGNAPKPQSRKLGDAGGKTWWATVRATGMLRLPGEDAKVFRDGNPRPQEELSGELGRNLVAGEWQEARDICAALGFQPDKLLSSDERRYSFPELNDRLLYALRRAQARLARLQGWSCVAYDEPDEKKRTAFEKRRKRIKEQIAEAIVIRAAEEMKEEKDRGQELLERSKWLGEVKNLVEKEAWDAVATRIKVEIESEREIIKRELVRIADRIQPLRGRRWEWVTRSNDTQNHILQQTERGTDERPKLLAGQRGLSMKRIEQLESLRQRCQSLNRALRQEPGRPANLGRSKRGIELPDPCPELLDRLDALKEQRVNQTAHLILAQALGVRLRPHATSAAEREKHDIHGEYDRIPGREPVDFVVIENLKYYEMSQGRARSENARLMKWCRRHLRDKLIQLCEPYGLRVLEEWPADTSKFCSLTGVAGFRAVELTPENAMEFRWKKHLDRLADLERLKKLNKDERGESNRVKALFDALEKLNAVLLKNRPARPKWRTLLAPLRGGPIFVPMRGKPFQADINAAINLGLRAIAAPENQEIHLRIRSERKGEKFFVRAQNIREKARWNADKHEITPPNGKSLAGLLTESNPYFYADTGSIAEFDHAEISGQRGFASSRGIWGTIKQKDWLQVGKLNNDRLEKAGLGRLLEEEDDVPK

SEQ ID NO: 1426 - protein, 1438 aa, unidentified
  REGION 1..1438: note = Cas Enzyme sequence
LWATHEAVNRGAKVFGDWLLTLRGGLHHTLADMEVPAKGKGSSRAPTQEERRHRRVLLALSWLSVEDEGGAPNGDGLRVTTGRYSDNDRREAVEAALREILEKRGVQPSEIEEWVRDCGPSLAARIRKDAVWVNRSALFDAVCGGQNVRQAREDARTLLWYLLTDHYLALPKTDKKQSEGSDEDQEDGEEKEPTVDAAAEAVAKSAKGAGQRTRHLFSHIFGRKSTQGFGKPRRKLDLREHWRGYLKPRIETAGIPLSDPDVKAKKKAALSPTEVHREMFSKAASRLAQTWTRQKQQEVARQLGAAADEELNKLEGDKAYCKALELLDAYCRERGQASGSLEEYRINPRAAEGWERVVVAWERINEADRAKATEKRIDEVKRLQSENFDKKFGDINLFVDLAEPEYEPVWQHNGQATPSILKTYVKGWKARTDAARLKVAAFRHPDPYFHPVFCQFGVSRPPIQYGRLGTNWDGDTRTVRMRVWNGSRAVDLPLLAVSKRFDAEIGSASESMEKAEPEVTRRSRLAIAAVPNGRIQGNRFRVASVFDQQDVRSRQKADNGTQEDTDDEDSRNGKDKEKKKEPTWNGTLQADRWALKSIGRLPCSDLQKKQQAKRRLQWRLTVALELQPIGPWYDYVRNAADPFPFQRTIRKNDKGIKRQKEKKYLSINGWPFEEINKPLRDGGAKLVVDKQSVRGRDANVILSRLPGLRILSVDLGHRFAAACAVWEALPKDKFEKEIANLEALAGGSGKDDLYLHVAKPGDDGKTRTVVYRRIGPDDLPDGKAHPAPWARLDRQFLIKLQGEDEEAREASNEEIWAVHQLEAELGRAVPLIDRMVRGGFGQKVEQKWRLEALRGLGWRPAATNVPPGAADEEEGEARKISRSVDELMSAAVRAMRRSLKRHGDRARIAFAMTADYKPMPGDRKYYFNEARDASRGDDAASRRGKRVEFLQDALSLWHDLFSSRGWKDDAAKVLWDEHIATLLGYQTPEETAENLTNVERKKKRKEYRDKLRAAAEALAVDDRRRAELHEAWKKRWESDDAQWNKRLRWFKDWILPRGKAKKDPGIRHVGGISLVRLATLTEFRRKVQVGFFTRLRTDGTRAEIEESFGRSALDALDRLREQRVKQLASRIVEAALGLGRVKTPKKGNTPKRPREAVDASCHAVVIESLTHYRPDDLRPRGENRQLMTWSSSKVKKYLAEACQLNGLHLREVPAGYTSRQDSRTGAPGIRCQDVPVKEFMQSLFWRKQVAQAEKKVTDGKGDACERFLVDLNAKWKDQTEAAWKSAGSVRIPLKGGELFVSADPGSPAAKGIQADLNAAANIGLRALLDPDWPGRWWYVPCKPGTSEPALDRIKGSAAFEGVQVLPADGAAPAGSEAGKRQPKKSKSKAPKKIEYLWRDPSGGVLAAGRWKQTQAYWNDVQYRAVQLLRKRAGLDSYG

SEQ ID NO: 1427 - protein, 1440 aa, unidentified
  REGION 1..1440: note = Cas Enzyme sequence
MPQQDKPPVTRRAYTLRLRGTDPSNTSWRKALWQTHEGVNKGAKKFGDWLLTLRGGLDHTLADAKVKVGKGKPDRDRTDEERKARRILLALSWLSVESKIGAPVGHIIASGEEVAEDRNSKVVAALEEILKSRGLANSEIKEWKNDCSASLSAAIRDDAVWVNRSKAFDDAVKSTVGSSLTREEAWDMLERFFGSRDAYLAPVKISEDESSEVEQEEKAKDLVQKAGQWLSSRFGTGKGADFSHMAKVYERIAAWTDNAQVGTTGNEAINNLAVALSEFIPASEDLKGVLGLISGPGYKSATRNLLKGLDTKTAVTQQDLESLKDKATTDSLKCEQNTGSKGQRPYSDAILNGVEAACGFTYLQDGGSARHSEFAVMLDHAARRVSLAHTWVKRAEAERRRFEEDAKKIAKVPTPARNWLDSFCLERSLASGALEPYRIRRRALGGWKEVVAAWAKSSCSSCEDRISEARKLQDDPEIDKFGDIQLFEALAEDDALCVWHKDGYPAKATDPQPLIDYVLATEAEFKKRDFKVPSYRHPDALLHPVFCDFGNSRWDICFEIHKNRQSPNPNALSVTLWTGSEIKPVSLRWQSKRLARDLALDQEAQGNGASEVTRADRLGRAASNVTKNDEVNIAGLFEQKDWNGRLQAPRQQLEAIAAVRDNLSLSAEERNRRMSGMMDHIRWLVTFSAKLQPKGPWLDYATTNDLKLDQKNGEIVATPSNSKNEWRGLAYPFWHSDNQEGRKGLAKHCLSRLPGIRVLSVDLGHRHAAACAVWEAVSAEQVKKACQIAGHEAPKASNLYLHLKRKATKQKKDNQVVIEETTVYRRIGADTLPDGTQHPAPWARLDRQFLIKLQGEEEGVRKASDEEVREVYQLEAEVGRTAPMDADDGEVRKPSLPVDELMSSAGRTMRLALKRHGDRARIAHYLITNEKIKPGGIKEKLDEEGRVDLLLDTLVMWHNLFSFHGWQDDEARQLWDNHVAKLSGYKAPERIGEECSGKSRKNKQQENREKLRDAAKALAKDITLRKALHEAWKKRWEDDDERWKKQLRWFKDWILPRGKHASDPTIRKVGGLSLTRLATLTEFRRKVQVGFFTRLQPDGTKAEIKERFGQSALDALEHLREQRVKQLASRITEAALGIGRMRRPAGGKDPKRPGVSVDEPCHAVVIENLTHYRPEETRTRRENRQLMTWSSSKVKKHLSEACQLHGLHLREVSASYTSRQDSRTGAPGLRCQDVPVDKFMLSPFWRKQVEQADAKRAENKGDARERFLCELNTMWKDKTVADWKKAGAILVPAKGGEIFVSASQNSQKAKILQADLNAAANIGLRALTDPDWPGKWWHVPCDPVNFKPIPDKVKGSAAIDPDTPLKDTSVLSEGVTGKKSGKIKSQSKEVVNLWRDVSSKEVSTEGVAWEVYSAYQNQVQVRVVNILRRSACPKDNWEGQ

SEQ ID NO: 1428 - protein, 1440 aa, unidentified
  REGION 1..1440: note = Cas Enzyme sequence
MNRIYQGRVGKAEPIDDKGSPLPAPENWDGLDALWQHHALFQDAVNYYLVCLLALARPGNPLWPIREKLDAHDENGQPDELMVWRRFPRRGIKRPGLRDSVAKYLTPGNDQPTPEECFAAVLAGNALANSEEGRARLDAGLRQLLERCTGAAGCKQAAPEYLPRFAKPDFRGNYGEDSAAVLRQNQAARFPYILHSPETRPDSPELDEFGVHSIALPNEKKPVFQGAEAIAKLKGVVGEWRKRLSESGDDWNRLEALIAKLPDNVELPGYAATSAKGEIKFRLFAMFLFRHVEKSDFTLSLLRQTTPTPKAGTTAPTAMVADSGTGDPIREARGKRGYVFRAFTSLPAWGGSADGAPSWIEFDVAAFEEALKAVHQVEAKKKERDEKKAELQARHDFQRGKTKKLKASGATDEDTRPPLLVGDPRIARLEHLVDEELKAEYEMSEGVEIRYGLHQRTIRGFHDLRRKWNDTIKDAPYSQAAKEQLLGILRDYQKENATLVGSVRLFEALLEEPNWLIWREPTAEQQAEWRKAAKLPADAEFAPDPLQALTDERELIEEIERLSGPIRFTPADPEHSRRQFYFSDVSALDKKGRLRHDRQTLDTEIALNVGRPAQPKWERRWVRIGFSAPRLLRDELNNTGGKDAAFQQAMMAALGLRAGLRKTEKGKVREARFEECTAVALMPEVLPDGGKRILLNFPIKLEDDAIARALGKAERWDSLQFGGADGESYWLRWPGTWIDEKKERKKAPPAPWWRNAKPFSVLSVDLGQRDAGAFALIEASPGNAPKPQSRRLGEAEGTTWWATVRATGMLRLPGENAQVIRDGQWQQEFSGNRGRLATEAEWQEARDICAQLGLVPDKVLGTDPAFHSFPEMNDRLLYALRRAQSRLARLQSWSCVDYDEQQPQRKEAFEKRRAAIKAEIVASLQARSEEQAKPEAEREQDAFERGQWLDDVRPQVEKGAWNLVADRLKREIEREREAIKAQLVRIADRIQPLRGRRWEWVLRPGDTRNHFLRQTNHGSDPRPKLLAGQRGLSLKRIEQLESLRQRCQSLNRALQQTPGEPARLGHSKRGIELPDPCPELLDRLDALKEQRVNQTAHLILAQALGVRLKPHAKDKAERTARDIHGEYERIPGREPVDFLVLENLDRYLASQGRSRSENSRLMKWCHRAILGKLKQLCEPYGLRVLETPAAYSSKFCSLTGIAGFRAVELNPDDKQDFRWEKHLRRLREEREGKRVLSKEDREESANVERLFKQLAGDEWNMQQEAERKKARAEGKWFRPKWRTLLAPMQLGPIFVPLRGKPMQADINAAINLGLRAIASPAADDIHLRIRAMRDGEGFKVRAENAREKARWKDKPLIITVAKEADRKKLLESARLNFFFDTGQVATFDRATIEGMGVPLASGRGIWGTVNQSDWQRCETINNARLGRPQTKQDQDDLNMD

SEQ ID NO: 1429 - protein, 1440 aa, unidentified
  REGION 1..1440: note = Cas Enzyme sequence
MADTDQTAIPTTQRAYTMRLRPAHSSDKSAEARNLKTAEMQSTLWATHEAVNRGAKIFGEWLLTLRGGLDHRLASAGNEGNSWELRNRRVLLALSWLSVEDEAGALTNRDLIVAYGEGCKTQSDNKQERKRKVLGALRRILQERQVPESEIGDEYAPGTWLGDCAPSLSSAIRPDAVWVDRNSAFSRLCEEFSGLDLEYATRTVFSFFGPSEKYFFVADAETEENGAVEGEGADFRQRSRQWVSTHFGTGKKSDSTNISAALQKLADLDLQSFLGRSKLDLLKYCVEILESTPDGDPLNCLRAAVGWSTGRPSKGRLAIQNLPESLTEEALRILQKKFAEEAAEKEASASTKRVPVWIGQLREKVEKLVGIPYVTGRNLIGEYSVMLDHAARRVSIAHTWTKRAEAERRRFAEDGARISAIPLPMKEWLDRFSEMRSGTAGAAEGYRIRPRAVEGWDLIVRRWSQRGCTTAEDRVAAAREVQADWDDSKKFGDIQLFEALASDDAKCVWQVAFHPDPEPLKKYVAAMHALARQVAFKVPAYRHPHPLSHPVFCDFGNSRWAIRFAVHDCKKAEKSGKRVVGPADLHALEAILWNGETILPLELRWASNRLFRDLALDDIDADEAHPVTLGSRLGKSAVPSNKRVAILNVFEENDWNGRLQAPRPHLNRIASLLANGKVQAAEKLRNSLRWSLTFSPRLQPTGPFYEFAAQNGIVANRKGEYFPNAEENRRTERKAKAKLTLSRLPGLRLLSVDLGHRFAAACAVWQSLGGPEFLSEISGRAIESGGAGSADLYIHTRHTDEGGRDRITIYRRLGPDTLPDGKLHPAPWARLDRQFLIKLQGEERAARAATTDELAAVRQMEESFGREPESASSKKRVDELISNAVRTARLALRRHGDRARIAFAMTATYKPLPGDRKYLFSGESAFDAPEARHNAHVEFIQDALLLWHGLFSSKGWNDKAASDLWERFVVTLPGYQSPEAVDEETSGPERKKKRSENFDRLRGAAEALIKDAGRRSQLHSEWKERWEKDDRAWHGCLRWLQDWVRPSRDSRARLQVGGLSLTRLATLTELRRKVQVGFFSRLHPNGAKAQTRERFGQRTLETIERLREQRVKQLASRIVEAALGMGRIKLSTGSDRKRPKTRVDEPCHAVVIESLRNYRPDELQTRRENRALMDWSSGKVRKYLEEACQLYGLHLREVQPSYTSRQCSRTGLPGIRCVDVPVTQFQTAPFWRKTVKAAKKRLFQGKETAEDKFFSDLWDRYGVDSGTKLSAPTILRLPRRGGDLFVAAPVGKFSSANGLLSSTAKRALQADLNAAANIGLRALLDPDFPGTWWYVPCGVRDGNAAQDKVKGSACFSHPKMQLLSASEKSAQKRDIVNAWRDPSTVPLPGSAPWMNTTAYWNAVRVRAVEALRSFNGLLPPNPDLGSVDASLGDSHLKEPF

SEQ ID NO: 1430 - protein, 1442 aa, unidentified
  REGION 1..1442: note = Cas Enzyme sequence
VPASSKPDLTQRAYTLRLTGTDPRDQTWRERLWKTHEAVNQGAEAFGDWLLTMRGGLDPALAVSRSVGKARESLSDVSGEEAKRRRIILALSWLSAESEDGAPSKHVVPHKFDIAKGRTDWQTADALKEILRSCGVPETEIGRWMADCSGSLSAPIRDDAVWVNRRHAFDEAREILGPTLTREQVHSLMLGEFLADYFSPVSLDDDEEAKTTTESTSATEQLEFRKWARGWLSFQWGTGKKSDNTQIASLLAKLSNASLDHLIGSSGEQLIAHLTEILGDAAPKDESDESMNCLRKLVGWKTGRSSKGKMALEMAQQKQILSTADIDVLKKKLSEEAEEKNKNAHRTTQEWARNLRMTIEEMTGVPFISGRNLIGEFAVMLDHAARRVSLAHTWIKRAEAERRRFEEDAAKIDGVPEDARKWLDRYCKDRSLSSGALESYRIRKRAKEGWKEVVAAWSRKECRTEKDRIEAAREVQADVEKFGDIQLFEAAAVEDAVCVWKQDGRASPAFLSDYVVARDAGAKQLRFKVPAYRHPDPLRHPVFCDFGNSRWEIKFNIHEMRKRDAKNSREKKVERIDLQGMSMGLWDGASVSKQPLRWRSKRFTADLVLPKAGGTGETQCVSRADRLGRGASAGDKNSSIRILQVFDEKEWNGRLQVPRAQLDDLANHLHSNGNQWDPRACRMRDRLRWLVSFSAKLQPQGPWSAFAERNGLRPDWKYWPHAVDNKKRQGLARLMLSRLPGLRVLSVDLGHRYAAACAVWETVSEEQIRRACAAVGTVAPAEGDLYLSAKAVNNGKTRTTVYRRIGANVLPDGKRHPAPWARLDRQFLIKLQGEDVGARKASSTEIAEVDKLEEDLGFKRSVLRKGSELAVDELMHESVRLLRLALRRHSDCARISFNLTSKDKLLSGDREEALDPESRMELVTDMLTLWRELFRSDRWTDEWAKNQWQDHIQPSLGDVELPEVSEEANETAQKRKKRDEELRLGLRRAADKLASNPSLCVKLNILWAARWQEEDKQWRPRLRWIRDWLMPRGVGRNGKTHQSIRHVGGLSLSRIATFKSLYQLEKSFKMRPEPDDLRKNVPKPGDESARQFGQRILDAMEGMRENRVKQLASRIAEAALGIGSEERAKDGRQSKRPQQRISAPQFAPCHAVVIENLTRYRPEETRTRRENQQLMTWSSSKVKKYLSEACELNGLHLREVPAAYTSKQDSRTGAPGIRCKDVPVKDFLESPFWNMQITAADQKMRDGSKGDARERYLLALRTQWGTMPDVKKAGRSIRIPYRGGEVFVSAQKTSPASSGLQADLNAAANIGLKALLDPDWSGRWWYVPCDAETYRPIKDKVVGCLAIKPTEPLIQVKGENGQSSDAHTPRRTRNAERRIGSQRESKHNIVNLWRDISAEPVNNERATGSEWRSYSEYWSKVQFRVVNILREQAGLPRDSLPS

SEQ ID NO: 1431 - protein, 1442 aa, unidentified
  REGION 1..1442: note = Cas Enzyme sequence
VTETNQQPTTQRAYTLRLRGVNPSDTFWRDALWATHEAANKGAKVFGDWLLTLRGGLSHQLANEGPADQRKDRRILLALSWLSVEDSHGAPAAYVDPNPVQSLESVLELRGLEQSELKEWLDDCRSSLSAAIREDAVWVNRSAAFDVAAKECPSLTRDEIWDFLEPFFVNPKSYLLPAKSEADGEANEEAPGKEDKAKDLVQKTGGWLSSRFGSGKGANFQEMRRVYVALRRWTRRGTDFESGTSAIQDACAKVGDLLGYCPVRRDADSLLKLISGPGYKSATQNAIEQMAAMTSAIVASDFEKLRTSTAADAKKCRDKTGGKGPRPYAEMIIRQVEAACGFTYLQTGGAARHREFSVMLDHAARRVNVAHSWIKNAEAERRQFEADAQRMGNVPPVALAWLESYCADRAKSSGAIESYRIRKRAVDGWEQVVERWSRGDCKTPEDRIVIARALQDEIEKFGDIQLFESLAADTAECVWKRSGMPSAQPLKDFVFATDATAKKLRFKVPAYRHPDPLRHPVFTDFGNSRWDIEFSAHRAPTELGGLTQKVATQTASLAAHQEKRNTVNAAKRESLDKRIIGLRDDLERTRQQHASMADRHHVALRLWNGKTVETAAMRWSSKRLIADLSLNPSEGVREESAISVTRADRLGRAAAGVGETVGVSIAGLFKEDDWNGRLQAPRSQLDAIARRVDEHGWDAKAQTMVQRIKWLLSFSAKLTPQGPWTTFAERLGLKPQPQYWPHAEANKKRQGHGRLILSRLPGLRILSVDLGHRFAAACAVWEAMTTGQVQDACRTAGVTAPSADAMYLHLKGQNAMGRDSTTIYRRIGPDVLPDGSVHPAPWARLDRQFLIKLQGEDKTARKASPDEIHAVEQFEAWAGRLRGIADPPRKLAVDALMSETVRTARLAIARHLRRARIARNLIAVTESPRGNNQPRPLTDDARLKLLRDTLFDWHSLSTDDRWDDSAARRSWNERMATLADDFQVQRSQSPPAGSEPSKADRKKEEESLRNRLEPLAKTLAAAPKLRQELHDEWALRWHHDDREWQKKLKWLSRWLMPRGGERRDASRRHVGGLSLVRLGTLTEFRRKVQVGFFTRMKPDGSRDEFGPHFGQSTLDAIEKLKDNRVKQLASRIVEAALGVGIEHPGANGRDLQRARQRINDPRFAPCHAVIIEDLSHYRPEETRTRRENRATMDWRSAEARKRLEDACQLHGLHLRDVNPQYTSRQDSRTGAPGARAVEVQAKTFLTWRKQIAQAERKRQENKGDARDTMLLDIHARYKDAIGSALNDRLCIPLKGGDLFVSSDPKSPAAAGIQADLNAAANIGLRALMDPDFSGKWWYVPCDPKTKIPKADKVKGGLLDNVGPLAPATIENQNQKSAKVSKSKTREVINLWRDPSALPITGAEHGDLWSDTIAYWNRVQMDVVKVLSGQRSKPGYALEELPF

SEQ ID NO: 1432 - protein, 1442 aa, unidentified
  REGION 1..1442: note = Cas Enzyme sequence
MNRIYQGRVTSVEIAGLDGSAKAEASKGKKPRQPQWEPLPDWSKALWQHHELFQDAVNYYTLALAAMAAEVEGEGGDAKALRGWVARVRETWSTATRKAETFDGPQQRLAPLLKLAPKEADFDTAARAVLRSSRATPAKRAAAVQQLLVEKGDLNQVCVALLPWLATAAGKLDATSKSAASSQEARRQEIVRQFHQWPEAEALKRADSLELGLFLTQPPKMWVKGQEAAKILRDYFAKACAKFSELKPVEAAFEDFLKEKESQLVVPSPGRRPSGLYPIAAVFRFFPTAKTLAAFREATKTLAEAKDKEVHTDAVAEARVGDQPHFDYFTNLAFLGSEGDDERDTRAVWFEFDLAAFIEAIKAPRRYFEDTLKREAAAGRLRQQIAAMEARGQETPTDQEEGEPLPGFEGDSRITLLRDIVQNKLAWLAEAQGDVDAGPREYEIRERTLRGFAEVKKRWRAEAEKGSLTEARLLEILAEEQAAHRDDFGSATLYRELAKPENHPIWRDPGTQPWHADDPLAAWLDYKELQADLRDKERPIRFTPAHPVHSPRFFIFPKKSEAQPKTPSRRPSKPGLLSRHDPGQLSFTGGIVLRTGGGWVPKVVRIHYAAPRLCRDRIRSVGDSNLYEAPWVQPMVEALGLDKAPDRVNFANCRITLQPASEHDIQLTFPVEVNTEKIRKAVAREAAWQGQFNLHPDGDSFYPASLRWPHEKKPAKAPEPWHAQVGQFRCLATDLGQRDAGAFARLRAACDGSLNQRPSRLIGETNGRPWRAALERSGLFRLPGEDAVVWREMSRLDANNPEDSGQPFDFREELWGERGRPARPWEADDTAELMRLLEAIEEDANGQERPTLLPEDWRRALTFPEQNDKLLVALRRYQSRVSRLHRWCWLLQGDDRQTATAVAEVAECDDLRLVSPELKRLVETGDPRALEELQSRLRDRLERAPRLLERIANRILPLRGRSWRWEKHPRATPENPLYHLTQGGERLDSAGRPVWLRGQRGLSLERIEQIEELRKRCQSLNQTLRRRIGGEPPLRRDESVPDACPDLLEKLDHLKEQRVNQTAHMILAEALGLRLAPPPPNKRALRSERDQHGVYEKILDPQGQWIGPVDFIVIEDLSRYRASQGRAPRENSRLMKWCHRAVRDKLKQLCEVFGLPVLETPAAYSSRFCSRSGVPGFRAVEATAGFTAQGQWAWLAAKKDDCGNPTEEARRLLDVDRELTQAQAELERDWAEQRGSGPCPKRTLLVPFSGGPIFVPISDKADGADLQPAVAQADINAAINLALRAIADPKLWSIHPRLRTQREAGDKPGKGRKPKAGPAGPQPASAARFLTREKRKFGETGKPLEVRWPSNAKPDDTRQPNFFADFAGLAALAEQLGQQNREHAWLAREWTTAEIPGERDTPPLVHGRSLWGCVKAAQWLRIREINAAKLARWKSKLDRMPD

SEQ ID NO: 1433 - protein, 1444 aa, unidentified
  REGION 1..1444: note = Cas Enzyme sequence
LLTLRGGLDHTLADTKVKGGKGKPDRDPTDEERKARRVLLALSWLSVESKLGAPEGYIIASGEEAAEDRNGKVVTVLEELLKSRNVPNNEISEWKNDCSASLSAAIRDDAVWVNRSKAFDDAVKSVGCSLTREEAWDMLERFFGSRDAYLAPVKGSEDESSETEQEDKAKDLVQKAGQWLSSRFGTGKGADFCRMADVYGKIAAWADNAQADTTGNDAINNLAAALNESTLASNDLQGVLGLISGPGYKSATRNLLNQLATKTIVTQQDLANLKDKAIKDAQKCNQNTGSKGKRPYSDAILKNVEAVCGFTYLQDGGSARHSEFAVILDHAARRVSLAHTWIKRAEAERRRFEEDTQRLANVPGPVKDWLDSFCSERSGTSGALEPYRIRRRAVDGWKEVVTAWSKSSCSTSADRIAAARALQDDPEIDKFGDIQLFEALAEDDAVCVWHKEGDAAKAPDPQPLIDYALAAEAEFKKRHFKVPAYRHPDALLHPIFCDFGKSRWDICFDVHKNAQTPFPRALCLTLWTGNGMVSVPLCWQSKRLAHDLALGQDVQNDGSSEVARADRLGRAASNVTKSDEVKISGLFEQADWNGRLQAPRQQLEAIAVVRDNLSLSDQERERRMSGMMDRIRWLVTFSAKLQPQGPWCEFAEKLQLRINPQYWPHADTNKDRKGHARLILSRLPGLRVLSVDLGHRYAAACAVWEAVAKGDFEKECSNAKGKGAEIHYGPDGCKPEDAIYAHLVWPEKASNSATKKAKTEGRDKFHPVTIYRRIGADTLPDGTQHPAPWARLDRQFLIRLQGEEEGVREASNEEVWKVHQMEAELGRTAPIIDRLVKAGWGQSGKQRTRLEALRELGWKPASEAAGVSDDMDADEGDDRKPSLSVDELMSSAVRTMRLALKRHGDRARIAHYLITDEKTKPGGTKEKLDENGRVDLLQDALVMWHDLFSSRGWRDDAARQLWDEHVAKLSGYKAPEEIGEEFSGPERKKKQKENREKLHDVAKAMAQDVTIREALHDAWKKRWKDDDERWKKQLRWFKDWVLPRGKHASDPTIRKVGGLSLPRLATLTEFRRKVQVGFFTRLQPDGTRAETKEQFGQSALDALEHLREQRVKQLASRIAEAALGIGSEGGKGWEGNKRPRQHINDPRFAPCHAIVIEDLTHYRPEETRTRRENRQLMTWSSSKVKKYLAEACQLHGLHLREVSASYTSRQDSRTGAPGIRCQDVPVKEFMRSPFWRKQIAQAEKKQAEGKGDARERFLRDLNAMWKDKTVADWEKAGVIRVPVRGGEIFVSASRDSQGAKSLQADLNAAANIGLRALTDPDWPGKWWYVPCDPAGFRPIKDKVEGSTAVKLDQALRQPAQAQSGDAAKDKKKRGNKGGGKSKEVVNLWRDISSSPLECIEFGEWKEYAAYQNEVQCRVIRILEEQIKGRHKQPHEGSEEDDISF

SEQ ID NO: 1434 - protein, 1445 aa, unidentified
  REGION 1..1445: note = Cas Enzyme sequence
MPRSADSRSKYPASNQRGEAVNRIYQGKVTKVEILDERDSQGETKWLELPAAEWHAALWRHHELFQDAVNYYTLCLAAMAAGVKGDSPQAKALGSWVAKVKENWTTASRRAQVFDGPGERLAKLLKLKAGETGFDKAAAHVLRTSRATGPQRLAALLQLLDEADKGDLNQVCVRRIAFLCPARPDSETRPTSEALASSQVVKRQEEVRRYHRMPRSEALEAASDLKLGLFLTQPPTQFLKGQDAAKELSKKFAQAAARHPELKKASAKFQKHLAICGGKLKIPAPGRKPSGLYPLAAVFKYFPCREALDAFLQATKTLAEGKDKIKAEDAIDDARVGDKPHFDYFTNLALVPGGDGGRETRAVWFEYDLAAFIEALKAPHRYYQDTLKREAAAEGLRRRIAAMDGRGCEASGDDEAGEPLPGFEGDERIRLLQIIVRDKLKWVAEAEGGDADPEEREYTIRGRTLRGFGEIKRRWRAAAEDGRAKENHLLDILAAEQTEHRDDFGSSALYRELAKPMFHPIWRDEGTQPWHAEDPLRAWLAYNDLKAELVDKEQPIRFTPAHPECSPRFFIFPKRSESKPKKGERIARKPGLLSRHEPGQLAFTAGIVSPTAGGLSPKVARIHYAAPRLCRDRIRTSGDSDLHEAPWVQPMMAALGLAESPERVNFANCRITLEPTSPSDIQLVFPLEVGAERIKKAIASAFSWERQFNMQPEGVGFCNASLRWPHEKQLSKAPSPWHKEVDEFRCIAVDLGQRNAGAYARICVRSGRNPGKRPSRAIGETGGRRWRAELERAGQFRLPGEDARIWREKSKLDARRPDDSGLEFDFREELWGDRGRPARDWEADDTAELMRLLEAPAEDERHSILDNGWRRELSFPEQNDKLLIAVRRFQSRIARLHRWCWMLRGDDRQKDIAWTEITECEDVRLVPAELRTAAKKRDPRVKEGLERQLRERIELAPDLLVRIANRVLPLRGRSWRWERHPSSTPRNTLHHLTQSGPPLDSGKRPVWLRGQRGLSLRRIEQIEELRKRFQSLNQSLRREVGGKAPIRRDEAVPDTCHDLLEKLANLKEQRINQTAHMILAEALGLRLAQPAPDKKALRQRQDQHGAYEKILDGQGRWLGVADFIVIENLSRYRASQGRAPRENSRLMKWCHRAVRDKLKQLCEVFGLPVVETPAAYSSRFCSRSGVPGFRAAEIAAGFTKDGQWRWIAAKKDEHGRPTGEAQRLAALDRQLAEAQIALEKSLVGERRPGPCPKRTLLVPSAGGGIFVPIVDAVKRSEMQPALAQADVNAAINLALRAVADPRIWEIHPRLRTMRAGIGQTGKGKGSANRTPGTDEMRLLTREKRRYGEKGPAIAVHRSDSAGKNDTAQPNFFADLAGLAGLAEKLSGESREHRWLRDEWTTADIQGEEGAPELVHGKSFWGCVKAAQWSRIQEINGRRLSKWRTK

SEQ ID NO: 1435 - protein, 1445 aa, unidentified
  REGION 1..1445: note = Cas Enzyme sequence
MNRIYQGRVSNVEIPGNKETPWLPYDSDPKIAREKWQKSLAEHHQLFQDAVNYHICALASLGSSPGGKLTRLRELLKSVWEGFDKKGQHRDGMRDSLQRALLFDKPPTLEKVMNWFIKPLKSDSIPEATYEKAGEFLLFKLGGDTAIQQGGRDFLPMFCDVDSKATFKLSSERRGRAEDELRLQQELHKNLSQKEITRLSNSITLGSVVNLQPDSKPDTGLVIHERLKVAAKTFEKEISKELFEKWLSKLDSKFSLPKSRGGNINAKRVDACMLFLAFPNEITKSIFQGTFSAPKEKKSIHADEDKGKAKDDETRFIVDGDDPIKLSRGRRGFVYKGFTALPIWNGDGERMAWKEFDIAAFKEALKVYNQFQQNLEKREDKLTDFASKLLIMDGERAKETYSSKDDAPLRLLLEKVWHDTNGKPKASTEESGEEVALPHFTGDPRIERLRKIVNSDLAEEYRLTDGRRTPYGLRRRTMKGWNEVKRKWQGIVKWGEPFTTEKQKKLKDVLDDLRGGEKREQIGSHKLFEALISDEEAWNIWREPDSKFQKQINESGWATDPLDAFREYCEIREAMEEVFTRPLNFTPADARYSRRLFMFTDVCSFGKDTGDYRHDLKNLAVIVPVAMKNNNGKYFLQRCRLSYSAPRLLRDHIRDENGNYVQDWTQPMMAALFGTTEEVVNPQQLKDAAVQLMPDFNTKGERRFLLNFPLSLDDTLIKKRIGKSNLWEKQFVSWKKGAQLPFLRWENDFDGKEPFRWWKKVTSFQVLAADLGTRHAASVAVIECSKKRKENSRFIGSPDKEDWFGLYRYGTILRLPGENVEVLRLKTEKDNGGAAKDFREELYGEKGRLAEREECEETFEILAALNQSDLLKYASSVEKLRQDLSFPEQNDKLLVAVRRAQNWIATCRSWCWKLTQPEDEKQVEATLTQIQEQKQMPQWQKLANGNKQDIKKLTKALYEAIETQREGVQTQLLRLTNRILPLRNRRWEWIEHPDKPDCHLLQQTQEGTGPKHVKLRGQRGLGMIRIEQISELRRRWQSLNQSLRTKPDQRPLTAAEMRNEIIPDPCPDILAKLENIREQRVNQTAHLILAQALGVRLRRPKLSSDYREVTDTHGEYEVFRPPVDMIVLEDLSRYLSDQGRAKSENTRLMKWCHRQVLQKVKMLAQPFGISVLETPAAYSSRFCSLTGAAGFRAAEIGWNCRDDFPWRDQLEVKLKDLEVEIKESAGNTSKQETLRRKYTIVKTVKVLFDQLKKINKTDHPYHTLLAPQAGGPMFVTAKEILHPSPSKERKEKGNINVLPMQADLNAAINLAFRAVAHPACADIHHRLRTEHKKNQPDTFLTREKRRFGKETVEIRVKEGNWPPKESKTNFFYDKYGIASFGRARLENEKTTDFPYASGPGLWKTVNDRLKQWDRCMEINKERLKAWGISVKDLTEKSNQDDDLPM

SEQ ID NO: 1436 - protein, 1446 aa, unidentified
  REGION 1..1446: note = Cas Enzyme sequence
MGMNRIYQGRVSKVEIPKPGDKANPWQPLPNWQDILWQHHELFQDAVNYYIVCLLALAGDLCAKQRELRNRMTTKPEGGNEEPLYVWDKFRRRGAWRRGLGDSVAPYLCPGKADVSSEECFAAARAGCEASNEGQDLAFSELLFVCDGDNPIKNQGRWMFDRFCNPKYTGSFPFDATADLREKGEARLKSDLHKLSNQSELESFSQQAELGWVVNLTRGANTFEGEFARERLLKSVVHFQQAFGAKANTEMSNRVSTLLSKHETAKKELDDIAQHIKAMAADALPKIPANNRGIADRVEAFMLFKQFPSAFTVELLKVSFPKDDALKAEKPQSTDAPEIRFTRLGGDAIELARGRRRFVFRAFTSLPSWGGDNSGIPQWLNFDVAAFKESLKAIHQVDDKAKEREEERNQKLAQHKYQLGETKKWKGGGAGEEEQRPPVLAGDPRITRLEHLVDVELRAEYEMSEGVEVKYGLHPRTIRGFRDVRKLWNEALQPGQSYSAAVREQLWKLLTDFKKENAETMGSPVLFDALVEEANWIIWCEPDATTLTKWRKAAGLSEGAEFCADPLQALTDERELLAEIERLQDPIRLTPADPQYSRRQFYFSDVSDLTKKDRLRHDRSYLDVEIAEKLEGKWMPRLVRIHFSAPRLLRDQLKSDEDGKESAWQQAMMAALGLKAGLVKKEKGKLRPASFAECAAVALMPEVTASGERRILLNFPLTLEDDAVARQLGKAARWDANQFGPNFKNSSWLRWPSTPDANARSRPWWESSEPFRCLPVDLGQRDAGAFALLEVTPGTAPKPQSRKLGNDGSKNWWATVRATGMLRLPGEDAKVFRDGNPKPQDELSGERGRNLVAGEWEESRDICTALGFQPDKLLGADNVRYSFPQLNDRLLYALRRAQARLARLQSWSSVAYKEPDEKKWIAFEKRRKRIKEQIAEAITIRTAEESKAEKDRGQELIKRSDWLNEVKPLMEKEAWDAVATRIKAEIKSEREIIKRELVRIADRIQPLRGRWWEWVTRPNDTQNHILQQTERGTDGRAKLLAGQRGLSMKRIEQLDSLRQRCQSLNRALRQEPGKPANLGRSKRGIELPDPCPELLDRMEALKEQRVNQTAHLILAQALGVRLRSHTTSAAEREKHDIHGEYERIPGREPVDFVIIENLKYYEMTQGRARSENARLMKWCRRHLRDKLIQLCEPYGLRVLEEWPADTSKFCSLTSVAGFRAVELTPEDAKEFRWKKHLDRLDDPERAKKLNKPERRESQRVQQLFGMLAKVNADLLKDRPKRPKWRTLLAPVAGGPIFVPMRGNPFQADINAAINLGLRAIAAPETGEIHLRIRSENKSGKFLVRADNIREKARWKGSKPPEIIIPDEKHRADLLAEARPNFYADLGGVADFDKAEVSGQQNFASGRGLWGTIKGNERREGKDWLRVDEINRARIQKKERGNDDVPM

SEQ ID NO: 1437 - protein, 1446 aa, unidentified
  REGION 1..1446: note = Cas Enzyme sequence
MPQRAYTARLRPLPEQAAALWHTHCAVNRGARAFGEALLTLRGGLPHTWVDEIPITEKRTQRPPTAEEQRWRRRLLSLCWLTVEDTRHAPERFRILTTDLEATFRQILVEQGVPESDRQQWADDCLPALNARIRDEGTWVNRHAAFREFAAKVEASDDGKLFAGIEGWDLLGHFLGTPEAFLSKPATDTEDIASNGPSSDPAPMVQAAGHFLSARFGTGLGSDYERLIQSYGVIANWSDEDLSGRPGTAAVNSLAQALAVPPENSSILAAIAAKGRPSATRIRLEALLESASIKPEQIARLKEAAADNLAEARAKANGAGKGARVYAGLLLSVVERACGLTYLCPQGGASRHREISVMLDHAARRVSAAHSSAKNAEAAREKFITESRRLDEIEQEHPAAFQWLRDYCARRTEDTGALEDYRIRRRAVGGWSAIVARWARPECKTAQDRIDVAHELQDTEDKFGDIQLFEALASDEATVVWRAPEGSPEALADFVRGTDAKVQSRRRKVPLYRHPDELAHPVFVDFGNSRPGVVFHAAEQLRELRELDRELAAIPPAGTANPKQEKKRKRLGKDRVELLAKAAECRRTLDLDVLLPVNTTGTLTLPWTGSRLATDLGLDIDPDKLAALRDAPRNTRLGRAAAGLEPDVPIAPLAALDKVNWNARLQAPRDQLDAIDRLPANSPNRAPLIAKLRWFLSTSPDLPKTIGPWKKFWKANPTGPDDRAPHVAANKVRAKHSRLELCRIPGLRVLGVDLGLRHAAACTVWRVLSSADVAELCKTAGRPTPAADVLHSQLPRTDGKPGRVVLRRVGGDTLPDGRPHPAPWALLERQFLVKLPGEDEAPRAASPAEIAEVRERLAKLGRSDAATLDLPRDIGELMGECVTAVQRGLNLARDLARAVCGLTESADAACISAALAHAHRAATGDRWRSAEVAAAWQRHLGELPVPPSDRTRKKREESLLTKLAPAAQRLVAAPELRAALSADLRIAWERQSTEVQSSLRWLRRWLMPRIDRRGFHDRLTQEEQESHLSRLGAARHLGGLSLDRLSLIESLWRTQKAFAMRPTPDNLRANIPAEGDTHFERFGQRLRDTFEQLRENRVRQLASRLAEAALGLGAAPERDTRSPLDPGERRHLAARASVGTHPVCHAIVIERLDHYRPDETRLRRENRGLQQWAAGQLKKQLSDQCELHGLFLRDVTASYTSRQDARTGAPGLRCVDVPVADFVATTGWWAKRREKAESAEQALMSEIFARWQPAARTWTDRWGHWTFSADGKWQLARRSAYAPDKKPTTPLPLRLPQRGGDLFVSAADGSPDIQADLNASANIGLRPLLDPDWSGTWWHLLAEPLDAAGAFRLVADDIKGSAAVEKLTVLSLGQTAAQSVATTKRKRRQGDTAITRYNLWRDPAGTPLPETGWQLYTDYQRSVLSRVCDRLRRHNSDDPAAAQELV

SEQ ID NO: 1438 - protein, 1446 aa, unidentified
  REGION 1..1446: note = Cas Enzyme sequence
MNRIYQGRVSKVEILDGAKKNPAVLKTFTAKDLESQANPLWEHHEIFQDAVNYYLVALAALASGVDLSGRLISPHERLAKDLLLRVEASWDRFPKSVPGPVKPRALRDSLRKWLGLDGSATLTDAFDVILHGNPSAPDLRLLGLQLLLNKCGGESAIQQEGRNYLPKLCVAINTDGKPYSGSWDYDAVAQDSDAGKDRLAEVLHGEPSIQSIEGLALEMEIQWAGIKCKAGESLTGENLKKRLQTALEHQIKRFGSSQTAAEKDFIQKHPSAMDELRGLISRVTDLPDEMDLPVNKGGNISWDLVHSAYLFKVFPSLVTAGILSLSVKKPANRAKSAKSKQGADYARFGDDPIKLCRGTRGYVFPAFTALPCWNPTAPGMPVWKEFDIAAFKEALKSLNQFNQKTMEREETKAYLRGRIAILLGSEVKGWKPRNTDAGEPEARPDALNQDLLARSRKLESRLTEQLADTVVDYDGAKNHAFGDAVLTLIPGQWQLSVSALRGFRDIAPEWNKLAEKKGESLTSGDLQEAVKDHQQQEKNRKQLGSVPLFLMLCEREFWPLWRKADDSSTEEETEYNRFLFRYLGLHADVRDYLRSLNPINLTPAEPRHSRRLYMFSDVEKKEKMFKPDGTIEVTLAYLEGGVCVKKPARLGFTAPRLRRDELTGGTESRWLQPMVAALGLTPPESQARFISAVSLMPDFSNSGDCRLLLNFPTTLEAGWLHEQIGKDALWNGQFNGVKDKNIHLHWPQNEPKTKQVTANPWWKNPVVLANGFTILSVDLGQRTAGAWALLRITPHTPASKKPVRRIGHDGSREWFAEVLQTGMFRLPGEDQKVRGKDGQLARELSGKAGRSASADEYEVALGLARRLGAENPERWIGGHPEAQRPEFRDVEAKSMPEQYDSILALANRRLSRLATFHRWSCFAANLEKQAADPVRRQGLIDRLREELEHWEDQQVRKWKELVENGFIKEFSESAGMEFEDYRDELGSILVELANRIAPLRGKVWKWKLRGGGSCYGELEWEEIPNEKSPNIRGQRGLSMERLEQLEGLRKLFLRYNRSLDKKPAQPAKVGFGFQHDSGEPCPQLLEKIDRMKEQRINLTAHHILAQALGVRLREHQFTAEERESRDIHGEYEVIPDRKPVDFIVMENLDRYLTSQGRAPSENRRLMKWAHRAVRDKLKMLAEEPFGIPLVEAAAAYSSRFCAKAGHPGMRCEERPALDTYLREQLEKKAKTLPAKGRADHREIYRSLLEQFAALEKHNADRKADNPKKMLRTLLLPKAGGSLFLPVLGSGIVQADANAAINIGLRAVAAPESIDLLHKIRTERKKEKDAIIPQKNNAREKAAFKEDSKIEAIKEFSNKVTSAPKPNFFHLSDEAAAHYGFDQATLEMKGRTLKLVSGVAFHSLTEDLALKRIVAMNDTRLSLYGICIETMRESCLDQGDPDDDIPM

SEQ ID NO: 1439 - protein, 1449 aa, unidentified
  REGION 1..1449: note = Cas Enzyme sequence
MDVPLTQRAYTLRLSGDDQGRWRETLWKTHEAVNRGAKVFGDWLLTLRGGLSHALAEAPTPEERRDRRIVLALSWLSVESERGAPAKEYQVARGHTVEALRTILEARGANEQICDWIADCEESVTAAIREDAVWVNRAKLFDEVCRDQDIALAREDALTLLWALFTDDYLVLPKVSSRNRSRSDDQARTATEGADERAKPDDGATAAVIASGKGAGQRTRHPFSHIFGDPSRQKKGWDRQLHLREFWKDHLSRELTKESGIPLAPPSVRRQNDERSPTELHREMFSKAASRLAQIHTKRKQQEVERQERKNADQNLTSLESDSTYQPALAKLREYCEERGRETGALEKYRILPRQIAGWENVVKAWANVKDDTSAEEQRIEQAKRLQDEEADKKFGDINLFIRLAEDEYLSVWRHGDRPDSSILKTYVEGWNARFDAVSLKIAAYRHPDPYFNPIFCQFGVSRPDIAFSRLDAEPSADERKVRMLLWDGQAARMWPLLASSKHLAAEIGSASEMPADGARVTRLTRFSRAAAPSVTSSTDKVRVAHVFDDQEVRKRKLIDAEAEKRDRKKPEWNGTLKADRQALLKIGRLSAANPTKVEKLKLRLKWSLIVGMELKPNGPWPNYILECADKTPFLRTVRNDELKDRRDPNSGFRRRRGETFLSFQWPWEEINKPLRQRADGSFATDSKSARGDLARLGLSRLPGLRILSVDLGHRFAAACAVWQTLSRDEMLAACAAANTPAPAPETLWIRLRDAAGKHPTTYRRLGPDTLRDGSAHPAPWARLDRQFAIKLQGEERPARHACSDEIEAVVQLEKALGFARSEELPKRIDELMAYAVRVTRLGVRRHGDRARIAFALTADHKPMPGDRKEWFAKQPGDTQERARERHQNHVRFIRDALLLWHELATSARWDDPAALELWNRQILPIVKSLPALSCPKDKKEDAWRQVWQGLQSELQRRLGEDDDITLPERKQRKTERELVRELLEPVAERLISNSGLRETLHALWAARWQQDDGAPARVKPEGKETRVEAGATGWYARLRWLNRILLPRESNRRTREIQDVGGLSLTRVGTIRSLYQLQKAFFTRLHPNGERDFALEGFGDEILQKMERMREQRVKQLASRIAEAALGVGIEQPRKRGKQPKRPTDRIVNPRFAPCHAVVIENLTKYTPDELRTRLENRRLMDWSAGQVRKYLTEACQLHGLHLRQVSAHFTSRQDSRTAAPGLRCAEVEVQEFLSARFWKSEVARARKRLKETDASAVKHRAYDLYLDDLERHCRANGSIFPKQVLIPQPGREVFVSAQSDSPAATGLDADLNAAANIGLKALLDPDWEGRWWYVPCDARTSIPDKNKVAGSLVFKTLAPLQAPQPVAQDAAPRKRTRKQRTEQGVMNLFRDISAQPLNAESACKPYGDYWADVEVRVIQRLRAMYGVFPQMASTAGLPAATMYRSDS

SEQ ID NO: 1440 - protein, 1449 aa, unidentified
  REGION 1..1449: note = Cas Enzyme sequence
MGVIMNNKKNNKCIWDNFTQRYKVQKTLRFELKPVGKTEENIKKHNIIESHWENGHNITSGKDKDLADNYKVLKKAMNKMHQLFISKALDYEILSKIIKSDDIENLFSLWLNRDNANSDALNDNKKDLLQEEKLKFSKKLKEAFEQAANDWKNLSQKEMKNIESEKFSIKKNGVSLIHENSDSFSILRWLLEKNAIDITKDDNTEYLKKELAEVVNSFTGFTTYFSGFNQNRKNIYDTEGDNKKLKKTSIAHRILEENLDFFFANIQRWQKFQANIQKTENVKKLKEANFSVNDKLKRLQKELKNRNALISIENTFNPESFLHFISQEGIDLYNITLGGLPAQAGKEKIQGINEIINLTRQQLHGEKRDFSALQPLYKQILSDSERNFIDAFENDEDLIRELKYFYEDILSKKDRNLIETGAQKKRNFIEQVYEEFKYLFSEIKSNPDLFYLSREFIRKISVDLFGGFNAIDNIYFNLIENKKQENGNALPKAEKLKLKKAKTLSFKDINKMILICIENDPEALKETWPKDISITTYIEHKLKALLECENKNHSEKNTIKKNSENSAIEKIFKENSFEKKDEAKNSIKEFLDSALELHRFIDSFIIRSKDLAKEQEIDTDFQNRLQNLLLQFSVLDLYNKARNYLTKKPYSIDKIKLNFENSTLAAGWDINKETANKSLLFIKDKFYYLGIMPQGKNFSFDYQINSNGNENPNSKIMQRKKDLQKEILAAKNEPSYRKVNYKLLPGPNKMLPKVFFSDKNIEFFNPSNLILKIKENETFKKSSKNFILKECHTLVEFYKNALQKHPEWQNFNFKFTDTEKYEDISQFFHEVESQGYKISFDNIKSAYIDKLVDEGKLYLFQIYNKDFSMHSKGKENLHTTYWRMLFDDKNLKNVVAKLNGEAELFYRPASIAEKNRVVHKKGEALTNKNVKASKKTSKFDIDLIKDKRFTENKYFFHCPITLNFKTDGNSYLNSEIQSFLRDNEKVNILGIDRGEKHLLYYSLINQKGEILEQGSLNTVKSKYTGGEIETPYHEILDKKEKGRDAARKSWQTIENIKELKSGYLSQIVHKLARLIIDNNAIVVLEDLNAGFKRGRFKVEKQVYQKFERALIEKLNYLVFKEKEFGKPGHYLNAWQLTGQFESFEKLGKQSGILFYTTAGYTSKVDPVTGYMQNIYHQYDKLKTRDFFQKFESIKYNGKYFEFIYDLRKLYSGDIDNLPSNTIWKVCSCVERSRFDKNKKENIFFNVNEEVISLFQKANIEYTVEENLLPLLKKVDDSVIKSLHYYFTLILNLRVTDPDIEKGKDENDFISSPVEPFFNSKNLRESESILPKNGDANGAYNIARKGIIILHKNLLRQKLHGILDKNKIINYNTELKKYKDETLLKPLLEEWCLIVGREVPEVISLYENKKLSPLAEKFIKFIKSFTVTKEDWQNYAQKQDVVKLQIEKMK

SEQ ID NO: 1441 - protein, 1449 aa, unidentified
  REGION 1..1449: note = Cas Enzyme sequence
MNRIYQGRVCKVEVLDGAKKNPAICKTFSSKDLESQNNPLCEHHEIFQDAVNYYLVALASLASGVDLSSRELSPHERLAKDLLKRVDASWGRFPKSVPGPVRPRSLRDSLRKWLGLDEGATLQDALDFILAGNSSAPELRLLSLHLLLEKCGGESAIQQEGRTYLPKLCVAHNTDGKPYSGSWDYDDTARDADTGKNRLAEILHGEPDADAINALAAEMEIPWAGIKCKPDERLSGDELEKRLLTAIQHQIKRFGDPQTATEKDFIANNPTVTGVLRDLIPRIADLPQGMDLPANKGGNISWDLVHSAYLFKIFPSATTAGILSLSIKKPANRAKSAKSMQGTDFSRFGDDPIKLCRGTRGYVFPAFSALLRWNPVAPGTPVWKEFDIAAFKEALKSLNQFNQKTMEREEVKAYLQGRIAILLGSDVKGWKPRNTDAGEPEARPEPLDRDKQDLLALSRRLESRLTEQLADTVVDYCGAKNYEFGDAVLTLVPGQWQLSVSALRGFRDLAPEWNRLAEKKGKFLTSGDLQEAVKAHQRQQKNRKQLGSVPLFLMLCEREFWPLWRKVDDACTEEETDYNRFLFRYLGLHADVRDYLRSLEPINLTPAEPRLSRRLYMFSDVEKKEKMFKPDGTIEVTLACLEGGVCVKKPVRLGFTAPRLRRDELTGGAESRWLQPMVKALGLTPPESQVRFTSAVSLMPDFSNSGDCRLLLNFPTKLEAGWLHEQIGKDSLWSGQFNGVEDKNIHLHWPQNEPKTKQVTANPWWKNPAILTNGFTILSVDLGQRTAGAWALLRITPHAPVSKKPVRSIGHDGSREWFAEVLQTGMFRLPGEDQKVRGKDGVLARELSGKAGRSASADEYEVAIGLARRLGAENPERWIGGHPEAQRPEFRNIEPKSLPEQYDGILALANRRLSRLATFHRWSCFAENLEKQAADPARRQGLIDRLREELEHWEDEQVRKWKELVENGFIKEFSESAGMEYDDYRDELGSILVELANRIAPLRGKVWKWKLRGGESCYGELEWEEIPNEKAPCIRGQRGLSMERLEQLEGLRKLFLRYNRSLDKMPGRPAKVGFGFQHDSGEPCPLLLEKIDRMKEQRINLTAHLILAQALGVRLREHQFTEEERESRDIHGEYEVIPDRKPVDFIVMENLDRYLTSQGRAPSENRRLMKWAHRAVRDKLKMLAEEPFGIPLVEAAAAYSSRFCAKAGHPGMRCEERPALDAYLREQLEKKAKTQPAIGRADHREIYRRLLEQYAALEKHNNGRKEARRGKMLRTLLLPKAGGPLFLPVVGSGIVQADANAAINIGLRAVAAPESIDLLHKIRTERKKGKDAIVPQKNNAREKAAFKEDRMIEPMKGFSNKVTSAPKPNFFHLSDEAAAHYGFDQATLGMKGRTLKLVSGVAFHSLTEDVALKRIVAMNYRRLSQYGICIEIMTESCLDQGDPDDDIPM

SEQ ID NO: 1442 - protein, 1450 aa, unidentified
  REGION 1..1450: note = Cas Enzyme sequence
MYYRIYQAKVLEVAPTSKKATKKSEPPTGVECQANPAWDTHAIFQDSICFYVCAVAGLAPKNHPARRLVESEFPEIGKRLHQFNKNFDPNSFESFLNYIYGPKLFADEKARLDVFAFMQGKAVNDEKQKLKKLDFFGSNFIRRLCSEHTEQKDEGARIKADNYFARKYTEFTRLQGNPDFCDKSFSESIDLAYCFNSPGKTTQGAKALRDYRFAFGYDIQTKKLKVDLSRGDIKAEHIRGLDAVIQELRFRDGKEEDEFAASFKFESHAGEGRANPRKWFCLRYRFCASRSESKITRDALLGEISGLTDQGEEAESKPKPIEIARRISGQYVFPYFATFASKPEVAKGKKFQAWFPDLEKAAFIKAVEDVFKYRIRTDDRIARRDFALRKRDFMNGDGFKGYIVDQRLIPENAVASLSKEDKLLLRNKKVRTIPGFKGDPRVENFEALLATLDEGIGFTVTYPTLGGWGRLRREFQKVHNRMVGKKTVAEIITALEEKVTEAQSKDPLGFGSEKLFKALTKNSFWNLWLPDTPALPNAARDFLYAKARYQELEDELEHLQGAINWTWPDPRKSPREFKFDVTPQVKASNTTTELIWKNGSGLDKGKFTLRIAGMRMKRDGLWKTGTDTVDWSPPMVAAVLPENPPETNLKGVSVSLSFSKDEAALAYLNFSVPLSAKELKSLAGHRAEITKHKDVSDQQLKPVWRRQLISDRNGDRHCLRWPSDLKKAVGDDSEEPEEEGKGLTPSELWCGEGTDAKFTLGIKEFPECEKLTSFRVLGVDLGIRRAVSFCVLEINTHGEGRAISPPDFQPCISAKIVRLGTHRLPGEDRYVSRIANQNDLIKFPELNLVLGKKYWLPELSGAKGRKPDDTIAHETAEFLRILNALLPDERAKDFNSLSFSEQNDELLFALKRRLGRIKRLYRLAWLLFGTNRYKPGTEEIEELNASMIAANEAKFLEEIKPTERDEETLDLAKDELKNLREMASHVPLPKKQIEDEIQRLLRQWTAAEKDGHSSLVSLATEVANRCHPRNDCVWLWRENKLGESRLLSQKIRRTPGQRGLSIDRIEQLELLRRCFMSLRDVSERKFAQPVCLKRGKLKPECCPALLERIDRMKEQRVFQTAHLILQEALALRLTSTDEKPRDETIGQHGVYKRMDGHKPVEIIFLEDLSRYRTSTGRTRRENGRLMKWCHGRILDKLKQMAEPFGFVVATVPPDFSSQFSARDGAGGVRVAEVTAGFEKNYPFSKIIKQRKKDGEPTALAKHVQSVVDTFAKLPKTDPKLSKRTLFVVVEGGQLFWPVNRDKPDQADVNAAATIAFRGVAHPLKLDIHQPIRCEESKENKMLIQDWRLGKADSNFGKQELLDLHRKNENNEAVLQSTEDENEKSFARLFSITGSGFSENDFKEESFYTLPNGEQAVVQWSFFNTVGFRVRRKIEDVNKSRLENWLKKFGS

SEQ ID NO: 1443 - protein, 1450 aa, unidentified
  REGION 1..1450: note = Cas Enzyme sequence
MEQFTNLYQLSKTLKFKLEPEGNTKTTFEKWVNEMNSTSEDSNLFAKDEKIRDAYLVIKPIMDKLHEQFIEKSLTSDEAKHIDFSEFLAEFRDKKKRRSKKIQKIEERLRKDIGATYNVGGRFFSAEIEKAVEKLKEEKNNGEESEKKSKDEETDNKRKKTPYDCLTEKKIFSYLCANAKTLAKENGITERILNKHLEQFKKFWGYLDGYNQNRENYYEVKEEAATAVATRIVHENLPTFCSNALRFEKHREEYLGIYQFLKDNNCEAKIKNSQGKEVEAEAITETCFLIGHFNNCLAQSQIEEYNRIIGNYNYLINLYNQAPHDEKDFKKIDEFEKLKKQIGCGKKKTMFAALIKDKQNELTDEQKKKENKEGDILTVETLLNRAKDAGDVMFVKDDNKDNDKAEIITIPDFIQFLEGCDNWDGIYMSKAAINKISNRYFANWHSIVDLFIEIYNGKDKELKEKINACITYDKKREEPLKLRDAVELSGFFAVLDKVKSEHFFKEWLFKEDNTNEYCGDKALSPSKNLIKLLCHDMKYYTEEVFLKKSSEIVALKKYKDEKTQAGKEDENIKKIKEWFDAAADAMSIVRFFAVRRSKMKGSLPNVTMEQALSNLLYSEDIQWFKWRDLIRNYLTKKPQDDVKENKLKLNFGNPTLMKGWDLNKEPDNTTVILRKNDWYYLGIMNKEYNHILDNVKTSSNGECYEKMDYKQISLSSGVGGFVRKCFSSAQEYGWHCPDNCLNEDGKIIIKDDEAQPHLKAIIDCYKDFFDKYKKDGFEYKDYNFNFLESNEYEKLSDFFRDVEQQGYKISFRKVSVNYIDNLVKEGKLYLFKIYSKDFSTGKDGGNGSTGNENLHTKYWKRLFDENNLKDVVYKLNGKSEIFMRKPIAKEARIKHKKGSKLVNKRDINGEIIPEHIYKEIYSYVNNNTKISKEAKIYIDEKKAIIKDAKHEIVKDNRFYGETNSYFFHCPITINFKAKKYKEPQYAYPEVNAKITDALQQSDNLQFIGIDRGEKHLVYSCTIDKNGKIVKDKNNEWKCHHHDIITVIRKDKDGKIVEHKTNYVQKLEAVAGERIIAKKNWQAQRKIKDLRNGYISHVVHRLVEEVIKEDNKRIAPHAYIVLEDLSTEMKRGRQKFEKQVYQNLEVALAKKLNFVVDKEAEQGELGSVSKALQLTPPISNYQDIEGKKQFGIMLYTRANYTSITDPATGWRKTIYIRNGKEEDIKKQILDKFNDFGLEGKDYFFEYREANAGRIWRMYSGKNGEPLTRFRNKREKLTDKNVWVTEPINVVEILDKLFADFDKTKSFKKQIEDDGIELKKIEGRSETAWQSLRYVLDMIQQIRNSGIEKKDDNFLHSPVRGENGEHFDTRNHENNGELSAIKDADANGAYNIARKGLIMNAHYRYWVNQGRPEIKKGKTALSLYVSDAEWDMWLLDKEKWHEHLCEFALRTK

SEQ ID NO: 1444 - protein, 1451 aa, unidentified
  REGION 1..1451: note = Cas Enzyme sequence
MNRIYQGRVSKVLDDQNRELDLHVLWQHHELFQDAVNYYIVCLLTLAGDLCSKQRDLREKMITKPTVEGEEPLHVWERFRRRGVWRRGLRDSVAPYLSPGNTDASPEECFAAVLAGNEIATIEAGRKLLDRGLRQLLSKCTGASGCRNAAPEFLPRFCDPNTKCNFVEDAGTLQRDADKAMLPFVLHDPTVAADSPQLDPLGVHSIAWPDGRKPEFKNAEAKEKLRLMLQRWRETQPEHSSDWARLEQKIEALPDDLVLPSYAATAAKSNPVLARNAMLRIYAMYLFSRVERSEFTLNLLRATTAAPKPDAKRPELKVMNGDGDPIRLARGQRGYVFRAFTGLPSWGGNESGEAKWLRFDVAAFEEALKALHQVDDKAKEREDERNQKIAQHKYQRGETKKWSGGAAGEDEHRPPVLAGDPRIARLEELLRSDLAQEYSMAEGVEVEYGLHPRTIRGFRDIQKLWNEALKPGQGYSDEARKELWRLLTDYKKENAETIGSPVLFDALVEEANWIIWREPEAATLTQWRKAAGLSEGAEFCTDCLQALTDERELLAEIERLRDPIRLTPADAVHSRRQFYFSDVSDLTKKKRLCHDKNYLDAEIADKVDGKWTPRWVRIQFGAPRLLRDQLKSDTEGKESAWQQAMMAALGLKAGLVKKEKGKLRPATFAECTAVALMPELTASGERRILLNFPLTLEDDAVARQLGKAARWDANQFGPNFKSSSWLRWPSTPDANARSRPWWESGEPFRCLSVDLGQRDAGAFALLGVTPGTAPKPQSRKLGNDGSRNWWATVCATGMLRLPGEDAKVFRDGNPKPQEELSGERGRNLVAGEWEESRDICTALGFQPDKLLGANKVRYSFPELNDRLLYALRRAQARLARLQSWSSVAYQEPDEKKRMAFEKRRKRIKEQIAEAIGTRAVEESKDEKNRGQELIERSNWLNDVEPLIEKEAWDAVATRIKAEIKSEREIIQRELVRIADRIQPLRGRRWEWVPRPNDTQNHILRQTKRGTDDRAKLLAGQRGLSMKRIEQLDSLRQRCQSLNRALRQELGKPANLGRSKRGIELPDPCPELLDRMEALKEQRVNQTAHLILAQALGVRLRSHTTSATEREKHNIHGEYERIPGREPVDFVIIENLKYYEMTQGRARSENARLMKWCRRHLRDKLIQLCEPYGLRVLEEWPADTSKFCSLTSVAGFRAVELTPEDAKEFRWKKHLDRLREETEGKRKLTNDEREESLRVKKLFDSLELMNADIRAANTLRPKWRTLLAPQKGGQIFIPASATEWFERKNRKTGKAEKVFGFKMAGLCRPAIMQADINAAISLGLRAVAAPENGEIHLRVRSENKSGKFSVRADNIREKARWGKKLPEITIPNEKHFADLLTEARPNFYADLGGVADFDKAEVSGQQNFASGRGLWGSIKGNERREGKDWLRVEEINRARIAKWERGNDDIPM

SEQ ID NO: 1445 - protein, 1452 aa, unidentified
  REGION 1..1452: note = Cas Enzyme sequence
MNRIYQGRVSSVEIPKVRTKNEWEQLPNGQDALWEHHRLFQDAVNYYIVALASMGVAPESKLTRLRGLLEQVWEVADKKGQRRQGMRESLQRAWQLVEPPTLAEAVERFQQPLRHNGVERLEQELAGESLAHDLGGEGSIQQGGMEYWPYFCQSGFKRGVTFPREASQLAKVKAVQQVARLVWHPLAGRHVHRIHSALKQFHFCNVAGGGVLLDEARTKVVFADALETLAKAHLISETQKHQLSEKLKIRIPNITEYAGGSINKDALKHRFYGFLVFKYLSPDEEGLSVLRRIYDEPSEKKSGKKKELSHKEKEEARFVSLEDDPIKMVRARAGIVFRAFTALPLWQNVESTKDLHEQSTYRHELTAGLLYQVVWKEFDVAAFKEALKVYNQFQQNVENREEKLTGFATKLLVMDGARAMQDYAGDTEGDQKLRARLENVWKECEGKPKAPANDNGEAVALPRFTGDARIDRLRQIINDDLAEEYRLTEGRRTAYGLRRRTMKGWSEVKRRWQKIVEKGNTYSKDTQAKLKSELDDLRKGEKREQIGSHKLFEALIADETAWCIWREPDDVLQKQIEKQEWAADPLETFREYCEIREAMEEVSARPLNFTPADPRYSRRLFNLKEGAGSFGKDTGEYRHDAKELAVTVPVAIRDPEGRFMIQRCRLVYSAPRLLRDRIRAEDGSYAQDWTQPMMRALFGDTEHAANPQELKDAAVQLMPDYDGKGQRRILLNFPLSLEDERIKARLGKDGLWQKQFVTWKKGAQLPFMRWPEEFDGKEPHRWWEKVSSLRVLAADLGTRHAASVALIECNKSSGGTARLIGKAGDTDWFGRYRSGSILRLPGEDAKVVRLESPLDKDARGKAFREELYGASGRPADDEECEKTMTTLAALNQSALLDGITDTAILKQRFSFPELNDKLLVALRRTQGWIATCISWQWKLTQPDSEEQRQNALGQLREQDRIPEWKQFADGKDDDIKKLREGLHGEITIQRQRVQEYLLQLTRRILPLRGRTWEWVVNPEKPDCHLLRQTDEGTGPENAKLRGQRGLNMARIEQLSELRRRWQSLNQSLRRKIGDKPLTASEMRNDPIPDPCPDILRKLENIREQRVNQTAHLILVEALGLKLRVPQMSAQSRQITDTHGEYAVGPPPVDFIVLEDLSRYLSDQGRAKSENTRLMKWCHRAIMLKVKMLAEPFGIPVLETPAAYSSRFCSLTGMAGFRAAEVGWADRHEFRWRVLTVEAAKARAEGKEPQPNAAHAAALFADLEKISHSDHPHRTLLAPQPGGPMFVTAKQIAHPAPSANRKHKEDRSVLPMQADLNAAAALALRAVAHPGCAHIHQRLRTERKKGGKNQPDSFLTREPRRFGKDKVAIVLREGDTLPKERNPNLFYDEHLVADFGRARLESDSDSTFPYSSGLGLWKGVNDRVAQWDRCKMINSARLRRWKEGKPEKDVPYQ

SEQ ID NO: 1446 - protein, 1452 aa, unidentified
  REGION 1..1452: note = Cas Enzyme sequence
MTTISTSSEELARTDNRASVPRAATQRAYSLRLRTSDPNDTSWREALWNTHDAVNKGAKAFGDWLLTLRGGLGHELAEPPAPSRKRSDEEPAVLRKQRRILLALSWLSVEDSRGAPNGTVRIATGADSDSIRRERVLTAFRAILRDRAMDDSQIASWVDDCKDAVAARVRGDAVWVNRSAMFDAARRTLGESLTREEVWDLLEPFFGSREAYLAPVVADEDRDSANEEKAKDLVQKAGQWLSSRFGTGKGADFGRLREVYSQVAQWATRGLMFESPAEAFRDLSTALAPFGPRSDDADGILGLMSGPGYKSATRNLVKAMRGAGAVTRESLTRLAEVSEADARKCEENIGGKGRRPWSDSVLCGAERLCGFTYLQAGGPARHSEFAVMLDHAARRVSIVHSWIKRAEAERRRFEQDAKRVHHVPPTARAWLDRFVRNRSEITGASAAGGEYRIRRRAIDGWDEVVKRWSRPGCTTPNDRIATAREAQSEADEDFGDIQLFEALAADDAQCVWRPDGKPDPEALKDYVVAHDARDKQRRFKVPAYRHPDPLRHPVFCDFGNSRWDITYAVHEAAKVRRLEKRVSRDDAEWLSDTRGLRMGLWDGTRLREVSLRWASKRLAKDLALKDLALDAVGATTPTRDVARADRLGMAASGLKSGETPSPAGLFALDDWNGRLQAPRGQLNRIAKLVDRGNPLKAESLQRRVDWLVTFSAKLECRGPWFEYVRDQADKAPFRKLVKSGPRKGRTFESPDGWPHSIPNEAREGHSRLILSWLPGLRVLSVDLGHRFAAACAVWEALSAPAFTRAIEGRRIAAGGRSIHDLCVHTAHIDEHGKSRTTVYRRIGADFLSDGSRHPAPWARLDRQFLIKLQGEEAPTRKASTEERSAVARLESELGYVRSADHTLPWRIDRLMSESVRTTRLALRRLGDAARIAHALDPKSKRHTPSGGSCEHTPETRRDAVLDALMRWHDLAHGDRWTNEWAARAWAEHITPNLSGGLPTLSDEADRWERKRHSEKLESVLSGPADRFARDGARHLSELWTQRWEAENAKWPARLKWLRNWLLPRGLRPRRDDTADRARLRRARRGAARNVGGLSLTRIATIREIYQIQKAYHYKPEPANLRAGAEKSESDSSADRKFGDRALQAMERMREQRVKHIASRIVEAALGIGRIEARALAAGAPRPTARVDEVCHAVVIESLRKYRPDELQTRRENRTLMNWSSGKIRKYLEESCQLHGLHLREVMPNYTSRQCSRTGLPGIRCEDVPVTEFLTAPWWRKAVTRAREKGDAESALLVGLFEHWSGIPEKEREGMTVRVPRSGGDLFVAAPPSGSLAPGFSDARALQADLNAAANIGLRALLDPDFPGRWWYVPCDSATGKPAKDRCAGAACLDLETSLLKAESTSGDEKPRGKARIREKTNAWHDVGSDGGWRTHNPYWNDVKARVVAVLRRHNGL

SEQ ID NO: 1447 - protein, 1453 aa, unidentified
  REGION 1..1453: note = Cas Enzyme sequence
MALFFQAKNPPTQSPGPVFLVLNACPASPPPLGSTQTMNRIYQGRANALQILTPVPLDRLDSKALAGFDSPLWRHHALFQDAVNYYHLCLVALAGPDANRPLAKLKEQMQAAWDDEWDTRPDSWRVLLAARLGISASSRFDDAMTKVLEGNGSAERARELAGELLLNKIEGDIQQSGRGYWPRFCDPKANPTYDYSATARASASGLARLAGVIHADGVSAEALARIAAEMDLSWTVKVQPAEFFEAADARARLLDGVKHFLKSATADSPSPKLAEVLERFPAGVSEWEALPEKIAALPDDVRVPRNRKASPDLTFATLLFKHFPTPFTAAVLGLSVAKPRPAKAAKPVEKVSARRKAGAVTQAVVVEDQQIDFAELGDDPIKLARGERGFVFPAFTSLTGWAIAAPHAPVWKEFDIAAFKEALKTVNQFGLKTGERNALLAEARRRLEYMNEETTVWKSSDSEEPGQIPPRLKTDPNFALVQDLLDNNGISNRATGEEHVPRGVYAAGLRGFYAIKKDWTELWERRLEKNAPPPTEQELLEIVTDYQRDHLNDVGDVQLFRALCQEKYWPLWRPLTEDEKAERNGQGRARDMIAAYREYLEVRDDADHLAKPIRFTPAHAERSRRLFMFSDISGSHGVKFGDDGHSVTVSIVSEVEGRLMPVRAQIDFTAPRVARDELGNLSGGSETVRWLQPMMKALGCPEPAMPALEKCAVSLMPDVQTKGDGRWVRLLLNFPATLEPAGLIGHLGKQALWFKQFNGTYKPRTMQVDTGLSLYWPGMDKAPEADAEGAWWNRPAVHQHGITTLSVDLGQRDAGAWALLETRCDEAFSRGKKSFLQLGEAGGKPWGTALLGQGMMRLPGEDAKTGALDDQGRRTVEFHGKAGRNAVEVEWNEALEIAALFGGEEAKSRLGVTHTQLSHPAQNAELLRLISRGQSRLSRFHRWSCRIHKKPKAAADDILDYGEVDAELTRLTTLMKEKLDHLKPEPDAAPEVMKAEADAVYARLEALIPELKKTVRDSLLRLANRELPLRGRDWVWNDAKGQLEEGNFSDDTLGRWIRGQRGLSMDRIEQIEMLRKRFMALKRQMALAPGVEVSQGVEDKGRRIDEPCQKILDKLDRLKQQRVNQTAHLILVQALGLRLRPHQESAQDRHEKDIHGEYEPMPGRKPVDFIVMEDLSRYLSSQGRAPSENRRLMKWCHRAVLGKLKQMCEPFGIAVLEVPAAYSSRFCALTGVPGFRAMEVHDGNADDFRWKRLIKKAEKDKSSKDAVAAATHFDQLRRLNAELREKKILDKGTPLRTLLVPVAGGPIFVPIQGGGPRQADMNAAINLGLRALASPTCLQARPKVRAELKDGTHHAIHGNKLEKAAGLELQPPPQPSKELATQKRTNFFFDEDGVGGFDTGWVIAGGKRIRVSGSMALWKAVKDRAWQRVAELNQKRIAKWLGLAPDSDDEIPM

SEQ ID NO: 1448 - protein, 1454 aa, unidentified
  REGION 1..1454: note = Cas Enzyme sequence
MYYRIYQAKVLEVAPISKKATKKSEPPQRMESQANPAWDTHAIFQDSICFYVCAVAGLAPKDHPTRKLVETEFSEIGKRLSQFNKNFDPNSFESFLTCIYGPKLLADKNARLDVFAFMQKQAVDDKKQKLKKLDFFGSNFIRRLCSEHTGQKGEEARIKADNDFARKYAEFVRLHNKPDFSDKSFSESIDLASCFNSPGKTIRGAEALRDYRFAFGYDIKTKKIKKDLTQGDVKAEHLRGLENAIHELRFRDGKVEEEFATNFKFESHAGEGRANPRKWFCLRYRFCADRTECKITRDALLAEISDLTDSGKEAESETTPIAKARKISGRYIFPYFATFAGRPEVAKGKKYQAWFPDLEKAAFIKAVEDVFKYRIRTDDRTARRNFALHKRNLMNGDGFKGYILDQRLVPENAVSDLSKEEKQLLRNKKLKTIPGFKGDPRVENFEELLASLDEGVGFTVTYPTLGGWSRLRREFQKVHSRMGGKKSDTEIVIALEEKVTEAQTKDPLGFGSEKLFKAITKKTFWNLWLPDIPALPNPARDFLYAKARYQELEDELEHLQGAISWTWPDPRKSPREFKFDITPHVKASNTSTDLIWKNGSDLEKGKFTLRIAGMRMKRDGLWKTDADKVDWSPPMVAAVLPENPPTTNLKGVSVSLSFSSPTKSNDKVSAYLNFSVPLSAKELKLLAGHRAEITKHKDQSEQQLKPVWRRQLISDRDGDRHCLRWPSDLKKAASEESEEPEEEGKGLTPSELWCGDGAEAKSTLGIKGFPECEKLESFRVLGVDLGIRRAVSFCVLEINTRGEGRIISPPGFQPCISAKIVRLGTHRLPGEDRCVSRIANQNDLVKFLERNLVLGKKYWLPELSGAKGRKPDDTTTHETAEFLQILNALLPDERGRDFSGLSFAEQNDELLFALKRRLGRVKRLYRLAWLLFGTSRYKPGTEEIEELNASMIAANEAKFLEEIKPTERDEETLDLSKDELKILRGMASQQPLPRKQIEDEILRLLRQWTTAENDGQSRLVTLASEVANRCHPRNDCVWLWKENKLGESRLLSQKFRRTPGQRGLSIDRIEQLELLRRCFMSLRDVSERKFALPVCLKRGKLKPECCPALLERIDRMKEQRVFQTAHLILQEALALRLTSTDEKPRDENIGQHGVYKRMDGHKPVEIIFLEDLSRYRTSTGRTRHENGRLMKWCHGRILDKLKQMAEPFGFVVATVPPDFSSQFSARDGAGGVRVTEVTAGFEKNYPFSKIIKERKKDGEPTALAKHVQSVVVTFAALQKNDPQISKRTLFVVVEGGQLFWPVNRDKPDQADVNAAATIAFRGVAHPLKLDIHQPIRCKESKENRILIQDWRLTKADSNFGNQELLDLHRQDENNEAVSQSAEDENEDTFPRLFSVTGSGLSENEFKEESFYTLPNGEQAVVQWSFFNTVGFRVRRKVEEVNKCRLENWLKKLGS

SEQ ID NO: 1449 - protein, 1456 aa, unidentified
  REGION 1..1456: note = Cas Enzyme sequence
MNGEATLPATQRAYTLRLTGSTKEDAVWRDWLWRTHEAVNRGAKAFGDWLLTLRGGLDHALADGDPGERQQRRIILALSWLSVESVNGAPSPFIVPQDRDAGGCKDWRTVEALREILRARGLPGEEAESWVNDCQPSLEAAIRSDAVWVNRSQAFDAATEQIGPSLNREEVWDLLERFFGSRDTYLAPVSDASEADGGESGGRAEDEEAKDLVQKAGQWLSNRFGTGQGADFSRMAEVYAAIGTWAAHAPAGMLGSNLVGQLAGDLGQFEPASRDLTGIKRLISGPGYKSATRNLLDAIAKMPAVDADMLAKLVETAAEDRQKCSEKVGGKGHRAWSDHILQAVESACGFTYLGGADGPARHTQFAVMLDHAARRVSQTHSWVKRAEAERRRFEAESRKLHAVPADVCRWLDAFCAARSQTSGAVSSYLIRKRAVTGWAQVVESWAKAECRTEQDRIAAARALQDDPELDKFGDIQLFEALAADDASCVWRVDDRPASQPLLDYVAATDADEKRRRFKVPAYRHPDPLLHPVFCDFGESRWPIAFAVHRAASRQADSEQAVARKREALQRMTKASPRATTDEARARRAAALTDAQQSLAEAERGSAWLQQPRALTMTLWTGSAFHPADLRWQSKRLGHDLALRQPRAENGAVPGTRAERLGRAAAGAADTTPVSVMGLYDLKEWNGRLQAPRAQLRAIARIRDDATLPAEEQARQLSRLIGRIRWLVSFSARLQPQGPWTLLAERLGLRPDPLYWPHAEENKKRQGQAKLILSRLPGLRVLAVDLGHRSAAACAVWETVTQEQVEEACRRAGRPLPTADSLCLHLTHEGRTTIYRRIGAETLATAAHPAPWARLDRQFLIKLQGEETPARLTSPHEIQDVETLEKELGSVALPDRSLRVDELMADIVRTVRLALLRHGRRARIAFCMTTDKQLIAGGREKPLTDEARVDLLAAALAEWHELTTSDRWSDAWARQQWDACLVPLLADQALPVAQGEETSRQRRVRQEEVTSALRPVAEQLGRNPALRMKLHVLWATHWREEDQRWRKRLRWLRNWILPRRKQDAVDTSIRRVGGLSLTRLATIRSLWQVMRAYRMRPEPDDLRKNIPGRGDDHLAQFGQSILDALERLRENRVKQLASRLAAAALGLGRELTARSETRFAACHAIVIENLTNYRPEDKRTRRENRQLMNWSSAKVKKYLAEACQLHGLHLREVPAAYTSRQDARTGAPGIRCEDVPVPEFLKPGGFWHREMLRARAHLDQGAAAVSVYDQMLLDLAARWEKRPEAEWKMTRPLRLPRRGGEVFVSTRMEPYVGSEGRIRFPFAQADLNAAGNIGLRALLDPDWSGRWWYVPCLPAPSHIPLEDRTRGSAAIEPGRTLPTDAGQASQTSAAPTRARSGRRRRAGAQERRAVNLWRDPAPESLIGSTWHATKEYWDNVAITVITQFLRPCNCLTAEAHP

SEQ ID NO: 1450 - protein, 1456 aa, unidentified
  REGION 1..1456: note = Cas Enzyme sequence
MENEKIFSDLTNRYQVVKTLPFELKPVPRTRVLLGLDNPNKGEIFSKDRERAENFTIIKKYIDRLHSLFINESLKKADIDFSNFYKQYGKNINTKNNKNIDDDNDINDDEKEDSENDNLKKYRQEIANLFNKSKYKSWVNVGKDGDKISGMLFEKGLIDLLRTHFSDNLNEDIEIPELFSNKKIKDTRKLKEIINSFGKDGKDGQNFTTYFSVSFHNNRKNYYKSDGKMGRVSTRIVDENLERFCKNIYLYKEIIGKNEIKEIFSGNWDIYLQKKPNFSNDKTYKKLDEFKNDKYDWEMIFRDVNSYNKYFLQSDIEFYNYIRGKLNQDINEYNGKKRDSKEKINSQFENLRNQVHGEKKNYDDDFEIDEDNIIQFINEIFVRHNQNKMRFSEKLFSDFIDLLMVDNGDKLDKVYFSQKAVENAIARYYFVEETTNEGREPLLISLLLQNAGKDRKKLSNKPIKLGDIKFVLDQANNKPAEDIFKNRYVLSESNNDGIINANDKNHWANLLRLIKKDFYFHKDNLIKSQDKLALETKYNKGSDEGERQIETIKNFAESAKAILRMTKYFDLRKNGVIQNVIGGKDPIHEEVDKYFDGDVLSGEESCRISKYYDALRNFITKKAWSADKIILNFDCSEFLGGWDRSQEQKKRGIILRHRDGDEERYYLAVLGKNGKQYFENRTLFKGCESSDWQKIEYNVIQKPHMSLPKNLITPFFKKDKITNERFIDRSKKGAKALIEIDINPSDEFLNNYNLGKHTKENLDKSFLCDYFKYLMDAIAKYYKGEFNFNFPDVSNFDNTQPFYSFIEKNAYSIKYFGISSKEIEKLIADCYYKEDVYLFQIYCKDFEIDPKIGKAKYGNEFRTKAEIRKSKGEEAGNENLNTKYFKLLFDEKNLKNQNGIVYKLNGGAKMFYRPSSIKKDEKIDGKWRYKEDKYSLNITITCNFSSKKDDLSIDKDINKKIAEVNANSDFRIISIDRGEKNLAYCCVMDENANILDIKSLNRITRYDKNGKAIKEKNMFHEVKDGKLCYGEPVYDFYKDYQNLLDEREIKRLVNRRSWNVIEDIKNLKKGYVALLINYICKAVVIAINEGKYPIIVLESLDKGMLHNRVKIEKQIYRGVEEGLVRKLNYFVDKKTDNVLNAWQLLAKFETVGSSLDRKKQLGIIFYVDPGYTSITCPCCGFRQRKYIKAERAEENFKEIKIKFDGKRYSFAYDYRCIDDNGKEKSKEDIIYSNVKRLLRSGRNGRAVQIEDVTDELTNLFKKHNINIEQDINEQLAGKDNKFWKQLLWWFNAIEQIRNTQSLRRKFNTEENKLEILENNDCDFILCPHCYFDSNKDKFQNKIWNGDANGAFNIGRKGIIDIFEIKKHQRMLSDFMEQWGIDKLPKANGGNQAVIEIVKNDKKYNLCILNNKKIPYYCLRIGKEKIDSIADDRKCNQLPDLMVNWKKWDMWLDKWGK

SEQ ID NO: 1451 - protein, 1458 aa, unidentified
  REGION 1..1458: note = Cas Enzyme sequence
VDTQDQSWREALWLTHEMVNKGAKVFGDWLLTLRGGLDHTLADTKGKDGKEKHGCNPTDEERKARRILLALSWLSVESRLGAPEKFIIASGQDAAEERNGKVVAALEEILNSRGVEPNEINAWKINCSASLSAAIRDDAVWVNRSKAFDDAVKSIGCPLPRDKAWDMLGRFFESEDAYLAPLEGSEDESSDTEQEDKAKDLVKKAGEWLSNRFGKGKGADFSRMADVYGKIAAWAGNAQAGTTGNNAINELATALSEFTPASNDLQGVLGLISGPGYKSKTRNLLTQLAQTPVVTQDNLKDLNKRAAADTKKCKEKIGSKGQQPYANAILKEVESVCGFTYLQNGGTARHCEFAVMLDHAARRVSLVHTWIKRAEAERRRFEKDLQMLGQVPSAVKEWLDKYCEERSNSSGALEPYRIRRRAVDGWEKVVAAWSKTGCKTPEDRITAARVLQDDPAIDKFGDIQLFEALAEDDAVCVWHKDGDPNREPDPQPLIDYVRATEANFKKQQFKVPAYRHPDAFLHPVFCDFGKSRWDIEFAIHEARKVKATKSALRRKNRQCFDSSRELFMTLWTGNEMKRVPMGWQSKRLARDLALGQNTPNDGAPEVPRADRLGRAASNVTKSNEVKIAGLFEEAEWNGRLQAPRRQLEAIARRVDKHQWDAKAKKMRDQLHWLITFSPKLRPTGPWFEYAATFPDNALAKPSVSRKGTFFVKYRDNERPRKGGLILSRLPGLRLLSVDLGHRYAAACAVWETLSKEKFEGEIKGRKVRYSDSETGGLFCHTEHGNNAVTIYRRIGADMLPDGTPHPAPWARLDRQFLIKLQGEEEETRAASNQEIWAVHQLEAELGRTSPIIDRLVKAGWGQSGQQRTRLDVLCKLGWKPISEDRVSDGTDEGEYEVRKPSLSVDELMFSAVRTMRLALKRHGDRARIAFAMTAEYKPMPGDRKYYFTEAKDLSTNDDQVAREHKQIEFIQDALVLWHGLFSSRGWQDDAARKLWDDHVAKLSGYNAPEEIREDASGVERKKKQKENREKLYSVAKALAGDATLRKALHDAWKTRWKEDDERWKRQIRWFKDWILPRGKASNDPAIRKVGGLSLTRLATLTEFRRKVQVGFFTRLHPDGTKAETKEHLGQSVLDTLEHLREQRVKQLASRIAEAALGIGSENRKKHWDGRKRARERIKDPRFIPCHAIVIENLTYYRPEETRTRRENRQLMSWSSSKVKKYLAEACQLHGLHLREVSAGYTSRQDSRTGAPGIRCQDVSIKEFMQLPFWRKEVARAEKKRAEGKGDARECFLCELNAQWKDKSKAAWGEAGIVRIPLKGGEIFVSADKNSPAAKGLQADLNAAANIGLKALADPDWPGKWWFVPCNSTTFEPLKDKVGGFAAIRLNESLKKAPASWEGEETKKKRSRDVVNLWRDVSSQPISASDDWREFTPYWNGVQTRVVNILRQSAGPIMNHGER

SEQ ID NO: 1452 - protein, 1458 aa, unidentified
  REGION 1..1458: note = Cas Enzyme sequence
LATKSYKLRLDLRDGEPLVDSGRFSSRADETRSVQQWLDETREAFNAGVDYLTGWLLRIHRGAGVCREKKDGVWREWSEITTLDELKRARSRYKEDPGSFALLENRDLLDAFMSKGRSEAEAIELAECCRRIAKELCPPGEDGSGAQMPRDDLDLLTLDTSTAKGIRDRGQDKSGNPKQKSGRRPRWKLKEAIAATVSSAHGWNNFETTVAATPQFQSAASDGKSLLAQLRQKHDGTAWADVQARLSEYASTWQEDRTKAEKRVADSAARGSIAAYRRMVERKCLPLPGLQRPSTQLRLASASAEWNYAMWNMAGQRVRSHLGWVRRRANERMLWELRTALFERGGWIRTNRNGKAVKNDELTPDDIRFEAPPECDVGDFEQRRAYAGRQWVKTLRRYESEEMPKHLEGVAFGAAGQPRIRRRTAKGWAKVREKWIDLIKKASGAGKLAPTASDLIEAVHQLRARKSRDYGDQRLFEWLAAPERRWLWDGSNNADDTDCGHEARDCVTAYFTHNEHLADKPDSITFTRSDPVKHPVWPFFGENSAVEYWLAQQQAPNGKGRLVLVLKQLLSRQPDRSYTAVDRVMIALRGYDDFEKSFAVPNGTAEVSTKQTLVFRDDLLGEKTRQGTLSGMKLTWERDELEAANRTRAPVRTPARIYANFSCDAGEAALPAWLTKHVGSDVKLKKARDGMTRSFFLKKTIGKDGATEDGAARLPPEQRKWPQEAVDNGFTIRGTDLGYRTSSAGAWWRLSFTKPAGKISWTIGKCGNQDVYGVLERSATVSLPGDGEPLPSFEQALRDRLYSLRTRLNLNNALLRIARLLALQEITQRIRVGDKTRTRSDRTTKRIGAHWKTETKTLTKDEIKDNCRKAAEQLIRWGSTDAMSESLTAIDHDGPLWGWLALRDKNLKRLGGLLPTTFVPTEKEAKEQKLDRDTVKAAREKEDDAFASCAYELRIPLAKALCDGHDPEKHIRAKSGLWAEFDAALMRGLSYSDRGNGNGNRVIFDDGLLRVLRQPPVTKHNDRKDDANNLPHGRTHRGGLSMARLNFLDDVKNFVRRWSCRPRWPGDVRRVPEDAKFDRCDTEHLDHLREHRAKLIAHTDVAQTLGFDQDLRRGLWRYRDPSGALLWHRPERGHWYREHDGRLVQCQPPRAVSEGDALHPHPAYDPAHVLVYEDLTRYRMSSDRPKNENAGLARWSHRRILAFAQHIGGLFGVPVATVDARFSSRYCSQCGAPGSRAVRFDPAWLNQSWMQRVIQSNDIRDAAMKSVATDVRSRIDHDPHAFDREEDRAWVLRDGGTHFVCAKSGCPIHSQPINADENAAANIGLRFLRGVDGIRVTINPNGKVARSVGYVPPGMVLTQAGDANTSQGEPYWSGDAAGASTGSSRRGGGTRNEPSPETDIEDDAESGGVRVLFRDPSGGFRCRDHWFEGKVYWAAVARSCAAGIKAVNASRFGSDEGD

SEQ ID NO: 1453 - protein, 1459 aa, unidentified
  REGION 1..1459: note = Cas Enzyme sequence
MLKQGGKLKNQKSVWDEFTSKYALSKTLRFSLIPVLTEQQENKIIGEKGYSSKEQIRRQDRVEKFFNDNKENIFEVDIERKKRYKALKYYLTELHKLFVKESLEKVKTDETIDFSELFKYYKQFETCKDDEQQKQLSKSINEEKVKLAKYFGNKEGKGGVFQCIAEKYYDWLREHLEDEEKISDDSDKKQRKNNILLSKNVLLVLRKKIKNGEIQERKEDGYELNEVKYLKKEKLIEGTLVEYFEGWSTYFKNFNEIRGNLYKDYGRKEDIEESEGKIKIKKANAGQLTTRILDENFEIFIRNVVWAEKNKKTLRLSNFQDKDIVSGISVFDSKFYIHCLLQTDINVYNKIIAELNTFFNEKKGKNKIDYLKNLHKQLLLTDGLEDKFVEEILDDDELIKKLEEFKTHAKEKITSISGFLKDGDIDGYLADIQLNENQLHYFCNKYFGSWSYLRDLYYEQNDVADKNKSKDKKSEFKDKEGIVKSDISLDEIKELLINESKEDFIEAVKRGWFCFDFETQKADLKPLIEVGVYNESVSNFENFTSFLKFEINSLLYGRTILSRKEIGNQNRIADVKSSLKAKKNNGERVDDLLVAKFSEEGFVKNIKEGAEEKQKNFEQAFKQLKEAVASNKKLARDKDFECKRLINEYCVRVSDINIFFALFTVPEGVDGNHINNTVRKFKENNTIVPFFNVIRNFMTKRADEVEKIKLNFDINNLLGGWGYKTEEHPRSTDYRCRLYSKDKTIYLGIVGDEDHSFLDKKFQLMDYYQLDGKGIFNVYRGKFDKKYKEEDRLKLSNEVLLNNIEKIIDENLLTIFPKAQDYLKDIKNKLANGVYNFIITRDYIDDQFKIKTNTEYDKYKKRDKDKIIIDILKKDFGNIFNFSSEEVYLFNRIKELFGKTPKRNDFIGVDKMVYELTKLEPFFYKTNFNSIKLNSNDTKIKALFQIYCKDFSQTRDKDSTKNLHTLYFEELFSEDNKENPIFKLSGGAEMFFREKIDDYKIEQWERKDLRKPKTDKFPNKKRRFTENQILFHVPIVLNNINDGGNINREIHKYIQKNEDVKILGIDRGEKELAYYCLLDKDGKICEGPKTLNITGSNIMNGTKQSVNYRNKLDIREKERMMARRSWTKIEDIKDLKSGYISNIVNDIARLAVDNKSMVCLEELNHGFKKDRSIRIEKGVYQRLENALVDKLNYLVLKKTPEGVRNALQLTPENRALKYWGNQMGAIFYTDAKFTSKTCPHCGFRRRGVESMKTAEIVKEKIKEGQLNVFFEKDKDRFRIEYGWKVKDFDFGCEDLYGKSQLEVIYSDVERNSWNNDDLKEIFRDCLQNGVELFSLVKNNSNFRYGDFGKVFNSLTWLRHSVEKNEVKLDRISCPKCHFSTMSSKVQKIKDGDANGAYNIARRGMMIFEKIRSQGLRKKIKTKKGIESKDLKVTLKEWDKETYRQWDKKDWLESKNERGL

SEQ ID NO: 1454 - protein, 1461 aa, unidentified
  REGION 1..1461: note = Cas Enzyme sequence
MPQQPTTQRAYTLRLRGADPNETSWREALWQTHEAVNKGAKVFGDWLLTLRGGLDHALADTKVKGKKGKPDRDPSAEERKARRILLALSWLSVESKLGAPADFIIASGEETAEARNAKVIAALEEILRSRDVAEEAIGDVTKKPEDQPGTWIGDCAPSLTAAIREDAVWVNRSKAFDEAVKSIGSSLTREEAWDMLERFFGSRDAYLAPAKGSEDESSETEQEDKTKDLVQKAGQWLSSRFGTGKGADFCRMADVYKKIAEWADNAQADTTGNDAINNLAAFLSEFNPASNDLKGVLGLISGPGYKSATRNLLTQIAAKATVTQQDLARLKDTATEDARKCYQNTGSKGQRRYADSILKDVESVCGFTYLQEGGPARHSEFAVILDHAARRVSLAHTWIKRAEAERRKFEEDAKKIGQVPKAAKDWLDQFCLERSGVSGAQEPYRIRRRAVDGWKEVVTAWSKADCKTAEDRIAAARALQDDPEIDKFGDIQLFEALAEDDAVCVWHKDGDAAKTPDPQPLIDYALAAEAEFKKRHFKVPAYRHPDALLHPIFCDFGKSRWDICFDVHKNTKTPFPRTLCLTLWTGSEMVSVPLCWQSKRLARDLALDHGRQDLGSPKVTRADRLGRAASNVTENDEVKIAGLFEQADWNGRLQAPRQQLEAIARYVAKNGWDEKAKKMRDAIQWLVTFSAKLQPNGPWCAYAEEHNLNKDPQYWPHADTNKDRKSHARLILSRLPGLRVLSVDLGHRYAAACAVWEALSDKAFKEDLEGKKIIRGGTSDNSLYCHTEHEVNGKKHITIYRRIGADTLPDGTPHPAPWARLDRQFLIKLQGEEEGVREASNEEIWQVHQMECTLGRKTPLIDRLVAAGWGSTEKQKARLDALKNLGWKPVEKAETSEDADTEEEELSFRPSLSVDELMSSAVRTMRLGLKRHGDRARVAYYLITDEKTKPGGIKEKLDENGRIDLLQDALVIWHDLFSSRGWRDDAAKRLWDENIARLCGYKAPEEIGENASGVERKTKQKENREKLHGVAKALAQDVTLRKALHDAWKKRWEEDDGRWKKQLRWFKDWVLPRGKHASDPTIRKVGGLSLTRLATLTEFRRKVQVGFFTRLHPDGTRAETGEKFGQSALDALEHLREQRVKQLASRIVEAALGIGRMKRPAKGKDPKRPEVRVDEPCHAIVIEDLTHYRPEEVRTRRENRQLMDWASSKVKKYLSEACQLHGLHLREVSAAYTSRQDSRTGAPGIRCEDVPVKDFLNLPFWKKEVKSAESKDDAQSKYFIALCEKASVMTEEEKKKTSFRIPRRGGEIFVSADETSPASKGLQADLNAAANIGLRALTDPDWPGKWWYVPCDPVSFLPVKDKVEGSKAVKLDQPLLAQEQSGDGAKDKKKRGKKGAGKSKEVVNLWRDVSSREISPEDVAWEYYSAYQNKVQSRVISILKEQMKDRDRQPHEGSKEDDIPF

SEQ ID NO: 1455 - protein, 1461 aa, unidentified
  REGION 1..1461: note = Cas Enzyme sequence
MNRIYQGRVTQVQQRQAKPAEEVGGSPKARKGTETEWVKIENGETLLWRHHELFQDAVNYYIVALASLGSSPESKLTKLRGLLGKVWEGFDKKGQCRQGMRDSLQRAWQLAEPPTLEEAVARFQEPLKADSIPSHTSEKAGEFLLHKLGGEAAIQQGGRDFFPLFCDVDSTATFKLSATRRGRTDDEARLQKVLHEDLDQTQIEALAASITLGSVVNLQPDVDSDSGDAVVARLREAQATFTEIITTESFDEWLKDLSAEFQLPKRRGGNINVERVNACTLFLAFPNATTKQVFQSTFKVPTAPKAEKTKKDPDAVEVTDESFIIDGDDPIKLSRGLRGCVFTGFTALPLWRSDTGKLVWKEFDIAAFKEALKVYNQFQQNVEKREDKLNSLASKLLIMDGERAAEAYTDETGPDLRVRLQKLWKETKGKPKAPANESGEEQVISRFVGDARIDRLREIVNDDLAEEYRLTDGRRTAYGLRRRTMKGWGEVKRKWQTIVKKGEAYSDAKRAQLKSALDEMRGGEKREQIGSHKLFEALIVDEAAWSIWREPDEKLQELILKNEWAADPLESFREYCEIREALEEVSARPLNFTPADARFSRRLFSLKEGAGSFGKGKGQYKHDRKSLSVTVPVAVRGPDGRYESQVCSISYSAPRLLRDQIRAEDGSYAQDWTQPMMRALFGDQEKPSPQDLDEADVQLMPDYESNGAKRILLNFPLSLDDSKIKTLIGKSELWQKQFVTWKKGAQLPFMRWTDDFDDKVPHRWWDKVSGFRVLAADLGTRHAASVALVECGQQGGGTARLIGNAGGKDWFGRYRSGAILKLPGEDAVVLRPESPLDKDGRGKAFREEPYGSRGRPADLTECQETYAMMTALCPAENPALPDKNWQPFQGLLGGITSDGVLQEEYSFPELNDKLLVAMRRAQNWIANCISWHWKLSQPENEAQRQSALEQLRDHNRMPEWKALADGSEENLVKLRDALHIHISTQRQRVQENLLLLTDRIIPLLGRRWEWMKHPEKEDCHLLRQTAHGTDERKTKLRGQRGLSMARIEQLSELRRRWQSLNQSLRRQIGDKPLTASEMRNDPIPDPCPDVLTKLENIREQRVNQTAHLILAQALGLKLREPQMSAKSRVITDTHGEYEVARPPVDMIVLEDLSRYLSDQGRAKSENTRLMKWCHRAIMMKVKMLAEPFGIAVLETPAAYSSRFCSLTGMAGFRAAEVGWEDRHEFRWRVVLKEDLADLQQQIVSAAGNKAKRETLERQYEVAKAVKEVFGALEKISQSVHPKRTLLAPQPGGPMFITALEVAHPAPAPNRKQKDKRSVLPMQADLNAAANLAFRAVAHPSAAHIHHRLRTERKKGAKGQDDSFLAREKRRFGAEKAVLVPEKANDLPKEKNTNFFYDAHGVAQFGRARLEADAAGVFPYASGPGVWKPVNDRVAQWRRCSAINQARLKSWIIDPSDEIPMG

SEQ ID NO: 1456 - protein, 1461 aa, unidentified
  REGION 1..1461: note = Cas Enzyme sequence
MNRIYQGRVSTVQTLVPGSTGLLPEHWEPLDEFPMAAKKMGEEVLFRHHELFQDAVNYYVIALASLGSSPASKLTRLCGLLENVWDQANKKGQQRQGMRDSLMRTWQLAEPPTLADAVERFRQSIQANGVPLTTAEKAGEYLLSKLGGDSAIQKAGPDFFPMFCDVESNPTYKLSAKRRERADDEERLRRALHDDLSEVQIRELAASITLGSVVNLQPDVDPDVGEAAFERLKAARTTFASEVSEELLNEWLVELDDSFSMPKSRGGNINVGRVNSCLLFLAFPNSLTKSLFQSTFSPPKPASVSKKAMEVLDDTAKDESRFLVDGDDPIKKARGTRGFVFQGFTSLPIWKADGSKLVWKGFDIAAFKEALKVFNQFQQNVDKREEKLNSLANRLLVMDGERAMDGYSRESVRDQQVLERLEKIWRECKGKPKLPANDNGEEATVTRFVGDKRIERLRQIVNADLAEEYRLTDGRSTPYGLRRRTMKGWVDVKRKWQSIVKPGVPFSEELREQLKTALDEMRGGEKREKIGSHKLFEALLADEEAWSVWREPDKALADLIVENGWPADPLDAYREYCEIRETIEEVTKRQLNFTPADPRYSRRLFIFTEACSFCNDRGEYKHDPNELAVTVPVAVRGDSGRYSVQRLRLLYSAPRLLRDQIRSDSGAYAQDWSQPMMQALYGEKEGASNPQALKDAAVQLMPDYDSKGERRVLLNFPLTLSTEVCWQRIYELRGQEAVYGLRYSKRDTKKKTPLNGGLWESNIRTFWESDSPKQRDALLWPDERASQDWSKGNWWDKLAGFSVLATDLGTRHAASVALVECSHEKQGTSRFIGHAGGKAWFARYRSGSILRLPGENAMVLRPESPLDYKKGMGTAFREELYGERGRMADEKECNQTLEILEALSQSELMADVTDAAILQKRFSFPEQNDKLLVAVRRAQGWIANCISWHWKLSQPDSEEQRIAAIGQIREHKRVPDWSSLADGTAENLVLLRDLLHNEIIAQRKRVQESLLLLTARILPLRGRGWEWIGHPAKEDCHLLRHTQDGTGPTKVKLRGQRGLSIARIEQLSEVRRRWQSLNQSLRRQIGEKPLTASEMRDDSIPDPCPDILVKLENIREQRVNQTAHLILVQALGLKLREPRLSPKHRSDNDIHGEYQVVRPPVDFIVLEDLSRYLSEQGRSRSENTRLMKWCHRAVLIKVKMLAEPFGIPVLETQAAYSSRFCSLTGIAGFRAAEIGWGDRNDFRWRVLLKEAAEAREKGKPPSENAVFAVALFAQLEEIGKSDQPHRTLIGPQPGGPMFVTAVEVAHPSPSNKRKQAGNIGVLPMQADLNAATNLALRAVAHPSCASVHHRLRTERKKGAKGQADSFIAREPRRFGKDKIGIVIEKENGLPKERNPNLFFDEERVADFGRARLENDSGSNFSYASGPGLWSNVNERMLSRCREINERRLRHWSEDPSDDIQY

(The sequence listing continues in the following parts.)
